United States Patent Application Publication US 2015/0240253 A1 - sequence listing, part 42

SEQ ID NO: 197667 - DNA, 1962 bp, Zea Mays
atttcgccttcatgttacgggactacgagcttgccttgtcaaactacagactactcgctactgattataagcttgataaggcttggaagcgatttgctggtgtacaggtacaagaatttttttgactcgttttgctgaactttctctgtggatatacatattaatagtctgtttagcgtttttaattgtgttgtaaaagcaaaattatgattgctattctgaaggaatatcccggtatgtatgccaaacatgttggtcttgtttacactaaaagcaatgggcagttccattaccaacccagctttcctacaaatatggcgtttggcctagaaaacatcagatgatacatgtccactatgttgcagggtttctggattgtttttacttgagtctggaatcaccttaatgtgtttcacatattaacttcatgttgataattgatatacatatattctcttttgcaggagatgagtggactttgctatttcattttggatcagtcgaggaaggacgcggagtattgcatggaaaatgccttcagtacatatttggtatttatttagaaattcacatcttggtttcctggcacatgcaaataattatttcctttatattgcttattacttaatcttttggatattgttctgtggtcttgtgctgttaccccatgcttcttatacagaacaataaggagcccaaaacccattttgcatggaacatctttttcgtgtttatcagttcttaacttcttattgaatgctcaattcaagtcttatttaagcaacaatcataacaaacagctacaattctgggccacatcgccacatattcatttcattctagtttcttgttacaacctctgggccatgttgccacatattcatttgggaagggaaagggatgacattttagactggctacaagttctgggccacattgccacatattcatttcattctagtttctggtttctttcggaaacgtgtcctgagtcaagaaaagtcagaatgtacagggtccaccctgatttaaaactaccctcttcaatatcaaatggtttattatgcacattctgatactagctgtacaaatctgaatatcctgaggtatggtgcgtttagaagaatgcacaaataagtgaaatatgtgcccatgacaagatactacacttatgatatgtagatagtagactctttagttttcttgattgaacttcttgtagccttctttcattcaaagtgtaattcaccttttcatatatgcagagaattggatcttctggccagagaaatgctactagatgtggcctttggtgggctgaaatgcttaaaacaagaggacagtatagggaagcatctaatgtgtatttccgtgtttctaatgaggtagatttcctgtttgtcgtggaaaatttttagctgattagatgtattattgattgattgagcatctctgctactcaggaaccttctttgcattctgctgtactgcttgagcaagccgcttgttgctatctattatgcaatccacccatgcttcggaaatacggatttcacctaatcttagctgggaatagctacttcgtgtctgatcaggttcataataattcttttactgttcttgtaatccctttcaaagttcattgaatcattgaatcttttctaaatcgttttttcattctttaactgcagaaacaacatgctgttcgggtgtacagaaatgctttgttcgtttacaaacaaaacccttggagttacatcaacaatcatgtacactttaatattggaaggtagttagtattttttagctcctgtccaggttttatcttgtgtctgtctttatgctgtacttgactctgggtgtactgataggtggtatggagttctcgggatacttgacgtagccatcaagcacttgcttgaggtcattgcttgtagccatcagtcgctgactacacaaaac

SEQ ID NO: 197668 - DNA, 621 bp, Zea Mays
aaagagccatcttttgtcgtcccaggggttccagcaatagttcaacatgaaataatgaataatagaaggcatgtactgacaaaggtgagatttcttttacttatcttttattactaaactgcaaggagtggcatattgatgtgtgcactcatatcctttaattcaggataccactggttcagtcaaattgtgggagatcacccggggtgctgttattgaagactttggcaaggttatttgtttctcaatttcgtagatgtttttcccttggatatatatctgctatttgtatcccgtttttgtaatgacactggttcttacttgatgacctttcgaactaacaagatgtttgtagaatgctaaactgattcgttttgattatgcaggtttcatttgaggataagaaaaaggagttgtttgagatggtattattgaaatgtcatgatttcagagttttatttaaaaaatcgctacccatgtactgtttaatttatcaattgattattaggtaagcatacctgcttggttcaccatggatgctcgattaggatgcttgtctgtccacctggatactccacaatgcttttctgcagaaatatatgcagttgatctaaatgtttc

SEQ ID NO: 197669 - DNA, 370 bp, Zea Mays
caccggtcgccatgagctttacctcgcccgccattctcttgactgtgtgtgtcctcctccacgacggccagctcatccggggcatgttcgtgtccttcgatctagtctggaaccctattcttcgggactgcgtcgaggtccaccctcaggtgggccgtcacgtgcctggaccgcttgtcttcccacgtgctgcgatcgcctccctagcggttgagcccgtgtcatctccctcccttcctattgcctctgtcggggcaccttctttggccctctccgctcacaccgtaccttcgccacttccacctccccgaaccaccaccgattgggtggttgactccggggcctacttccacactacccccaccactac

SEQ ID NO: 197670 - DNA, 344 bp, Zea Mays
cgtggaagagatcgtagggagcagtggggtggaggaagagagggtaggacaggcccatttccgaagtggacattccccaaatttcagggcagtgatccaggaatatggtttgatcgatgtgtagattacttcaatgtctattaggtgccggagtgaatgtgggcgagttcggcttttatgcacatgaggggaatgcgtcaaggtggctgcaggtgtataagttgaaacatggattgtgtgattgggggcagtttacacaggcagttagggagaagttcggagtaggcgaatatcctcaagctatgagagatttagtcaatgtgactcagcaacaaggagtggag

SEQ ID NO: 197671 - DNA, 388 bp, Zea Mays
aatacatgcaatatgctgttgtagagtccttccatagcatttatcatattctgacgtctatactagagaaagaaggccgcctctggtaattagtgtcactattgtattttatcaatgctccttttttattcttctacatcatattggttggtggtccttgttaggtttatctctaccctgcttcaactttttttggactgaaaggctttgtttttattgctgattgttgtaatcacaaagggaaatacatgtgttaggcccaggtccattacaacaacaaacacacaataatctaacacccccaggtcgcagttgaaactcttgctgcgacagatgttgagactagagtgaaactccgagaacaacaagagaagaccgttggtgaaga

SEQ ID NO: 197672 - DNA, 278 bp, Zea Mays
agtcaaacattgtagtgaatatgggtagcaatagcacaactggaggtggaaagtatgttggttaagtaagaattaggtagcaatagcacaactggaagtgggaagtatgttggttaagtaagaattaggtagcaatagcacaactggaagtgggaagtatgttggttaagtaagaattaggtagcaatagcaacaggcaacagctacatttcatgccatggttacagctttgcatgttcaattggctctcttggacagttgtgtatacaacttgtgga

SEQ ID NO: 197673 - DNA, 599 bp, Zea Mays
agaaaatcaactgttggtaattctcccgtagtccaacctcatgttggatcacgggctgtccatgagtaccagttccttcctgagcaaccaagtgatacatatgagagggcaagtcctcactactatgacactccagtggaagcttcaaattccaggataccttctctcacatcaggatcacaacttctccatggatctgaggaggctgcgcctagttatgcttttcaaggtcacacatctggttctagcctgttgcctccttccagcaggccccaggtgtttccagtagcaccaacagattatgagatgacccagtttaatagcaaccttagttctgttcctgttgaaggccagtttgatacgtctcaggttgctgcatttgaagacccacctgtatcgtctgaaagaagagcttatcatgatgaagatacttctcgagtggaaagaaaacgaaaagtatgattcttaattagtttgagtttatatactcatattgcccttcaactttatagtcgtatacttgtatacatattaaatttgtctgggattttcttcagcataatgaagaagcaaagattgcaaaagaagttgaagctcac

SEQ ID NO: 197674 - DNA, 489 bp, Zea Mays
agaaaggatgtatgctgggatgttagagcaacaatatttctctatgttcgtgtgtgatgaacactgataattccttgctgcatttggattacatgaaacttttacagacccgggatgaataggtgtgagattagtgaagaggagactacgaatgctctgaatgcactttatgtccctgcccctgcaaatggtattcctgcagttggtcatcctcatgttgcttcaacaggactagtaacatccagcactcccaacatgaatggacatattgagcagaatagaaaaagaaaaaatattccaagtgatggaaattttgtggctgagggttctcacctaacacaggtttcaggtcatccaatgagcaaccaacatgctcctagtaaaactaaaacttatactgatggtatccagtattcggctgagaggcattctgtaagcaaatcagttgacccaataattgaaaagaaaaggtccaagagcaagcatcac

SEQ ID NO: 197675 - DNA, 502 bp, Zea Mays
aactttgggttgggaggttcctgatctctcatggaagagctaatggtggtgaagttgtagtagcactgtttgctattatcttgagtggactgtaagaatgtagattttaagagtttgtttttagtttaatttaaaaatgtaccctaatattcatcaaagcttttaactcattgtagtggacttaatcaagcagcaacaaacttctattcctttgagcaaggacgtatagctgcatacagactatatgaaatgataagccgttcaacatctactgtgaaccaggatggtagtaccttgtcttcagttcaaggcaacatcgagttccgcaatgtctacttcagctacttgtcccgccctgaaatccccatcttaagtggattctacctcactgtacctgctagaaaaactgttgctcttgttggcagaaatggttcaggaaaaagcagcataattcctctaatggaacgcttctatgacccaaccttaggtattatcgttggca

SEQ ID NO: 197676 - DNA, 634 bp, Zea Mays
ccttatggaggccagaaacaagcatacacaaagctatccataaaactggacaaaaaacactacagccctaggagctaggtagtttggctggcaaaaaaggaaagccccttggcaccagccagccgccacgtctcctgttcatcctcagcagcttgaagaaggaaggagatagagggggtccttccatcgaacaccaccttgttcctatgattccaaatcatccaggcccctaaagcaacaagggagtccagtcctttctttctcatgttgaggacctgagccgaggaattctcccaccaaccaaggaaggaaggctccacttgctgaggggataagctgtgtaacccaaactttctcaaaagcctataccagaaaactcttgagaacacacaggaaaccagcaggtgatcaacgctttcaggttcttgatcacaaagagggcacctagccggatggttcatgcctcttttctgcagcctatcagcagtccagcatttatcatgtgccaccagccacaggaagaaatggcacttgggtggcatccaggatttccagattcttttgtggtgaagaaaggagcacgatccctggaagagcccttcataagcaacttttgctgagtagttaccatctg

SEQ ID NO: 197677 - DNA, 381 bp, Zea Mays
gcaaagttttgctaggcgctaggcggaatctaggcgatgacccttagcctagggactagtccagcctaggcttgcctaggcgatgctaggcgtttttctaggcgttttgccaacttatataataatatatacatttatagataaaaaaatagggaaggaccagtagacatacaaccgtgtaggagagaagcaagcagtgggagagaagcaaacatgagaggagagaagcaggggtccagcgtccggtaggggtccggcgtcagccgtgctggagagaagctgcagccgcgtctctggcgtcagccgtgcaggagagaagggagaagcaagcgtcgaaaggggaagaactgaagaagcaagcaggcacttttcaaccgcaaa

SEQ ID NO: 197678 - DNA, 603 bp, Zea Mays
gtcatggacttcatgcaacaaattgggcaggttgttgaatctctcattaccagttaacatatttatgacttactcagcaacagtacaactccaatgttgtgttgatatatcaaaatattctctccttgaacagaccaatcgtcgtgccttggcaactaacgagtggttaagggttcgcgagtgtgaaggcgtctatgcaattggcgactgtgctacagtgagtcaaagaaaaataatggtatgtgcagagcctctaatccctatttacagatgaagcctactgttcttgctttccaacctgacagcttatgctgatattctgtaaatcgtgaatgcatacatcaataggttttgttgctggataacttcatatgtacgagatctaccattctgtagctcatatgtttttttttccaacatcaaacccctctgacttatctgtttcttgattccaggacgatatttcaacagtattcaagatggcagacaaggacaattccggcaccttaacactaaaagagatcaatggtgttttagatgatatatgtataagatacccgcaagtagagctgtatatgaaaagcatgcacatgcttgacattg

SEQ ID NO: 197679 - DNA, 412 bp, Zea Mays
cagcctgtacaaccttgatagggaggctgaactgtttgtggacataagcgcaaaaattaatgatgtgagtggctacctcggacttacggactagagggaaagtccagcaaaagtgagtgaagtcatcgaggatgactaggtagtactgcgcaccagagacactggcaacgggagaggtccaaacatcacagtgaataagctcaaatggtagagatgaaactgaactggaatttccaaagggcagcccacgtgcttgccaagttgacatgaatgacatagagtatgagcggacttattacatgagatggaattattttgtctaagcaaatttagggcagcagctcctggatatgaccaagacgatggtgccagaggttggtggaggtggcgaggttggcttggggcgtggcag

SEQ ID NO: 197680 - DNA, 372 bp, Zea Mays
tctcctctcctctccatgcaaccattaggcaaggcatcaactatggaagttactgccaacaaacataatgccaaagcaacacctaggcaggagagtatctaggccagatgaccatcatggtcttgtctgaaattggtgtggccattaggaactatttgctctgcatacagtaatatttcgttggaatttccaaaactcgtcagggtcggctggcccgatgacaaatattattctattggaatttccaaaatttgtaggatcagctgatcctggtggcaaactgtagctccacccatgctcctaggtaatgccttagaaccatgaaatgctccacccctgctcctaggtgatgccttagtaccatgaaatgct

SEQ ID NO: 197681 - DNA, 548 bp, Zea Mays
ggtctatggtttcaggctcttggtctcaaaggaggcatcattcaggttgactgagccctcctttttgcagcctatctgctgtccaacaccttcttaaggcaactagtgaaaggaaaaatttacacttaggaggtcaccaagaataccagattctttccaagtgttcaaattgggtggatccaataaaaaggcctttataggctgccttggcagagtatttgccatcagttacaggactgaaaatgtgcttgtcatcgcgccccgggatatagggttaactgtaagaagggtttctgaaagatcaaggaaatcagcaagcacccctacagttattgcgccctgatatcagccatccatttgttgtcctcaatagcatcatgaacagtcctacatttcctgatctgcttggggatagcaacaagcagtctaggagcgaagtctgatatcctttttccatgaatccattggtcttgccaaaacagagttgaagatccattcccaatatcagagaaggcggccctagctttttctgctagctgtataggcag

SEQ ID NO: 197682 - DNA, 329 bp, Zea Mays
tcaagactagatgctatcgaccttttgggctagatgcaatagtaatagaaggcacaacaatatctagtactacttattaaggctgtaaaggtagcctgccttttctcgttctgccattctacgatctcaaccattcgttctacaattctataatcccagccgtccgatcctacgtttcagtctagctccccgatcccgcacaggcgcacaccgatcctgctcctatcgcgccccaaaaccctctcgtatggaaaccgtcgcccccgacctcccatctcctccccgaaaccctctccttgccctcaacgccgtccctcctgcaatcccgc

SEQ ID NO: 197683 - DNA, 326 bp, Zea Mays
tgcgggtgaagcggaggaggtggtcgttgaggccgttcggcgtaggggcggcggcagggagatggcgatccttggggacggcggtgacgggttcatcgatgtcgtcgtcgtcgagatcgccgcagaggtcgaagggagggggagacgccatctagccgcggagacgcccaagaggcaagaggcaaggggacggaatcgaatcgaggatgcgcagtggggatgggtgctcttcctcgtcggttcacacctctctcacttgccgaggagaggaaggagaggcagcagcgagcgtgtgtgactctctagtctctacgactctacctcca

SEQ ID NO: 197684 - DNA, 406 bp, Zea Mays
tttgtccaaacttattacctccagtgttatttcctgtaataaagatgatgtcaaccacatctgtcatgcgtgtcaacttggtcgtcatgttcgtttgccattcagttcatctagctctcgagcttctcacaattttgacttaatccactgtgatttatggaccttcccaattgttagtgtgtcgggctataaatattatctggtaattcttgatgactgctcccactacatttggacgtttccactccgtctaaaatccgagactttttccgcccttgccaactttttcacctatattcgcacccaattcgacaccgtcatcaagagcatccagtgcgacaatggtcgtgaatttgataattcccaggcccgcacattttttctctcccacggcattgtcttacgc

SEQ ID NO: 197685 - DNA, 295 bp, Zea Mays
cccacaacgcaactcacgcacacaaccaaaacagcccatcaaggcgcacgaccacccctgcttcagacttcatctcctgctgactccactccctggctcactgcattctccgctatggcatccaccggtgtgacatctgcccccctgcaacgcttgcttggccccaagcaagagcatctggataacgctgacgcagaacatagtaatcctcccaagttgtggcatccgctggaatgtggctccacctgatcagcacctgcggcacagcccgactccctttcttgaccaatctgcg

SEQ ID NO: 197686 - DNA, 384 bp, Zea Mays
aaataagagtcctcagaaggtgttgtggcattttcctttgattcctagattgaggaggatgtttgctacggcaaaaatatctgaggaggcacagtggcacaagttgaagaggaaagaagtgggaaatgagcttagccatccagctgacggtgaggcatggaaagactttgacagaaaacataattggtttcaagaagatcctagaaatataaggcttgggctagccacagatggttttaatccgtttggcaaaatgagctcctcttacagtatgtggccagtttttgctatcccttataactttcctccgtgggtatgtatggagcaatcaaacttcatgttgtgtctactcatccctggtcgggaatgtccaggaaaagattt

SEQ ID NO: 197687 - DNA, 456 bp, Zea Mays
ttaatgggaagaagtgccttgctttatttgatgctgaactaattctctcttagcattccataataagtaagatttgcatcctatcatgttttacaaacatctgtgatatgggtgctagcgttaccaaacgaagtgatggctgcatacatgttgcatctgtgtccatctatgacggaattggtagattgacaggcacatccgaccaaaatcttcaggctgcatacaatacatctgtgcccaacaacacatctgtagtattgtgctgctttgatgctgtattggtgtatctgaaatgtagttaaactagtgacttagcaccgttgttgaattgttgtaccaggccaattgtagatagacaagtgtgcagattgggttgaggattcaaatatgcaaccaatttgcttcaagtggaatgttggacaaactctcccagacagtgagcagtacaaatttcgg

SEQ ID NO: 197688 - DNA, 487 bp, Zea Mays
ggtgcagaagctcaaggtagaacaccgggagtttgggtagtctgtctagtcgacatcagagtaggcagcgatggatgacacaccgctagtgcctaggtgaagaccgacatcgagggtgcccttctcctagcataggatgtgctagatcagtgcgaggtggggctcttgttagtcatgttcgaagagacatacttgctaaacggcgtaggtgaggttgggctatgtcagcgtgattgtgtgaggtactgtagagcgccaaccagactccaataaggggtcagcaatagggtcaccatcagtcgtagacaacttggacttatagccaactagagtcgccgtgggataatactcaaccaagtcatctggagccatcgtggggtgacactcagccatgccaacccactggagcagaatgacggcgtactatctttgtgacatgagcaagtcgttggagcagcgcatgatagagatgccaaggaagtgttgg

SEQ ID NO: 197689 - DNA, 545 bp, Zea Mays
tgatggtcgggcttgttgtgttggcagactgcacagccacgaatcagatcctgcaccacacgtttcatgtgagaaaaatggaagtcgcgccggagtcggtgcagggtgcgctgcacgccctcatggccttcctcgtggacaaccaccaagatttcctggagcagcggggaggcgggcggaatgtacagccgatccgcatagtggacgaggccgtcggttagcgcccagggccgcgacctggcgccgctgctgatgtcgtgctgtagggcagcgagcgtggggtcgatggtgtgtgcctgacggagccgatctatgaagtcgaagcgtggtccggacaaggccagcaccaagccctcctccggtgtgtcgcggcgggagagcgcgtccgcgacggcattggtgtgtcccggtttgtactcgacggagaagtcgaagccgagaagtttgcccacccagtggtgttgtggtatggtggacgacctctgatccagcaagtacttgaggctgtagtgatcggtcttgacttcgaaacggcgcccccagag

SEQ ID NO: 197690 - DNA, 386 bp, Zea Mays
ctccagccacagctcacgtcgcggccctgttccgaccgcctttcacagatgggtcgcgacggtctccagcagatttcactccagcggccaagtatctctatcagatcatgagacggacgctactaccccggatgggttatagagaggccaccactcacatctagctctagctacttggtgtcctaatctcacattcagagtttgatgtggttgatttccttatctgtgagatcgaggacaccgtgttagatggtcttcgtgttcgccgacagctgtcgtatgctcattatctctgctacatcttcgcgcagctgatctggcctccttagttccagggcatcctcgaggcctctcgcctccattttggctcctatcgtccagcccct

SEQ ID NO: 197691 - DNA, 729 bp, Zea Mays
atacctgtgagtagtgtgattccccagcatccatgtggtctatgtgctgaatcgagtcaagcaccctctttgcaaatatatgcaggcttgtcacattgttaacataaccatctttcaaaaccctgttttggctctcagatctctgggtggaagtcattcgcccacagtacatgcctttgaaatatgttgctatccatctcttccttttctgccacaatgcaacaattgcagggtgttctcttatgccacattcatccaccagctaattccactccacctcaaattgtgtgggccccaaaggatagtttatcagggactgcagtttctcctttagattattatcatgcattgtgcaatttgtacagctcctcgagctcgtaatcccatgttctggttatgtgtcatcggcaatttcggtgttgtgtcttgttaaacacaatccttattgcttccttcatcgctgcatcttcatctgtgtgtcaaaaataaaaatcagtaaaaaacccccaataggtttgcaatcaagcagtttaaaatattgcaatcatcttcaaagatacagttgcaacaacacagcagtaattatgtgacaagcatttttttgtagccaaagcatacctgtaagaatcacaaaaggctgctgaccacccatgcaacttttaaaggtctcaaaaagccatctgaatgtgtctattgtttcatcccgaagaagtgcttggccaaaggaca

SEQ ID NO: 197692 - DNA, 477 bp, Zea Mays
ctctgccgagtgctcgctccaatggctgaacttgcagccagcctggtggttgccccactgctgtccatgttgaaggagaaggtgtccagctctctcctcaaccagtacaacgtgatggagggcatggagaagcaccacaagaccctcatgcgctggctgcctgccatccaagaagttatcgctgacgccgagaggcagacgtctcgccgcggcgtggagaaatggctcgagcagctcaagacgacagcgtacgaggcgaatgaggtctttgacgacttcgagtacgaggcgctccgccgtcgagccaagaaaaatgggcacatcgccaagcttgccattatggcaagggtaaaacttttccctacccacaaccgtgttgcattccatatcaggatgagctacaggcttcgcaggattgttgacaccttcaaggaccttgtggaagaaatgaacacctttggattcaacaagcttgag

SEQ ID NO: 197693 - DNA, 283 bp, Zea Mays
ggctgtaatatttgttcaagaatcataattcaaatattgagaacagcttgctattcttttgggtcctttatttttgccatttttgtttcttacaaacagaccaagaggtgtcatgtatttgtattgtctgttgtctcatgcagattattccataatgatattgttgggattagggttacggaggtagtacgagtggtaggtttaaggtttaggaccaggaccccggcgcttgggtgccgtcgtcctagggttagggctgctggttggaagaggtgtggctgtt

SEQ ID NO: 197694 - DNA, 360 bp, Zea Mays
ccggcgttggaggtcatgtgggaggtagcaccggtgtcgaagtaccagtcagtctgctggggcggagtcagggacacagtgctgaagacggatgcaagggactgagcgtcccaagatggagtagtcggctgagccagcatgccgtgggtagcgcttccctacaaagggccggtctgcagagtgtgctgcagaggggcgcttccctgtccttgaagagcaccatgaacgtattgctgggtctggtgggccagcagcgcctggtgaggagcgatggagacaggagcagcgtagaaagcctgctgttgctgggccgtcggaggcagcagggcctggtgctgcgccaggagaccttgctgctgc

SEQ ID NO: 197695 - DNA, 354 bp, Zea Mays
aaatgaagagaatagaaagaaaaggtaaaagaaaaagaataaaaaagcctcatgggccgcggagcatcaatctggcccatctccacttttcttctgctcgccgccatgcgggcccacgtcgccagcctcactcctcatcgcacgcgcgcacagcccatgcttccgccacccgcgtgcactacctgactcgtgggtccgcgtcgcagcttttccctctcgctctgcgtcactgccatgtgggccatattggtcggcttcttcaaccgtgagctcaggctcctaatcctcgtaacaactcgtccgccgcacctattccctccgcgatcttcgccagttgggtaatgagatcctccg

SEQ ID NO: 197696 - DNA, 427 bp, Zea Mays
gattatttgctatgttgattgctgccacattgtcacaatggagcaacattgtctcattcttcaacacttgaagctccttcaagagactcttcaaccatatcatttcacaaactgctagagccattgctctatgttcagcctctgcagtggatcgagataccacaacttgcttcttgtttctccatgaaaccagattacctcccacaaatacacaatatccagaagtggatctccgatcatccctactgctcgcccagtccgcatcacaatacccatccaaattcatatgttgatttggtctaaaccacaatcccttgccaggggttcccttcaggtatctcaggatttgataaactatcttcatatgcccagttctaggatcatgcatatacctactcaccacacttactgcataagcaatgtccgg

SEQ ID NO: 197697 - DNA, 334 bp, Zea Mays
cggggatgaaaaggcggaggtgcttggttggatgattccctgctgcagcatgtcctcacattgacgctcgatctcatctttgagcagctgcggatatctgtatggttggacagcaactggtgcagctcctggtaacaatcggattcggtgatcatggcgacactgtggtggcagtccgcgtggcacttcaaacaaatcaacaaatatatccagtaggacgtccattggcatagagaccagtgctgtggatattatcaccgtttgccatcttgactgataaaccccgcccatggttgaatgtggagacccaattgctgtgccaaatcgttccgga

SEQ ID NO: 197698 - DNA, 1144 bp, Zea Mays
ctgtccacagccaaggacaattgggtgccacagagtcgtgaacctgaggaggtgaaggtgagcaccgaggggttggaagttagaattggtgggcggagagatgagaatgtgtcactggatgatgggcgattgtcacaagctgcatggattcgtcaatacatggaacaacaagaggaggtatagatgagtgaacaagtatttttcacatgaattgagtcatctcttagtactctttgaaaaactgttggattttgttagtcttatgttttttttgtccgcttgcttagtctccaattgtatcgttctgtttcatacttctctcaggttgttctgaacttccagtggatactaagagcttctacatcatgaacctgtgcaacttacagttttagaagacaaataactgattttgttgtctaatctaagtagcacaatgttttgttctatttgaaaaaaagaacacaaaatggttacacaaattggtaactattgttcactgggaactatgtttcacaacaattcaagtctcttcttatttttattgcttatggtttatctttttgtttcaaaacgttaactatcctcactgcagttttagattttgacatggtctccaatgtgtagtttttttgtagaacgaggtaataccctgcttataaagataacatatgagtttttccaagttccaagccagggacaccagcgagcgataactctaatatgtagctttgactattacttgtaataactccatgccagtaaacattaagtaatagaatgtaagtccttgagatgacacatctactaatgttattttcttgtggtcaatctaaataatcttttttttacacatgaatgggaaatttatgaaaacatgacacctttcaccaatgtatctgaggttgcatgtacccaacatccgaatatcctatgcatacaatttcacaacctctatcaagtctttctgttaactgttattccttttcatttcttttaatatcatatttcttggtacattttttcttttggatatcactgatgttaggaagaggatgcaaattccaatgattcctctacatgggaggatcactgcttacaaagttttgaagttgtcgaagcaaagccaagtaggcggaagagcaag

SEQ ID NO: 197699 - DNA, 489 bp, Zea Mays
cactactgtaggtgatggctctcgaaccctgttctggactgatcgctggattcatgggcaatcaatatctgcccttgcccccactttggtcagccatattacagtgagaatcaagaaaagcagatctgtgcaggaagccttggtaaacaatagatgggttaatgacatatctggcagcctgtcagcccagattatcatcgacttcttagtaatttgggacctagtgcaaggttttcagttacatccggggattcctgatgtgcatagatggtccccgtctgcatctggagattattccactaaatcggcatatgacctttttttggctggttcagtctcttttgagccggctactagaatttggaaaagttgggcccccccaaggtgtaaattcttcatttggttggcttctctaaatcgttgctggacagcggatagattaagcagacgtggtcttgcgcatcctgtaaggtgccccctttgtgacca

SEQ ID NO: 197700 - DNA, 498 bp, Zea Mays
ctagggaagagattacacgaggcaattatccagtctttcaaaaggtactttatgaagagcactgttcatctatttataaaggatcgtacagccttgtataaaattacaaatatatccctaagaccagtacatatgatttacaaatgatgcgagggcaaagttgacttctgcctatttcatcttggatacggaatcgtgggcaccttctcccggctctgtccaccttcgtttccatatgttgttgtgacgaagctaacatctttatccttatcttgttctgaaggtactcaatgtcgaagctcctgcaatacttaaaaacatgctagtaaccaatagttatgtgtttttgaggaccttcgaaagatgaaggccccaacagaaggccataggtccctagtcttggtgtaggacagcacctaatccaaagcccgacgcgtcgcagtccaccacaaaggaacactcaaaatctagaagctacaatacgggcgctgatgagag

SEQ ID NO: 197701 - DNA, 368 bp, Zea Mays
tctggcgcctaggttatttgccatcattcctaaaaggattgcaaatagaagaactgtgcttgaggctctttccaacagaaaatggatatctgatataaagggtgctctgtctgtgggagttctagtggattatttgaatctttgggagcttctatcagaaatagtgttgcagcctgaagtggaggataagcatatttttagtattgcggcagatggtaaatactcggctaagtcggcatatgaaggcctctttgctggatcaacgtcctttggtcactatcacctggtttggaaaacctgggcacctccaaagtgtcggttttttctttggctggtggctaacaagagatgctggactgctgacaggc

SEQ ID NO: 197702 - DNA, 460 bp, Zea Mays
ataggagcttaggttatgttatctatagaccaacaattttatattatcttgaagaagagaacaacatgacctattgacacagcagcagcagcagctaccaaaatgttttctttatggcgctagctacgcggcctttcgacgctctcatgggacaaaaataaagaaaaaggtcgtcacccactcacccgtcacagatatgctacataattattgggatctaattctactattactataattccaacccctttttttggttagcggtaatattttttatttaccaacagcgcgcaccagtactaataataacatcatcgtcgtcttcaagttctgacttggaaccatgcatgcgactcctactaacgtaaccatgctggaactgtgcggacaaacaatacaatgcagccctcttccggtccctgctgtacgaggcctgcgggcggaccatcaacccggtgag

SEQ ID NO: 197703 - DNA, 314 bp, Zea Mays
gcgcgaagaagtctcgggcctttttaggaacttggatgagcaaagaagaccaaggacgatgctgatcagttttttgaagccacagccagcgcatacgcaacgtccaacaaagctcacttaggctagaaatacccagcccgcctaggtgaagggggtggcaaacaagacagtgccctcctctagcatcattatgccctcgccataagaagcctcttctgaatttgtcaatagcatttagagcccattgtggaatatcaacagccatagccaagtatacaagcatgctagctagcacatgttgcacctgcactatc

SEQ ID NO: 197704 - DNA, 1687 bp, Zea Mays
ccaacagaagacagatcaatgaatctacacatgtttctgtaatacttcacagcagcattccagctcctacaggtagctgcagaagaaataagtgctttcacatctgccctcataaaatggaagattcttgctaacacatggccgtttagtagaccccaggtttcatttcctgctccgggattcagagaatcattatcaacagaaggttctgcatcacatagctcgtcaaaacagatgtcctccttccgactggcaagaatgtcttgtgacaaatgaatatcttcatcactctgatcaggtagcaactttgccttttttgcagacccaccatcttctgtaaggctcgcaaaagaaaaggagatgttacaaatttccacaaattttgttcagtgtttagctagaaggaatatgtgagagtgaaacaaatttgatagttcaatatttcaaatgaattaagattagctgacagttaaaatttaagagctgaaagtaagaaaataagacgtcgtgtaagacatgaccacagtacctggcagcaaatttctagatgctgaattgtgggagaagtatgcttcaaactctttttttggctgctttgctgagatccagggatccaagacctcatttatagctaaagtaagttccctgctcttgaaatatttcatgactagttcatgtaatttaccacgtgtataacccacaaactgggggtgcaactgattgaagctacctgatccttggttcacaccaaaattatattggtctgggagcataagagcagcagtaaaacttgagcttcgtgctgcactgggaacagagcttccaggttttaaatccttaagaactggaaaccatgtgttatcaatcttacggaacacactactttgttcaatgatagtgccatttttaactaattcttgcaattcagaataagaaaatggaccatgctcatgcccagtgccatcaaggtaataccagtcaccccgataaactgacagctcatcaacagtgcatacacggtcctttggaatgtttggaacaggcttggacttgtgcgaactttgtgaatcatggtcatggtgcttcctgaaatgagacgaaccttcatggacagaacttctctcagctccaattgaatgggagcgtgaagacctcgacagtggtcgatcagttcctctgggttttgtatggggttcaacagatgattgatctttaacaacacgagaatttatcctaaccactgaaagcatcatgcccttcactcccctagaaggctgtctggtctgacctggcctcccaggcacaacaccgcttttagtggtgtcattaacactatcaatatcttcttctgtcaatgagaatgcccacaatggcagttcatactttttagcacgtacagggtagtacaactcatccttgcagggccggcgtggatcctcacagctaccttttggcatttgacacagaggatacccttcattgagaacaagttttttcctgaatggagtatcttggcttagttcgtcatttctcctccagtcaccacctttgcaagaccatctaccagaaaaccattcgctagactcagcgttatgatgaaagttcttctccacagaaacaagaccataagcatctgttgctctattttctgtgcctccattgatttcattgtttacttcagtgtgca

SEQ ID NO: 197705 - DNA, 281 bp, Zea Mays
atcctaaacttctgtgtctgtggtaaagtacccccatctaatgacattcttagttgcggtaaattgttgaattaagaagaaaatgtgttgcgacacagttgtctatcttcacacttttgtgaattgatttaagggtgtcactgtttttctccaattcatctatcagtctgctacacacatttgtggtctccctttattttaattgtgagtcaactatgtctatcttcacacttttgtgaattgatttaagggtatcactatttttcccaattcatctatca

SEQ ID NO: 197706 - DNA, 948 bp, Zea Mays
ttgctctatgaccatgtgccatgaccatgtcttcattttcaggcttcaacctccgcaagttctcatcgtccttatttctcttgatatgagaatcgtccaaactttcacggcgattcaaaaccacatcaccacgctctctttgccgagatcccctccactcgccatcatccaaacgcttccgtgaaagatcttcatctctatcattcctatcaatgggcctcatcttatttctatgccttgcaccaccttcaacattgtactccagcctcaaatcttcttctttagctcgtcggctgtgaacaccatcatctctccttggcaaaatttctgtctctcttaccttatcataactcctaccccgcatgtcaacacgatctctgtttacataagattggtggatatcttccctgcctctggagggtaaatgtgatctttccaaatctgattttacatctcgtgagtactcatctttccggcgaagattgtgttcttctgcgtcatgatgccttcttgcattatttactctccttgattgcctatcttgaagaacctcttcacccaattcaaggcgtttctgctgatctttgctgcttccagacatccctttactattttcattagttctcaattcaacaggttcactgccattgtgtccagtaggttgctcaaccccagctatatgtttctgctttttatcagagtgaaccaggtcatcatcctcatttgcatcactaggcatgttggggtctaaagtagcatcatcaccatccacttcaacactaccaaccaatgtggcatcatcatcatcaccaccaccaccatcaaaatgatcttctgtactcagtttatctgtcgtgttatcattagcagcaagtgatccttctgaatcgccctcaacaaggttctcattccgggaatcatggcgtctctctgaagatatttgatgag

SEQ ID NO: 197707 - DNA, 415 bp, Zea Mays
actaaggagtggacacagatcactcggagaagggaagtgaatgttccataccggggaaggaaaacacaacgagctatcctcccaacacctccgccctcaaagaggatgagaagaagcacacctccatacctgctcccttctaccccgatgtccttttcattcaagggagattggagtcatcgcccatctctcatgatgaacccaccatgctaggggaggaacctccccagcgcgatgctcggcgacggagaaacaggcgccagaacatgcgacgacatcacgaagctggataacggtaccctgcacaacccgtctcttgggacgaagccttagagatgggagaaactcatggcgatagagcacatcgagaaaggctcaactcccaccgccgcgatcgccgtcaggctcaagaacg

SEQ ID NO: 197708 - DNA, 581 bp, Zea Mays
gaccgggttctggagatgatgcgcagtttcagcttcatgcaggcgaccgaggaggatttcatggagggcatgaccgcatacgagcacaacggcgttggcgacggcacagcgcacgggcctgtcgcgccggagccgcctgcgctgacggcgactagcctcagcttcaggtttcagcaccagatgcccgaagttccaacggagacggcgctggtttcgagagaattcactgcggcaagacaagagacggcggtagtttcgagagaactgacagcagcgagagacgatgatggacgacaacgagaggaagagaaggaaccacactttcctttggaaccattcgctccgttgcagacggcggcagacatgcaagaacaccggcacgacgaagcagaggaaacagagttcctggcggaggagccggcagaagagcggagcggagaggttgcgcaggaggaggcagcgccacccaagaccgtcgcggccacgcacaactatcagttcctgactgagcgcgacttccgggggttcgtcagggagccggaggccgtgacggtgcgcgtccaggaatctttcgtgccgtc

SEQ ID NO: 197709 - DNA, 277 bp, Zea Mays
tttgtttcttttgattctcatatggcttaggatttcaatgcaaacttatttacttattttgatgtccacaaggtacttagacttgtggagttttaccctaatgatctttcaagaaatggcatgctaagatttgaaacagaacttgataactatattgatgacttaagaaaagatgatagctttaaaggcaatcttgttgatctctcatgtaagctcattgaaatagagagggacaaagtttatggtttggtatagtcgctttgcaagttggtattga

SEQ ID NO: 197710 - DNA, 656 bp, Zea Mays
gctaagtccactagggccacaactgatgaagcttttatagaagaaggaggagcctgcagcaatcaagaagcctgctgaaaaaaggcgaaggattattactgttattgatgctattgaagaaacgccaccgtcggcttcagcgtaaaaaacaccagctgccgaagctgctcccgccgaagctacaactaccgaaggtgcgacggccaaagccacaaatcttgagggcgtattttctgatattgataagatgattttggatatggccatggaagaaactgttgcaactgccgaggcaaccctggccacggtgcctagaaaaggggagaaggtgtttaacaaagagaagaagattgccgaagatatttcggaggaaggggacttcaattttcgaaacatgattgtcaggagttatccaaggctaaaaaagaagaactaagagattatgctatatcttgcggctaccagccaggagcattgctcttcggtggcgttgacgaagagagcttaggatgcctccgggaccggactggagcgaaggttgtcagcactctatcaaagagtgttggctttccgaagcttgaggccgacctcagcagataccggcggcaacatatcgccggtagcttgttttattctaactttaaggtaaagttctt

SEQ ID NO: 197711 - DNA, 463 bp, Zea Mays
actttgatattaaagagcaaattggaagacacatgcactttgatcttgtggactttgacagagttaatagcttccgtgcacctaagaacatgtcaatcaacgaagtcaaggtacatcgctggtccttattgtttgatatgattatgattattgaccttgtatgcgttggagtagtgagtagtgagttacttccttcaagttgaataattctgtgatgtctgtactatccgttttaccttctatactactgagtaattggctgcaatattaggtgttttcatattgtttcaagtatttacttgttattatattagaattgaagtctacagcaggggcctgttattccctagttaccaaatttatatctatactagaaattgagatttgggagattggggatgggaagttgggggtcagggtttggggttttacctgtttgtggttgtagagactggagagggtt

SEQ ID NO: 197712 - DNA, 876 bp, Zea Mays
ccgacttgacgtccatgtgatgaacgtacgcaaggagtcgcacaaattccatccgtgccacggtggcgaaagcatcgtcgaagtcgatcccctcctgctgtaagaaaccgcgtgccaccaagcgggccttgtgcttaacgatggtgccggcttcatccctctccagtttgaacacccatttaagggtaatcgcgcgatgaccatgagggagatcagcgagcgcccaagtgtggttcgtctcaaccgtgtccatctccgactgcatcgcggcacgccaaaccgcgtgtttctcggcctccgcaaaagaccgaggctcgccatcgtcgcatgcaagatgcaactctcctgccaaaatgcgagacatcgggcccggcatcgacgggtcgatgagaaggccctccacctttcgataccgcaacggcttgccgtcgtagcacgcgtcaacgcgctcctcgtcgtgggagagcgaggtcacgagctccactaggtcatgttcgacacgagctggcatcggagaggatgttcccggggagggtaccgtcggtgctggagtacgtggtgacggagagctcgctggagccggagtcgtggctggattgcgtggtggcgaagagctcgttgtagccggagctggagagcgtggtgttggagtcggtggagacttgggggctggggtaggcctactcgaagaagggtcgcctactcccccggctccctcaaagtggacgtactcggtggtgaagtcgtcatacgtcggagtcgtgtcgtcgtccaccgccttgtcccaggcccatcctcgcccttcgttcgaacactacatcgcgcgtcgtgcgcacacacagtgttcatgggtcaaggatgcggtaggccttcgag

SEQ ID NO: 197713 - DNA, 384 bp, Zea Mays
ctagaaacataatatggatatcaccaagtaaactgaatatggttcatgcatcataataggggtttcacacacccagtaagctaccaacacacatagctagaaatataacatggttcatacatggcatcaaccacagtatcataataggggtttcatacatagtactccgtcctaaaccccatacatcgcctcaaacagcaattacatggttccacccaatatgtcatcattaggaggttgagctctcttcttggatgtaatctttttaacccccaccctttgtggtgcttgtgaggaccgaggaggatgcttcaacatcgccaagtggtgtgcttggtccttcttcagacgggaaccatctttgaatgttctttcactgctttc

SEQ ID NO: 197714 - DNA, 455 bp, Zea Mays
gccctcatggaactccacttcacgtcggtgcttgtcctggtagcttttcattgtaacctgtgacatcaatcggtcacgaatatccgccaagaattcatcgcgagcatgtagttgtttgtcaatatcagccacctgtgatgttcctggatggtagggcagaagagcaggaggttctcggccatataccaccttgaatggagagcatcgaagagcagtttggaaggaagtgttgtagcagaattcagcccatggaagccatttaagccactctcttggtctatcccctgccaggcaccgaagatacatggtgataattcgattgaccacttccgactgtccatcagattgggggtggaatgctaaactcatgggcaacttgactcctgccagctggaacaattctgaccagaatgtgctagtaaatattgtatctctatcactgacaatggagtaag

SEQ ID NO: 197715 - DNA, 430 bp, Zea Mays
tacggggtctctggaggttatccttgggcaaccgctccggtctggcaccgaatctgaagcaacgctgactcccctccctcgggtgctgtcccgcgctcaccaggctctccgggaaaccgaggtggctatccggcgggagtgggaggcgctcgagaccgagcaccagcgccttggcgactggtgcacccaactggaggagcgcactaaggcggtgtcctgccattttgcctcagaacgggccgagtttgagcaggagcgtgaggacttcaaggaggacatccggaaggtgtctgaccaggaggacgaggtgatccagaagaagaaaagcctggctaggaaggagatacgcttagaccaaagggaggagaccgtcacagcgctccaagctaagctgaaagcttataatacggtgctggagaaacagcgggtc

SEQ ID NO: 197716 - DNA, 464 bp, Zea Mays
tgacgctgtcagggtgttcggtgaaatgaccggcgcctgggtcaagcccgacgaacacgtttatgccaccacaatcacatgtttgggcaggctacatgatgcagatcatgcacttcaggtactggaaaagatgagggaggcatgggtcgagctgtgggagttaacatgcaattctatggtgggtgtgcttgtgaaggtgggaaggatggatgagatattgcatctaaaggatcagatgatgctggctaaggagaagatggatgtggttctcgcgagaatgttgatgcacgtgtactatttgagtggagaagttgggaaaacattagaattgtttgatgtggttgccagtgatggtgtgacactgtccaatgtggcatatggggtgatgaacaaaggttgtgaagaagaggggatgacagatgagatatataagctatgcacatatgagttcaatttggtgatca

SEQ ID NO: 197717 - DNA, 348 bp, Zea Mays
agaaagtcttcgacaagaatgaaaagtttgcaggaaagtggatcagagagttgccatatgttgtctggagcctgagaactcaacctagccgagctctgcatggaaacactcctttctttatggtctatggttcggaggcagtgctacccactgatctcaagtttggggcaccgagattaatctttgaaaacatagcagaagctgaggctactagactggatgatgttgatatactagaagaagaacgattgaatacggtgattcagtcagcccggtatcagcaaactctgaggcgctatcatgataaggccatacggcgtcgatccttcgcagtgggagatctcgtcc

SEQ ID NO: 197718 - DNA, 301 bp, Zea Mays
ggagacctcacatgtcgagcatcaatttataacctaagtgactcaacctctatcacgcttgacaactaccacatcacccgatttatctgtttggaacaccgcctaactagcgtactactagtaccccgtattttgactcgacttaaaaacatagaggaagcgatgactacttcgacatgtcaccacctcactacacaagccaaaattattattatttaaccacacgcctagataagcaagatttcaattcaacttgcccatattttaaatctcggcataagcttggctattggctaacgaa

SEQ ID NO: 197719 - DNA, 572 bp, Zea Mays
gagcctcgaagtgttgggaataactgagaagttttcagttgctgcaggcgctcgaagcatcactactgattacgcgaagctagattgtgtaacatcaatcttaatgggtcttttatctaggaaccaatccttggctttttggaaggctttccttcctgtggtctacaatatatttaatgttcatggtgcaacactaatggcaagggagaatgaccgcttcttgaagcaaattgcttttcatcttttgcggcttgctgttttccgaaacgattcgattagaaaaagagctgttgttgggctgcagattcttgttagggtaagctgcttagctgaattgtagctttatctggtcttcaattgaatgacactgattagatgttcttgtggttctagaactcattcaactatttcaaaaacactacaaggttaagggtcatgttgacaattactttgtccgagttgatgtccgacgtgcaagtaactcaaatgaaattcgatggttctcttgaagaaagtggtgaagctcggcgccttaggaaatcactggaggaaatggctgatgtgagaagcaa

SEQ ID NO: 197720 - DNA, 1106 bp, Zea Mays
ctttgcttaggtcgatcgcatcctaggctgccggcttcagatgagccaaatcaacccgccgtcccatgcttcattggagcagtttgaatcagctaatctccaggtggatggtatggttcttccacatgcttccgctggcattcctaataggcctcatgatggaacagagtcttctagaaatggtacaattgaggatatatgtgctgatgaatcagccaatcatagtggtcacaatttagaaatgcgaaaggatacggacagtaaatcccatgaaaaggagtcacataagcgagaacaagtcaagaagatattatcagtatgttctggtgatgagaccaatataatgaaagatgatcaagtagtcagagaaaatgtttcagcttccaaaaaaggtgaagatgagacatctgatttgccagcagaaaaggatgataccatacttccagtcaccagagcttgtacaatgatcaggaccaatcaagatcatacagatgaaagtaaacagcatgggaaaatagaacaaataacaaataaggactacaatgatgctggatatgagttcttgatcaaatgggttggaaaatcaaatattcacaacagttgggtttctgaatccgaggtaaaaatattagcaaaaaggaaactagaaaactacaaagcgaagtatggaatgagtttgataaacatttgcaaggaacagtggtgccagccacagcgagttattggtcttcgtgcttctgtagatgaagtggaagaggttttaatcaaatggtgtggtcttccttatgatgaatgcacttgggaaagatcagatgaacctaccctgatgaaatatagccatttggtcactcagttcaagaattttgaatgccaggctttggataaagatgtggtaaaagattatgcaaatgcaaggaaccgacatgagcttaatgtgttagttgatcagccaaaagaacttcagggcggcatgctcttccctcatcaattggaagcgttgaactggctgcggaaatgctggtacaagtcaaaaaatgttatccttgctgatgagatgggtcttggaaagacagtgtcagcttgtgcttttctatcatccctatatt

SEQ ID NO: 197721 - DNA, 438 bp, Zea Mays
ctatggagctatctgagttcatttcagattttaaggcattcaaatgtgttacatttctggaaaaggatacattactgtccttgtgtggtctattgtttgtagattatcattattcactattctcaccctaggtctgcaggagcccttatcttttccactctataaaagtatattgcagtcttgcagcattgacaccaaggttgacaaagcaggcaagaaatgcattagtttggtagaccaaatattttgattcaatgtccctatcgtgatggctagccataacttagtaaggatattccaaagcgaaagtttaacggatgcaagtcctacatctctatcttgagtcgctcctgatggtatttctcggtaatttatgtatgatcacattttgcagaaagaaaattttgctgttgtaatgtctggatagtggaaattgta

SEQ ID NO: 197722 - DNA, 428 bp, Zea Mays
cgggcggtcagcagcttcgtcgccgttacaacgaacccgcgaagaccgcggcgatgctcccgcgcacgctctgcctcgtatagcctataagctcgggagtttctctctctctctagaccgcaacgcgcctgcgactccattccctgttaaacactctcgccgccggaaccctagttgcgcggcgtgcgcggtgggtgtgggtcacgcacggccgccggaggaatcacgcctgcgccatcaattggtcacggcgtgtggcttcggggtgttcatttggtcatcgcggaagtgcggatggtcaccgggggagcaggagggcaccacgacttcggcaactgctcgtcggagtgccttcaacaccgccgagccgccccaacgcgagaacaacccgtctgcgctcccgattcccggtattcttcacctccatc

SEQ ID NO: 197723 - DNA, 533 bp, Zea Mays
tttgtgaatttttttgttgcttccaatgccctgacctgttaacaatttatctgcttgttttctttctaggactatgatgtcgaggatacagctttacctcttcaaccatcgttgaactatactgcaccagaattggtccaaagtagagattctaaagttggctctgcttgtgatatgtttagctttggatgtttggcttacaatctggttgctcgtagaccacttctggactgccataacaatgttaaaatggtatgttttaaaatctgaatgttgacatttacccaatgtagatttgttcttttagcctcagtggtctgaactgtatattttacactttctctgcttcagttttgcaagtagaccatcttgttcaggctttatccacattctacagcacctatctgatgggattctctgccccctctattcttgcagtacatgaatgccttgacatatttaacaagtgaagccttttctaatattccttctgatttggtattggatttgcaaaggatgctatcgatggatgc

SEQ ID NO: 197724 - DNA, 353 bp, Zea Mays
ctccaatctgccctgtctgacgctgcggttgtccattctctgttcttgttagatcccaatatcccatggcaacgagtgcatctactgatgctagcagcagcgaaggtgccgaaggaagttttccagtagccaataaccctgccatcgcaagataagtcttggctgctgttcgtattgttcctccagatgaggatgagaaaaaaccgttgtggaggtatgctgagatacttgaaagaactggaacgggttttgggggcaatgtgaggattaggtgtacactttgtaaccatgtttggaatggaagctattctagagttaaagcacatatgttgaaaattcctggttttggggtg

SEQ ID NO: 197725 - DNA, 301 bp, Zea Mays
caagtgtgtagacaacatagagaagtacaggatagcgaagaagtctgcaaagcgagcggttagtagagcccggggtcaagcctatgacgacctttatcaacggttggacacaaagcagggagaaaaggatatctataggatggccaagattcgtgaaaggaagacaagggatgtcaaccaagtcaaatgcatcaaggatgaagcaaaccaactattagtgaagaatgaagagatcaagaacagatggaaggagtacttcaacaaattgttcaatggagggaatgagagttctataatagaa

SEQ ID NO: 197726 - DNA, 1333 bp, Zea Mays
gaaaccacctcgtgctggcccatcccgacatcccgtcccgtgctcccctcccctcctctcgaccacctcctcgtcgtcttcctcgccccctccgccacctccgccccggcctctccgctcccacccccgcggaaaccctaactccctcttggcacaggaggcctatgacggagattcgccgcgcgcaaggagggagtggattcgcgactgcgcagccgctgccgtcgtcctagggcgcgtcgagcactgccaccccattgacgggcccatccccacgacatccgccatgttcgagggccacgtatgatctcttacccttcctccatgttttcccattccttcagcacctttgatcgtgaccatttttgatgcgcgatatggaggaaggccgcgtgattgcctagtggaccgatgtgttggtttagtcgtggcgttgttctgtccgggttaccaaatctctgtgcagatcatgttcgtatttggggatagtttggagggttagaattcggtgcgttgatgattgacccttggtcgtttgcgttatgatcttcccttgaggaagaattgcatgttgatttatggaggagcctctaaacgggcaagttgtggacttttggtgcttatgtatacgtttgttcacaattttatagttcgactgaattccaactattgaggaatctgtttactttggttgagcaaaatgccttatttcatttggcctacgatcatttaagtagctcatgacacattgtctgtgatggttgcatatggtgatctggcagcaatgtgaaagttcatagctgcggcatttctttctttttaaattgaaatctcctagcccctgttacctcccgacaatatgcacttgttgccctttaaatttggatattcttctttcgtgattgcatcttattctcaccagtgaatgcagttttgagcatccacactattatggtgagagctatgttttgtgccatcctactgcactgcttgggatttcattgtgtcttttcttttgcgtcattatgtaagaaacaatcatgctggtaaatagtggagtcgtgagtaattcatgaggttttacagcaactttgctcattcatggcaatagacacgtaccacttaaatggtgaatcatgttatgcactctttcgctatctataatttcatatcgaatttctattttttgttttcctttttttgactctttcatcattcatcatttgtgttaagttctgagccatgacatagttgtaacttttttctacaggtgctgtatctgctacgcaaatatttgggtgaatatgttgaagggctttctgttgaagctctc

SEQ ID NO: 197727 - DNA, 367 bp, Zea Mays
gttgtttgttgagcaatcatatagagctgtagtgaacattccacctgtagtgaggatccttcatgcacttatgaagaggatactactactaaaagttgtgtacgatgagtctctcaacaacataaaatagtggcttctagatgcactcatctctcacatagagtatgatgttggtgactccatattatgtgagattgaggatctagtgccagatggatttaaggctcatcgtcagcttccccacgcccactacttatcctatatgttctcttagctaatttcacatctagaattggcattaacacatgagaactctcccaaggcttttgggtattatatgttgaccaacatagtggatgcgtgccca

SEQ ID NO: 197728 - DNA, 402 bp, Zea Mays
cctagattgtttttttacaagaaaaaaaataccttcgcagaagatgtattcaggattccaacagtgcgcaatccagaaacatcgttcatttctagtccatctgacccgtttttgtgcagcacatcagttgcgtgaggcaactctatcccaacttcttttgccttctgctcgtccacctccatgctatccccgggctcaccagatccatctgcccttctctggcttcccacaacctccttaatgacgtcctcctgcccaaacctagcactgccactctccacgacaaccaggtcaccttcctcttccgaattcggcaagtgatggtcctccctgaccccagcagtacctgattttccagatgcacggttcctgctccctgcctcaaccacctgccagtgatca

SEQ ID NO: 197729 - DNA, 313 bp, Zea Mays
gacccgaaccgcatgtctcctccccctcccagacacaaccctcccattgtcttcccctcctctcctcacgccgaccactccattcctcatcgccgcctccgcttactaatccccacaaccgcaccgatccatcgctcgccttaggttttctgctcgactacctcctggtgctccaccgttctggctcgattcgcgccgagggcggttgctccgagctcttagccacctgtcgccgctgtagcctgctgctgcgggggtgctctgccgtcggctgccgctggtgtcgaggaatagggttttgggactgccaggc

SEQ ID NO: 197730 - DNA, 426 bp, Zea Mays
cgaaggagtaccagccaacgtagccttaggcttcctggttctcgaccgatgacgacaatgtttgctcctcgtctcagaagcagaagtcaccattgctgccattgttgaatgagaaacttgttccgtgggagggctgagccgctgccaaaatgccaattgacgtggtgcggtctgaagaggtccactggcaacgagatcctagatggaggcacgcccaataggctccttaaccaacttcctagcctttacatcaccgccggcgaggcgatcccagattgaaacacccatcttacaccttaaccagcgtcttggtaccaccctttctcgggcaggaggacacccgatgtggcactggactccaccaaacgatagtacttggagcgaccagaacgcttggtggtaaacagagccaaggagggggggggg

SEQ ID NO: 197731 - DNA, 505 bp, Zea Mays
tagaggttatcagtattgtcgaattgacggaaatacaggtggagaagatcgtgatgcatccattgaagccttcaataagccaggaagtgaaaagtttgttttcttactttcaactagggcaggtggccttggtatcaacttggccactgctgatgttgtggttctttatgacagcgattggtatgagactatgctaaacttgattctgttgcttaccctaagaatgaatctaatgcctctgttatttctgtgcctccaggaatccacaagctgatctgcaagctcaggaccgtgcacataggataggtcaaaagaaagaagttcaagtgttccgcttttgcactgaggtttgttgtttctagattaacagtaaccatagtgctaaattctatgttgatatcaatttggaagataatgcaaacgaaattacagtacactatcgaggaaaaggtgattgagagagcatataagaagctagcattggatgctttagttattcagcaag

SEQ ID NO: 197732 - DNA, 652 bp, Zea Mays
gtttggaagcactatgtgttgtgaggggaataattcaaaatctgagatgcaaagtatctgaaaaagttctaaatgcactgaacccattacttgcaattgttggattggaactgcgactatgtatctgtgatatttatgctgggttgtcattgaatgatccttcgatgttgtttctggtaattatcactctatttgtgatgtcaattatgtaaacttcgccatgttgcctgttcctgtttcacagtttcttgtggcaatttgcatttttaacaggctgggttaataggagatctgaatgcagtttcagcttcagaacttggtgaactagattatgacacaagacttaacacctatgataaggttaggccacaattgtttcttggcttgacagaagagcatgtgggcgccatattatctcattgtgtgtatgatatgtcatctgaagaattaattttgcggcaaagtgcatctagggctctgcagtcgttcctggacttttccgcctcagttatgaataatgatgtgtccaaatactctattgatgataaatttagagagaataataccagaagcatttgcacgatgggctgtattcagaagatattggaaaaaacttatctgcacaatatgggagtagcaatgactaaagatg

SEQ ID NO: 197733 - DNA, 291 bp, Zea Mays
ccattacggtcggtaacaggcagtccatcccttcatctggtcgtggcacatctctcttacctatagttgatcgctactttcatcttaataatgttcttgtcgctcctcaacttgctcgcaatttgctatctattcgacagcttactcgcgacaataactgttctattgagtttgacgcttctggtttttctgttaaggatctccaaaccaaaacggtccttcttcggtgcaatagcaacggggatctctacattccacatcgtctgctgcctcgctgccatgttgttgtcg

SEQ ID NO: 197734 - DNA, 1431 bp, Zea Mays
gtttttgcagttttggtaccaagggcatcaattcacaggtttgatgctttaccatgaaattttatccatattttttatagttccccaaaccccattcatgttggagcctcctgcactgggtctgccccctttttatgttgtattggctcattgttcacttctagacctttcagcatgtaaaacttactatgatggtacatgatgaagtggaagatgctggttgtttatgggtattgtgctcaataatagccccccccccatctagaatgtaagatgttttagctttatcctaagtcaaacttagcttctttatttttggccaggtttgccgaaaactgcaccaacatctgcaacattaaattagtttaataaaatccaccatgaaatgtcttgatagggctatttgctattatagaagtttaactttggacaaaactaaaacaccttacattttggaatggagtagattgatggggtttgtcgcagagcatcaccctgcaacagttttgagaattatatcatgattcatgtgtgacatgtgcattagtcaccttataaatctaagctaggcctaggaggttcttaatttactagggcttgttttttttggctaaaatgaatttcatatatagaaagttttatctgcatgttgcagatacttcccttcattctttcagtaaatgatgtggggttagtctgttagatctgtcagaatgaactgttggcaccccacactaacagttgtgcactcttgtgcttccagaagagctattgtagttattttccatgtactgcttaactagttggtagttgaccatgaaatattttttcttttccgtttttgtttcatttgcaatgccgtgctgttttaactctagaagtgctgaactgctgatcatgttgctgttctactttcagagaggccaaaggaatgtttgtgtggtcctttctcacttgatttagatgcagtacattctacagtgccaaaaatgttgccatgggagttcccttgtaagttatctgaaacattatgcatggaggtagacaaaactatccttttggctgaagaaaagaaaaaacagatggaaatatcagatcttgaaggcctgcagttacatgtaacagcacctttgatcaagggaagaacttctaaaacaagaagggctaagaaatccaaattaaagcgtgctcactcgactgagcataatgatatttcaccttgtaagaatgaacttgatgatttccatgatcttccagatatatctcttccatctgataaacaaataaaaagaaatcggcatcgttcgctgctattatctgagtccgatgatgatccagctgatgtaggtactgaaaaacataacatatttactgttactgaagttggtttcttcccacaaccttcagaggtgcctcctatgcatgggcaag

SEQ ID NO: 197735 - DNA, 844 bp, Zea Mays
agtaaagatgccgatctgtagctgtgaagaaactatccatgagttcgagatgttaacacgcgatgctgggcgtgtacagaaggatacactgaaaaagatcctcgagttgaatgctgatgctgaatatctgaacaagttcggcctcaatggcaggactgatgtagagagctacaaatcctgcatcccgctgtgtgtgcacagtgatcttgagccatacatccataagattgctgatggtgatagctccccactcctcactgggaagcccgtcacctccctttccctcaggtaattacactgcttgaaaaatgtgtcgtcttatcgtttatattagtgtgtggatgtcggtgttttgtaacttgatgttttttttcttcctttggacgcagttctggtacaacgcagggaaggcctaagttcttgccgtttactgatgaattgcttgagaccacacttcaaatattccagacttcatatgcatttaggaaccggtaagcatcatcattatgtttcatttttcacaagtatcccttctacttgtgaatgagcagggtttcatctcacagtgtgcaacataaggtttttttttatataaagctctaatcaatgtgatgtccatgtgaataaaccattggttggtttcggattccttatgtcatagatcttaagtacagttttcttttcacagtgagtatccaattggaagaggaaaagccttgcagtttatctatggtagcaagcaagtggtaacaaaaggcggcatccttgccacaactgcaacaacaaacttgtaccggagggcacgatacaaggaggggatgaaggatatccagtctcaatgctg

SEQ ID NO: 197736 - DNA, 329 bp, Zea Mays
gttatggaggaggaggggcgcctattgaggaggtatgttgctgttgtgagggcctcagcccagtatggaggtggcatggacgcatggagcagcatggtgcggatggtgttgttggtagtgcggagcatgcgttcgaccttgccgttttgtggtgaggtataggggcaggaaaggcggagagtaatgccgtggctagcaaggaaggaagtggtggcgcggttgacaaactcggtcccattatcggcttggaaggatttaggcgtggtaccaaactgggtctgagcgtatgcaatgaattcaatcatgtggcggtgcacctcagatttgtg

SEQ ID NO: 197737 - DNA, 484 bp, Zea Mays
gtgggaagttgaccgtgcggagatgttcttgcgtacaatgacacaacgtgggataagagccgagctatttcactatattcctttgcttgcagctttgtgtcaactgggaatgatggagcaagctatggttttgttcaatgaaatggatatgaactgcggacttgatgctgttgcatatagcacaatgatgtatggtgcttgcaaatcaggagatataaaagcagctaaacagttgcttcaggatatgcttgatgagggtctggctcctgatgccgtgacatattccattctaattaacatgtttgcaaaattaggagacctagaagaagctgagagggtgcttaaacagatggctgcaagtggctttgtgcctgatgtcgctgtatttgattcactgatcaaaggctatagcgctgaaggccagataaacaagattctggatttgatacatgaaatgagagccaagaatgtagctattgatcca

SEQ ID NO: 197738 - DNA, 274 bp, Zea Mays
ggaactcagacacaaccttgatagcctcaattcggtctgcttcactgttatcgacagccatctgataacaacttcctttcttcggctcaggcgggactaactcggtcaccacttcctctcctagtggggacatcaacttgattgtcctcttgtcacaactgataacttcctgatacttatatagccaattaatccctaggatgacatctattccctgagtacccattactatgagattagcgggaaacgctatcccccttatttccacacatac

SEQ ID NO: 197739 - DNA, 438 bp, Zea Mays
ctccaaggcaaacaggggatcaggaaacaggaagagggtgcgggcgtgcagcagaagcaagggcgctttccacatccacagctagcctcttgcgcttacggaaagatcagaggggcaggggcggagcgtctgttgcaaggacgcgcacgagactcgtaagggagaaaccaaacaagtagcagggagctcaatcgccgcggaggggatcgatgaagtcgccgctgcggaggttcaggggcttcggccaccaccacaccaaggaggagcggaggggccaccaccagccgccgccggccaagctcgacgagctcgtctgcgccgcccaggttcgtcgtatctttcatccctcttcttcttctttcccctccgctggccgtgtgaatgaacagcactgtagttgttatcggtctggattggccagaaaaaaattatccaccg

SEQ ID NO: 197740 - DNA, 802 bp, Zea Mays
gctaattggagctggtgcttttgggtttcacccgaccctagagtggatatttgttggtgatagaggtggtactctcctggcatgggatgtatcaactgagaggccaagtatgattggcatgtaagtatccttatagagcgttgagagttggaaaatataactatagtgtcatgggtgtgttgcccattgtttcttttctttccagtactgcttgctactttcatctcagtgctaatgaaatattcattatctgcaaagtcaaacaccaagttcttcaaagcaccagtgaaactagaacagttccttaggatattgtccacattaggacttagttttgaatatatgctgctctgccatatgtattagacacccatctgtgttatgttgaattacatccacatctgatttagtgcatctttgcacatagtgacatgaattttaacctaaaagttctaacataatgcttgcagttccttggcatcaaatggatattgaaaaattgcaacgatgtttttttgtcttagtcaatcatctgcatgcacctttctttgttggtgtctctcaccctctaattacactgttttctgacatagccatctttctgtctattttccatctgaattttgcctttcacttttacttagtacacaggctggttcccatcctatcacatctgtatcctggcttcctacactgcggctgcttgttactatttcaaaggatggagcactccaagtgtggaagacacgagttataataaaccctaacagacaaccaatggaaactcatttctttgagcgtg

SEQ ID NO: 197741 - DNA, 482 bp, Zea Mays
actaattggatcagacaaaacattcatcgttcatcttctgatattgtgagctattgccattgatatccttaccgcaattacattaaaattttactttgctctatttatatttttggagctttgaatacaatacatttattctttatgatgaatttgtgaaccatatttggcaggctgtgtttatagtaggctaatgcactcaactcttcgatttatagtaagtttggggagtagcttatatgttatgtgtggcaaaggctcatatttttcttttctgtccaggaatgggaggctatcaatgatttaagagctgatatggctagacttcagcaaggcatgagccatatgcaaaggatgttggaagcttgcatggatatgcagctagagttgcagcgttctgtaaggcaagaagtatcagcagccttgaatcgtttcattggggagcaaggttagtaaatcagcatggtcatttttgctacatt

SEQ ID NO: 197742 - DNA, 307 bp, Zea Mays
aaatgtgcaagggtcttcacatctgtctcaacgggtgcaaggggtaaggaagttagttgagccgactaagatccgtgtaggtagttgaaacataggattctatacaggtaagccaagagagttagtcgatgcagcgagcaggaggcgtgttaatatcctatccaggagacaaaatggaaggggcaaaaagcgaaggaggtggagaacactgttttcaagctgtggtacttagggacaatggcaaacagaaatggagtaggtatcctgattgataagagcctcaaggatggagtggtggatgtcaaag

SEQ ID NO: 197743 - DNA, 358 bp, Zea Mays
cctatacagacatctatgcataaggttagcccttccattcttctattcagtgttgtttcctttgttttgtttttggcctctttgaatgaacaatagaaattttgcccattgtgtcccatcggtaaaagaatataaggcaacatggcgctcttagttgttagatcccataaagggaaaggtaagtcaagttagaatttattcagactgtcatgtaattgttgtaggacctttgtttcatttttatgccacacgatgatttatcacacatgctactactgggttgtgaaaaataatttcattttgtcaatgtgcctcaagtcaatcttttgaattttattatcagtctaaaatacttatt

SEQ ID NO: 197744 - DNA, 495 bp, Zea Mays
gctcggggcttcggtaatacctgaatcggccactgcatagagtagtaaacctaaaaaaaatcagactcttattgttatataatttccatggtttcttcctctatgaataggagagaaaaattgatcctagattgcagtctactaagatgcatgcaatgcgttatctccttatacagttactgttacaagttcttctccatccagatcagtattgggaggctgcacttgatgtgactatatgttggaagaaatcctttcttgtcattgctcgaggtgataactccagtgactatattgtcgaccttcacttctcgctacaacaaagatgcggtccttcttaccatccttttactatctgatttccctaaaataattttgtttgactattcaaatcatgcttggagaggatcatggcgtgggatcagaaagagcaccaacaattttctacatgttgtacaatggggttatgattacttgaattttgtcatttgtttt

SEQ ID NO: 197745 - DNA, 744 bp, Zea Mays
ctgcgataatccggtgaagaaaactcggagatgaagcagtaagaacaatatcatcaacatatagcaggagaaaagccacatcagcacctctgtagtagatgaacagcgacgtgtcggacttggcctcaacaaacccaagagaggtgatgtgagaggcaaagcgattgtgccaggcgcgaggagcttgcttcaaaccatagagtgacttgttcagacggcagacatgatttggcttggcggagtcaacaaacccagtaggctggacgcagtagactgtctcattcaggttgccatggagaaaggcattcttcacatccagttggtgaattggccatgagcgagacagagccagggtgagaacaacccggatggtgtctggtttcacaactggactgaaagtttcgtcgtagtcaatgcccgggcgttgtgtaaacccgcgaaggacccagcgagctttgtagcggtcaagagagccatcagacttgaacttgtgacgaaaaacacacttgccggtaactaggttgatgccaggagggcgaggcaccaaggtccaggtgtcattggcctgcagagcgtcgaactcggcctgcatagcctgacgccaggccgggtccgagagagctgtgcgaacggatgacggtagcggagaggtggccgtgaccatcgtgctgaggttgagacggtccacgggttgtcggaggccgtccttgccacgagtgcgcatgctgtgcacattggtgacgg

SEQ ID NO: 197746 - DNA, 463 bp, Zea Mays
gaaggtttacttcaagaagaaatccagaagcttaaagatgaaatcaatgatttaactaactacatcgagtctcggaaaagcgaatcaagtaagttagaggaaacacttgcgaaaagacataatgactataacgatttgaggaagcagagagatgtgcttcaagaagaaaggaagtatgtaaatttcttttgaatggtcatggcattgccattgaatggatgatgtgttgcattaaattttatatacttagtagaaggaaagttttgcaggtcatattggaaggaggaatctgaggtgacagctgaacttgataggctacaagaagatcttataaaggcacagaaaagcttggaccaagcaactcctggggtattaaattctacatctctcttattttaaatgttcttttgttcatattaccgattgttactgaaaattttctttcttgggatttgcactttta

SEQ ID NO: 197747 - DNA, 316 bp, Zea Mays
cagagcctcaatatcttcaggagagggtcgcactctaagacccagaccactatcaccagcaggagggttggacacgaaattgaaaaaggacttaggagatggcagattccaagtagagtaggcaacaggagcatcaacatttgatactttgcctctcaagatcatgtctagtcggctcaccagatcctcagtaggaattctcctattggtaacccgagtcgagtcagtaatgccactgtacaaataagctgggtatgctctatcctccaagggctgaatattcttaaaaacaaagtcagcaaccacggcctcggcg

SEQ ID NO: 197748 - DNA, 423 bp, Zea Mays
acccgccgctggtgcgtgcagattctcgggctggacatgtgcgcggatatcatcgtcggcaacgagctaatgcgcgacatctccggcggccagaagaagcgcctcaccacaggtacccctccctctccttcattcgcctcaaacccatccgcgtgtatgttgttgcctccgttaccgttgctacaaccgcgcgtgtttggtttcaggggagatgttggtcggcctgaccaaggtgctattcatggacgagatctccacgggcctcgacagctccaccaccttccagattgtcaagtgcatccagcagatcgtccacctgggcgaggccaccgtcctggcctcgctgctccagcccgcgccggaggtcttcgacctcttcgacgatgtcatgctgctgtccgaggggcagatcgtctaccaggg

SEQ ID NO: 197749 - DNA, 333 bp, Zea Mays
gcttgaaagaaggcagtgtcttcaataggtaactctccaaaactgaagggtcaaatggacgaggagacttactatgttgctcctgctcctcaaagttcaatatagcctaataggatagagaagtattatgtaatttccattaaagatatgcatttaaaaagaggtataaatgtagaagtcataccccaacattaacatctagaatgagctggtgagcattgagtggaggaatatgtttagaccagtcatcgcggacacactcaatgaaacattgcataaacacgttgtcgagacatgcgccatcagcaaaagattgttgtatgtcacaacaat

SEQ ID NO: 197750 - DNA, 325 bp, Zea Mays
gaaaaatttctcgaaacattgttgttggagagggatactgactcagatgacaaggtcttgttggatgcggctataacgtcctgcaaaaaagatctgtaccattattgccgattgtctggaaagcacatgcttgaagtagtcttggaaactgctctatcatcaattaagagggagcagcttcttgaggctgttgatgtatgtcaattttcaaggatgatactgtgttttttccctggtggtaggagcattccataacaaattccactagtctgttgactcattgatttatcttctggaaagtggttttctgcaggttgtttcgttg

SEQ ID NO: 197751 - DNA, 487 bp, Zea Mays
catcaacgtacttcgtgaagaagcaaggagtaggtggttaaagccttctgaagtgtactatatcttgcagaatcacgagaggttccctatcacccatgaggcaccaaagaagccacccagtaaagcacatatatcccttaattagaggaaattatcttacttgtataattgttcttttctttgacaacatatttgattgttctacaggtggttccctattcctttacaatcgtcgtgtcaatcggtatttccggagagatggtcacacatggcggaggaagaaggatggaagaacagttggggaggctcatgaacgactgaaggtttattttagaaggctcagtatagcagcaaatcatttcagttgtttccatatttttatctgcgtcttctagttcaacagtggttgttaagaatttatgtttcaatactacaaaactcgctttttgggcaaatcaccttcttgtctaccatgacttttccgcgg

SEQ ID NO: 197752 - DNA, 353 bp, Zea Mays
gagatgttcagttttattgcgctggcagactgaacaacctttgatgaattccttaaccctctgtaatgcatgaggattatagaatgacgaccggaacctgtgaattgtcttttggataccttcatgtcatgtgtcatgggcactggataatagtatcggccaaagagtagaggcatctggcacatagactttgcctttgaaaaggagcaacccatccaattatgtccaacctggtgaaacagtgctagcagcaagctgctggcgcacatcctggatttgtgggtctgttgcagcctcggctcgcaaactgtcaaacaactcaaaagaaggtgtagagatggtgttgagcgcca

SEQ ID NO: 197753 - DNA, 936 bp, Zea Mays
taaaaaacgggtattatgctcgccatggctttcgtaccatcaagcatgacatccgtaccatgtgccaagatgcattgaggtaaaaattacctagtctaacctagttcaagatctttagaagtttatgtgatggtcgtgtttctaaaatttcctattctacctcagatataaagatggcaatgattcgggagatataaagcaaattgttgtctccttcatacagctagcaaagagactagggaacccaaggtacatttctgatagatatggagcaggagcccaggacagcctggacattaatcaatattcatttgatactaaactcaaaaagaagcaaaataaaataagaggagcaaattcattggctgctggagcagataattcatctcgtgcatttgaccttgaaatcaaaagaagcctatctaaattaaagaaaaaggatgtctactctggtagcgaaacatctgatgatgatgatggctactctgaagttgatgaaactgagagcgaaactactgtttctgatactgagagtgaccttgatgtaaattctggagcctgggatttaaaaggaaacagtctaaagttaattgaacctggggaatctgtgaccgatgatcgtatattgggtgcccgcatgacaaaggccagccttgttcctccagttactaggaagtatgaagttatcgaggagtaccttattgtagcagatttggaggaagtacagcgaaaaatgagagttgctttacctgatgactattctgagaagttgctgtcacagaagaatggcaccgaaaacttggaacttccagaggttaaggattatcaaccccgaaaagtagcaggagatgaaattcttgagcaagaagtatatggcatagatccatacacacacaatctactgagtgacattatgcctgctgatcttgagttgtc

SEQ ID NO: 197754 - DNA, 482 bp, Zea Mays
caaagcttggtggctgcggctgttatcactcatttgggagatgggtctgatactcttttttggaaggatcgttggctaaatggcaaatgtattaaggaggtggcacctgctgtcttgggtatggtgcccaagcgcattgcttctaggcgcctggtcaaagacgccttgcctgacctcaattggttggctgatctgaggggggctatttctgttacagcccttgctaatctcatggacctttgtgacttgctagaagggatggttcttcagccggatgttcccgatgtgcatgcctggaggttcagtgaatcgggtgaatactcggctagttcagcttacaggactttgcttcttggctctgttagctttgagcctgctgaacgcatttggaaatcctgggctccaggaaagtgtaaattcttcctttggcttgtggagcacgatagatgttggacggctgacagacttgctaagcgtggcct

SEQ ID NO: 197755 - DNA, 665 bp, Zea Mays
tgctaatgcaaaatcagttgtcttctacctacttgagtctattgttactgagcacttggaggctgttattcctgaaatgcccaggatagtgcacattcttgtgtctctctgtagagcttcttatactgatgtggccttcctaaaatctgtgctatgtctaatcaagccactcatctcctacttcttaaggaagggaactaatgaaacaaaagtactgggccatataaaggagggcagcaattttgagttgctttgttttgaagaattgtttgaaattgttcgctgtggtaaagattcggtggatacaactgaagataatattcaggcaccgttggtcatcttcattctgggatctatgtttcttgatttctcatttgagagaaggattgaaatgttaggctccttgttagtatggattgattgcatcagttccgatccaccatcgttattatgcaactatcttcaaggtttccagacacttctagatggttttgaagctgtgctaattcaaaatattgaactacttggtgtcggcatcctttctgcgacaaactcgtctatagaatcttctgattccttgggcattgatggcactatgctactagagaagaaggcacaagataatgaagaacaaacactaatgaaatccgtaacatactgtgaga

SEQ ID NO: 197756 - DNA, 526 bp, Zea Mays
ggtggccgtgaatttcgagcaagacgcgcggcggtcggaggtggagaagaacactggcgcagtgaatacgtgttcaacgtcgtggcagctattccggtgagcaacggggagctaaagtgaatcatggcggtgcagtggcgaggctcggacacgcggcgcaaggccgagaggcggcggtcaccggcgaggtaatccactcggccgcaaagagggagagagggccacgggggtcaccggagtgatcgccagcgcacgggcggtgaagatcttttcaaggtgagcaacacccacacggccgcggcaccaatcccggcaaagaagtcgccggcggtgagatcttttctacagcggtcgatctgatccccaacagagcactgtaccatggagaacacccatcagatgaactgacagaacgatttgcaggaggtttttcttccgatttcatgtggcaacaagtctaagtctctgcatcaaagttgtagtgctatgtaccagctacaaatcgtctataagggttaaacctgtt

SEQ ID NO: 197757 - DNA, 338 bp, Zea Mays
tccctcctctcctcgccgaaagggagaaggatggacagctcagggctgcgggctccggcgccggttcacatggtcgggggatgctgcgaggactgaagactttggatgggtgttgcgtgtgctcatcccaccgagcgagagggagagacgagtcagaaaggcccgcccgtgaagctccatcccgttcttgcccaggtaggcttgtccctttgcttggaagctagctatctctgctgggttcctttctcggtgttgcactgtatctattacttttttacgttgaatctgatctttgtcatctgtgccagtatactgacttcaggtgttggtagttctac

SEQ ID NO: 197758 - DNA, 526 bp, Zea Mays
cacgaatactttgaagaggccatgcaaaacatcgcctccagaaggcgaaacagacaagtataaacggcagaagagggaatgccaggatttctctcccagaaggttctgtacatttgtcctaggaattgttatacattcaggggtacatactacagagcatcatatgatggttgtgctttgtgatgtcgaattgatcaggtaccagcttgatgtctatgaggttgctacgaggcacaacacaattgcgatgcttgacacgggagctgggaagacaatgattgctgtcatgctcatcaagcattttgggaagatcaacaaagcaaacaatgatcgaaagctcatcatattccttgcaccaactgttcaactcgtcacacaggtggtttctaccaaaagctgatgattctaactgaaatgaaacaagtttgtgctgatattttctgtaacagcaatgcgaggttattaagagctacactgattttgaggtggagcattatcatggtgcaaagggtgttgatcaatggaa

SEQ ID NO: 197759 - DNA, 493 bp, Zea Mays
gggagatgggaatattctcttgatcgttgcatagctttggtattatggtttagatctaagcatgagggctgcgtacctggtaccatgctatatgtagacttacagtaatgacatatgttgcaatacactgctatccaaattactccaggtgggaaatgggaatattctcttgatcgtgcgcatagcttttgtattatggtatagatctaagcttgaggctctgtgcctggtaccatcctatatgtagactcacaggaatgacatatgttgcaattaaaggacaaatctagttggtattatggtatagatctaagcatgagggctttgtacctggtaccatcctatatgtagacttacatgaatgatatatgttgcaattaaaggacagatctagtgtcggtggctcacatatgagcgaaatccgatgaagtgttggtattatggtatagatctatgcatgagggctctgtaccttgtaccatcctatatgtag

SEQ ID NO: 197760 - DNA, 481 bp, Zea Mays
ctctaaatttgatcgagtactatggccgcagctttaccgtctgccacgcaaatgatttgtttctctcttctccccatcttttttctaggtgtgatttagttgtggtggcgaatggacggaaggagaagatagcctctggtctgctgaacccattcgtcgcccatctcaaggttgcacaagaacaaattgccaagggaggctattctatcacacttgagcctgacccagagattgatgcaccctggtttaccaggggcacgttggataggttggtttgcgtcccattgttaggggttgtcatttgcaaatttgttctttgacaatatacgtggtgatttgaatccctctctttcgcaggtttgttcgatttgtcagtacaccagaggtcctggagcgggtcacaaccatagagtctgagatattgcagatcgaggatggcattgccgtccagggcagtgacagtcttgggttgagatctgta

SEQ ID NO: 197761 - DNA, 578 bp, Zea Mays
caaggccaaaaacaacggcattcagcagcagcagcatttcctgtcgtcgtcgtcgtctgatgataatgatgatggtgacaacaacagtaaaccagcagccaccaagggattcaacttcgtggacgagcgtgtcatgggcggcaactgggttcaccagccccgctccgacgccatcgagatgttcttccggctgctggcggtctgccacacgtgcatacccgaggtcgaccaagagtcgggcaagatctcgtacgaggcagagtctcctgacgaggctgccttcgtcgtcgcggcacgggagctcggcttcacgttctacaaacgcacgcagacaggcgtttatctgcgcgagctagatccctcgtccgggaaacaggttgacaggtaatcatcaatcctacgatagcattgtagtgaagaaactactagtcctttttcttactgtccatctcttttcttatctttcctttttctttgggcaggtcatataggatcttgaatgtcctcgagttcaacagtgcgcggaagcggatgtcagtgatagttaaggacgaggagggcaaactgtttctgttcac

SEQ ID NO: 197762 - DNA, 439 bp, Zea Mays
atccctgattaaaagcatcattagacttagagttgttagtacaagaatcaggtacatgatcagtaccaggaccagccgtagggatagagcgggaacgacgaatgtaggtttggatgataggtggtttggaagaggaagaggtggatgacgtggaggtggaaggtggtgttatgggaatgagaacatcagatgtggatgtagaaggtgatggttcagatgcaggaatggaaggaagacacatgaaagaagtagattctgtgggataataggtggagtgagtagactggttgtgaaagaaggggcgattttcattgaaactcacatctctagaaatccgaatatgacgagtagatggatcataacaacgatagcctttgtgttcaggactgtatccaaggaatacacactctacagattgagcagtcaatttagtccgctc

SEQ ID NO: 197763 - DNA, 401 bp, Zea Mays
ggggatttgtcctcaggcggcaagatgatggccgccacaactttttgatgacagcaactgcatgcaaacaaaactgaaagcttctgggatagaggagagtcaaaactgggagacgagaggcccatgcgctagtaaagcgaggacgtacaagacaagagggagtagatggaacgaggctacagtaggctggtgaacggagaagcaatggtatgtgttcaggtaggcaggctgcctctgcctcgtcttcatccgtctgttgatcggcatggtccgcgtgcagtgcggcctgcaaccccagagtgacagcactggaacggtgcatatgccggcaccacgcccaagtgtacattgtacaactagctcatttactaatcgttgtttatttatttacgcaaaccgta

SEQ ID NO: 197764 - DNA, 303 bp, Zea Mays
attcttgccatggctccttgccttatcaaagcattctctaatcctcaaccaaagcatattattagatgggtctcgtatgcatgcacatgtgggtttatgtttggatggcatgtacatgagaaggcatcacttcatttcactatcccacttgccctaatcgccatggatagcttgaacgatgccaggcattactttttgttgtccataggtatgttttgctcttggttacagttccatgtttaccttgttccacttgcgacatttattgaagcaatgtttttgggtgcctttcctgtccatgaa

SEQ ID NO: 197765 - DNA, 373 bp, Zea Mays
cacgacaacacacttcgctgcacgcaactctcacccccgatattggcactctgcctcaatcatattcagagacttgggacacacaccctctcgattgcttgtaacccatactatgagcacttaggtgcgagataatacaagcctccctcccccgctggaaatagggccttctcttgcccgaaccgataaaaatcttgacttcttgcatcaccgatccggacagggacacgcagcacaaatttactggtcggttaggacccccggtttccaaaacaccgacactatctatatatatatgaaagattcatcaggggaaacatccatccattcttcatttcctggtacataacactgaacacgccaacccgagacc

SEQ ID NO: 197766 - DNA, 517 bp, Zea Mays
tcaagtaatcaacacgataagagagcaattgtacatatagcaaacctgaaacagagatcatagagtgttttgtaagctctagctttctccaatcatgatgctcaaaatgctgccactggcactcttcgtcattgcattttcctcgaagctcaaacatgcaaaagggccagaagggatcaatcacactgtgcaccatattattatcattttgggtagttgggagcatcttcatattttctccaacaaggtcgtgtatcatatcttgtacacttcctgtaacttcagacactgcatcactggtcagatggtcatttttgtaatctgaaagctccttgcaaatcccaggaaatgcccgcttgatttgtctagcagcatttagtggagctgaagaaggaaaaataagactgtccataaccaatggcatgcataactctttgagagaggaaatgttgtcctcaggatcacagttgcccattgaaggaccactacaagaattagagaggccaacagttttttc

SEQ ID NO: 197767 - DNA, 277 bp, Zea Mays
ctcagccaccacatgtgtgacctgatcgccatggtgccacccatgcacagagcaagtatggacgagattaggaatgagaaagagaagtagtggtggctgcccagagaaacaagccagcggcgactggtcccactcgaagttttgggaatgaggtaacagatagttcataagggctggatgggccagtaattgcagcccatgtcatgcagatcatgaggggagagatcagacataccttttattgtatgataatggactgagaatgacgtgggaaccg

SEQ ID NO: 197768 - DNA, 394 bp, Zea Mays
gaattcctctcgctcgaggggtgggaaagaagcggaaggggagacgagtcgagaggaagccctcgcctccggcacacgccatggtggagactcgccggagctccgccgccgccgccgggaagcgcacgtctccatcgccatcctcttcgtccgtacctcccccgaagcgctccaaggtgagagcgccccccgcggatcgaagaatctcgcgtcgccgtttcctgatttgacctgtcgtctaaccgatctgaaccgtggccctgaccaggcggagtcctcggggtcaccgacggcgtccgcgcccggcagggccgaggaggattctgtggcgggagcggcacccgcgaggagcgccggctcggtcgatgacgcggcagcggtcgcacagaaaggt

SEQ ID NO: 197769 - DNA, 834 bp, Zea Mays
gcggccacggatgcgatgagtcctgtgcaagtaagtggctctttggagaattccttagagcttttcctcgtttggattcatcatcattgggttgctttgtttcatcttgtgattgctaagaaagagggcttttggcatacaaagagtactgcaaaacaaaaaaaaggagtaaagggagcctaagttatatttgaatgataataaggtgtatgccactttttgttcgagatctggatttctcatgctagactagatggggaccatattacaactgaacaatgcttgctagatgtgatttgattttcttgtgttctgctgatggttgatttcttccttgcacaggatggattgttgataacaaaacctccaggcatgaggtttccatcaagaagaaatgtgcctatgtctgttgacccagtgggccatctccacaatggcagcagtttcgatgctgtctcggtgtcaggttcagatgcaagttctgggagatatacccccaaaattagtgcgaccatgcacaactcatatcttcaggatagtagcaatgctctctcaccatttgccaacaatggcactgtgaggaacccattgaccagttcgggtgactggtcaggaagctcagctcctgatgctagtacagatgggtcaacgagcaattctggtgaggcagggttaagaggggaggatgacgacgtggagaagctaagaagtgaaatagccactttaaccaggaaattggatgtctcagatatggagttgcagactctccgaaagcaaattgtgaaggagagtcggcgtgggcaagatctctccaaggagatgagtagcctcagg

SEQ ID NO: 197770 - DNA, 2210 bp, Zea Mays
ccatagtcagctctgacgtcaacaaagacaatccagcttgaacaccaaggaatatacatgttggctggttgtactcttggtggcatatctttgtttcatgtgaaggcatgaaaaagttagcaacttgaaaggaatatcaagaacaagtaagatgagataaaagatatattttcctccaaaaagaagcccttctacatccaacagtactactccctctgtaccaaattagtagtcgttttaggtcttctttttatgtctatattcaaatgaatggcaacgaatctagacacattacataacatatacatcaattattgaatgaatttgttgaaagtctaaaacgacttctattgtggaacagagggagtataattgaactacagatggaaaagaattatttaacaaggcaagtgaattgatccattttgtttatcaacaattcgcataaattgaatatctcgcatgtagtttccctactccctgctcttctaagttccttcaagtccagctcaatatgaagccatcatatagcgttgtgaaatggaaacaaagatttactgaactaaatctcaatagaaggccagcaaaaccaaggaacaacatcggtaaaccgatacctctgcaagattcttccctgtgacagtgccaatgcaagcagcaaggtactgacatacaatggcagtgaaattgaaaaggagagccagcaacaccaggtcgaatccaaaacaagaaccagcttcaacggctgccacccacttcccgagatcaatgtaacccattgaaatcaggagtgctggtccaagggcatggaaaaacttaggcataccacccctggactccttatatcccatgctctgttgaacatccggtgcatccatggtacggcaaaaaagagaatgccttcctgcgcagccgcagatcagtaggaaaccgtaccagtaaatacagaagcaaacagtacccaaactatagtctctcaagcaatcctgctattattcatacaacatctgatcgaaccccccgaagcctgaaaccactgatccaatcatctgcataggaacaatccacagcatttaggtgcctccagttcaagcagcttcatggcatgtgaacagccatggttcttgacaagggtcgtgccagatatggatagtagttctcagcttcctctccagaaatggcagagtgtactacgaagtttatgcaccacaaggaggttttcccaggaagaaaacaatacaagaaaggttggatttttaccaagagcaagaggtcagcggatctttgtgctcaatgaagcagtaaaacctagcttgtctgcctgcagatagatccaaacaacccaatcagcaacaagaaacagaaatccttcgtgcaaagtgaaccaacttttagagcgccaaactctaagggaaagggaagttgcagttgcaacagcagccagagcatagaaagggcaaaccaagaacaccttttgaccgagtaccaaccaaatccatcaaataacatcgaaaaaagcatttatttcgcaaggagaaacctcaaaagcttccacctttaagccaaaacttacttcgtaggcgttccccgactcaggcgtagctttcctctctttcgatttcttcagtcttcattcagagccccaaaggagaagagaaaagcagccccagcaacaccaggcagtggcaagtcaaaaacatcacaccgaaagggagggggattcctagcacggatagataggctaagctagcgcggcaaaggcgcaaagcaagacccccaacgcttggtttgcttgctcgatacacttgagcgagctcaagctatgcgcccgaagcttccgattccaacacatccagcagcgacggaaagctcaatttgggtgacagctacctcgacgcggcggcgggaactgattctggtagagaggacctcgattcggatggtggggatctcgattttggccgcacggcgtttgcgccgccagctccctcgagtccgaggcaacagcgacgggctctcgaggtgagaagcgtcggacaggacggcgaaccaggcacgtgactcagtccacacggcgctgctgacttcgattcgtgggcaccggagctcgtggaggtcgcagccatcgatcccaccgatgttgcagagctccggccgggtaaaatccttgccggggcggcgggtagcctcggatctgactctggtctttg

SEQ ID NO: 197771 - DNA, 788 bp, Zea Mays
cccgaaagcaaaatccgctatccaatggtcatggtggaacggacacaatagcaggattattagcatcactgatggaagttgtgcggacaacagtagcatgcgagtgtgtatatgttcgagcaatggtcatcaaagctttgatatggatgcaaaatccacatgaatcttttgaagagctaaaatctatcattgcatgcgagttgtctgacccagcctggccttcctcgctcctgaatgatgtcctactaaccttacatgctaggttcaaggtattggatcccttttagtgtttatactatatatgtagtgctaaatttgttacattattctcagtacattgttcatttttccattttaatttgttcattatctgcttgtgtctcaaatagtcaaatcatatttgagattgcaaccattgaacatgattagtggcattgagtgtttaatgattaaaagtaacgttgttctttttaaacatgacggtgcctttttatgttgctttttttaatcggaacataggatttatttcttttcagaaatttgtttgtcatttttttctagctccttttcatgcacccattgttttttatggttcatgcacttatccttctgatttttattagcatgtgtccctttatctgatttcatgattgacttattattctgtttgtcttacatgataggcaacccctgatatggctgtgactctgcttgagattgcaagaatttttgccactaaagttcctggaaagattgatgctgatgttctacagttgttatggaaggta

SEQ ID NO: 197772 - DNA, 412 bp, Zea Mays
ggagagcaaatgcgtgctatctatcaagagagtcgaccaagataaattgtccagcaaggatatctttgaagttaaggcaagatagatggcttcatattgatgatgctaagctcgagcacaaccatccatacaaccagtccactacatcacttattaattgttataaaaaactaacagatgccaagaatggggtatctgcctcacgattgaagggtcgcaggaacattccagctgaaaaagagcaagggaacttcacggagataggaaggcttaaatttggggaaggagacgatgaatatatccagaagttttttgggaatatgcagaacaagaatccttacttcttctacttagtagatttggataatcagggacgtttgaggaacttattctggagtgatgctaggtcacg

SEQ ID NO: 197773 - DNA, 645 bp, Zea Mays
gttgtttttaggaaaatctgggggctcttatgcataataggcacggcgaaggggtatcctttcatctaggccgcgcgatctgatttcaacgatccagattataatccgagccccgcgaaccggtacaggctcacaaccgttggatccgagatccacggcacagatcacttccatccgaacgctgctgaacttctaatcgtggccgcccgatcttcatctaatggaccggatcaactcacgcgaagggatacatgaattctattcacagccgcatgataccggatcaacgacccagcaccatctccttcctctcgtcgcttagatcgacggccaagcgcggcggcagtacacaccggtgagtcccagcccggtgcaccggtgaactacccatgtgcctactagcaaaacacgacacagagaacagagggaatcacccagctgggagttcttacctagactcggcaggtggcaggactgcccacacgctacggtgctggctcactacaacaggttcgaccggggcccaggaccttctccgcgctcgagagcgacgcagatgttcgcacgatgcctccctgcacccctctttccgacgaacacggcgacacgaacggaagctagaacttggcgtttgcatggaagggc

SEQ ID NO: 197774 - DNA, 336 bp, Zea Mays
ctagagtacctgtatgtgatgtgttgcattaaaaatctaggggggaagagctttggtagaagccttctagtcgccgaatactataaacttcctgttaccatgaagttgagggtgctgcaaatactctgtgatgatgtcattgaatcagaagaactcaaaactgaactggaaaatcgagtaggctacaatgaggagatggagtatgagatagaatctagtgcatttttggaggctggttcaagatcagtctcaactagagcagcaaaggcctcagcttgcaaaaacacgaatgatttccataatcttctcgaaagtgctccaaatgtaacaaatccc

SEQ ID NO: 197775 - DNA, 347 bp, Zea Mays
caaaaacagaaatcacgaaagacattaaggaggattgccttccacatccgaccatgacaccctaggaccaaacctcgtagcagcattagaagctacacctgtctttgttggcccgacattgatgactcccacacatgactccaacgtagcttctcctactctcgcaccacatgtaggagaagggtcatctatcaagcgtgttgtctagccttcggtgtcaaataactcaacttgcatgtttttgactattgcacgtctggtgctggcccgacattgatgactcccacacatgactccaacgtatcttctcctactctcgcaccacatgcaggagaagggtcatctat

SEQ ID NO: 197776 - DNA, 406 bp, Zea Mays
gatgatggactgtggatcggcttgccaaacgaggccttcctcacccagattcctgccccttgtgtgaccaggccggtgagacccttcagcacattctaattggttatcttctctagacaaatctgagccttgattttgcaatccttgcatctggaggccattacgcccaatgggacagagttgggtttcttctcatggtgggcgcggtctgtcaagatgggtcccaagaacattcgaaaggggtcgaaggctctttgtattctggtagcctaggaaatttggaaatttaggaacttgtgtgtgtttgaaggctcccaaccaaatgtgcaactcctacataggatacgaagtgagggtcttctttggtgtgctgcagggttgcttgagctcctgtccccagcctgct

SEQ ID NO: 197777 - DNA, 397 bp, Zea Mays
cttgtggcagaaaagccacttgtcggtatccacgttggtgccctgtggatgtggcactaggtcttaggtgtggttggccagcaaggccgtgtactcctccgtagcgcaatgccttgtggggatcggcgagggcggcacgaacataggagggaaccagggaggcatttggaggagcggtgggcagtcaggatcagtcggtcgacggggcggagaactccgttcgagcgacgagtcaccgtcgggtgaacgtggtcggagtcacgatgaatggtgtcagggtggtagattggcggctccgcataagaatgaggtgatggggcagcgagtaccaatggagtggtccacccgcgatagtggtagacaagggcggggtcggcgaagcgtgccagatggggag

SEQ ID NO: 197778 - DNA, 501 bp, Zea Mays
aagaaactccgttcactccgcgtttggtggcaggacagttgcttctactagcggcagcttcaatactgattcggtgagcccaggcgagtatgtcagggatcctggatccctactgagtttacaaccgtggatttttagaagaaacggctcacagaactacagggaaagtgtgcgcgcgagtggtaaaggcaagaatctggtcgatgtccttggagagggtcaagctgtcgaaatctctccaaggagcccttgtcttggttctgggcctggaagaggctgtggagctcttaggagcagaagatctcgtaggaatttgatgaagccacttgtgccaatggaaaactcctacgttccacagctttacagtgagaacttcgaaatggaagaatgcacgtttgctccagctccctccccagcttctactaggccattcgttgtgacagacggtacaaggataattagtaaatcacgctatgagccagtacctctgccctttaatat

SEQ ID NO: 197779 - DNA, 300 bp, Zea Mays
cgggaataaaggcctgcgagcctcaaccaaaccattttgttacaggcgcaccgcttggggccttccccaatccccatgatgaccaccattgcagatgcgctgcgtggaacgctaatgggcctgttctgcgagtgcgaataacggatcggcccattgcagcgctaatgggcctgttttacgagtgcgagtagagcggatcgatctaagactcacccaggcctgtccgcacatctgcgatggtccctaggccacaatagagggcccaaaggctgagatactgaagcctgcggacgcccagac

SEQ ID NO: 197780 - DNA, 283 bp, Zea Mays
gatgctcgtgatggttgtgtgattgaggagtgatgtagtggcaggcgagaagtaagtttaactttcaaacgattcgtgggtagtatctcggtgttgtcatgatttttgtggtatggcaatgtgatgcttcgctttgtcaatcatcacattccatgcccctttggataaataaatgtcttgttgatcgattagaggtcttatacgagtgttatcgcagcccaataattattgggggcaagtagcgttcatgagtcaatccttgctaaaattgaagaatagtccg

SEQ ID NO: 197781 - DNA, 429 bp, Zea Mays
acgcaccatatataccatagtcttatgcgaagggaacaaaatataccatagttcctctctgaaaatagatggttactatagatgtgtccaacatccaagcaaataccaagttagcgaaccatactagatgctgccgcaagttcttgctccaaactgtagcacccagacatcactggaattattaaatgttcctcattataaattggattgatacgttcatgtgggtgctgagcttctgcgcataacaaaggttccatttctccacccttttcaatcaaaagatgtgttttattccgtagcctctttgttcttagacattgcaatctcatatctacttctttcatgcttggtctatgtcctcctttggatcttaagcacacttctataagtgaggagatatcattaatctcttcttggtctgcctcttcc

SEQ ID NO: 197782 - DNA, 305 bp, Zea Mays
ctttcttactggtttcacttggccggatttatctcgagttttctgggtatttttttggtcggtggaggggtttcgcgcgccgcgacgttagtaactccgtcaatgcagcgcagcgcagtgctgctggtttgggtgctggtttcggtggctgagagactgagtggttggtagcggcggctcgtgatctagctgggcgggttgggatgtcgctgggtaatcgccgctaaatgcagctactcgtcgaaactggtttgatggctttgcaattcgggggtgtctgattcacttgatcgtagcggtagctg

SEQ ID NO: 197783 - DNA, 448 bp, Zea Mays
taatcatgggcgcggaaactataccaaattctcaggttttccgtgcgtggactctgaagaaaccgaccgagctctcaatatgcctgtcaccgacccacttaattcttaattgcgtatgtatgttgctcagctaattacgcgcaccaccctccggtccccggcagcagattgcatcagccactccctcccgcgtggccgcgtgggcgtgcgtggcctccaaatcaatatgcatcgaccttgtttgtccttgcgtccaccccaccacatcctcctgcatgcgttccctctccgatccatccaccgcactgccgcctgccggcccggctggctgtctggctcacacacactctcgaaccgccctcttcatctcttgccttccggacaacctcgtctcccgcgctcacgcaaccgccccttgatccacagccatggcgacctcctcacgccg

SEQ ID NO: 197784 - DNA, 742 bp, Zea Mays
gacggagatgaggagtttgacgaggacgaggaggacgggttcgagttcggtgacgctgacgaggcgatgcaatgcgtggtgatggcggaaagcagcaccaccgccgcggcgctgcgtgctcacacgcaggactacgaggcgctagctgcgcacaagcgcaaggcccttgccgaggagcaaccccagaggtaaggaattttccgattgctcctgccaatacttaaatggtaatctgtatagacatgccggcaatgggcaaacacaatttagttgctcatgatctatctagtacatttcagcttagatgtttattgaatgtaactttatgccacacaaatcttattgctcaaccaattccatttggtagtagtactagtatatttactaaaccttgccttttgatgttgtggcacctatctattttaatgtttcagtatgcttcagttcctttctgtgtggagctctcatgatcctctatggttggatgtcatttttgaagtatttctcttggatgtctaatgtttgctttctacacattgttttatagttaactgttttatgcatttgtgtgaccatcatgtaatttgttacaaggaactgttcttttaatatatatgtttgcaaactcttggtcatcttctagggaggagggtcccaaaaggccaagaccggaccaactttcagaagcagaagcagcaaccatgttcgaccaactgatggaaggctttggtcttaggcgtaa

SEQ ID NO: 197785 - DNA, 604 bp, Zea Mays
acggcgttcacgcccagccgagctccggcgagcacctacgtcggccgattggggcaacggctagggttcccgagcggcggacatcaaattggaccaagcccgagcatttcccctccattaatttcaccaagggggcactggatcaatcggttcatggtgtccgagcggacgggcaaggggatgaacgtgttccgatcaaacagcgatgaggatggccaaattggggctgggtaaagcttcacgggttcaccagggtctacggacacattttggtttgggcagaacaaggcccgaggagtgggtcgacggtgagggggccacgacggtgttcttcagagcaagcacgcgttctggtgatgggcttcaaccaaattctaattgttgatacagggggtaataggagatcaaatacaaccgagaacaaggagcaattagatacttaccgactcgaggggcgctggccacgatgaggttgggtttcgggtatgcttgaaccgatttggggcgaatgcgaaattagagctcgtagggaatcggttaggagcaatacttggtgtgggggtgcacaatgatattgcgaagctagtcacgagctcaatttata

SEQ ID NO: 197786 - DNA, 765 bp, Zea Mays
ttgggattaaattttgggatgttacaaacctaccccactgaaaggaatctcgccctcgagattcagactgggtttgagaaaaggtaagggtattgcctcctcaaagagtcctcactctcccaggtagcttcttcttctccttctctgctccactgaactttacagagtcttacttctgagtttcgggtctttcggacggccgagtcaagaatctttactggcttttctcggtactgcagatccttttaaatctgaattgtctcttcttcgatgtgactttctggcactttcaggcatttgcggagctgggatacgtgaaacacattgtggatatctgacatggattctggcaattcaaggcggtaggctgcgggtcctattctgccaatgataggataggggacgacgaattgcggagctagctttcctttcacttgaaaccttttgactccgcgcattggggagaccttgaggtagacaaagtctccttcctcgaacctaagttctctccgcgtgttgtctgcataactcttctgccgtctctgagcttcaagtaatcttttgcggatcagggcaactttctcttctgcctctttaacgaaggcaggcccttctagtgtcttttcccctacgttggaccacatcagaggggtctggcactttcgtccatacaaggctttgaactgtgacatcttgatactggcctggtagctgttgttatatgagaactctgcatacggtaaactggactcccaattcctgtca

SEQ ID NO: 197787 - DNA, 414 bp, Zea Mays
catgtcctctgatgccagtactctctcccattccactcctttacaacacccttttccctcctctattattgtcggtaacgggaattctattccagttacattcactggcgctgctgttcttatagattctcttcgtcttaataatgttcttgtttccccaagtcttattaagaacctcatttctgttcgacagtttacctctgacaataattgttctgtggaatttgatcctcttggttgctctgtgaaggaccttcactctcggagagagatcgtccgatgtgacagctccggtccactctaccctgtgcggtttccggcatctaccttccttgcctccaccactccgtcgctctggcatcaacgcctcgggcaccccggtcgtgaagttttgtccaaattagcccactcagg

SEQ ID NO: 197788 - DNA, 386 bp, Zea Mays
agaagccgctgacacctctattccatcaaacgtgcaacgatgcaacctctgtggtgggccatggctcacgtctcgaaggccaaggcggcctaccacccctccgtgactctgtgtgcagctgtgcgcgaaaacgaacagtgggaaaagagagagtaaaaagctaggagctgaaccagaaacgtgtgggatgcaagatcaaacaagcgttgaatcctttagttgtgcacgtgtcgcatatcgtgagcaggttgtaccagacgttctacagccgggctgctccaattttttcagttgtgttattggcgtagtgcagcgggggatggctctgaattcaaatataaaatattcactgatcacaaacatggttacacttctgtgaccaatat

SEQ ID NO: 197789 - DNA, 553 bp, Zea Mays
atatacatgcgtaccctttgtaatttgttacaagatagataccagatcgagtttacggctgctcagggacgttgcgtcatggcgtggtcactgttaaattgatagcgcttgtgcgattggaatccatgagactggccggtttctcaattttgttggttggctaagggagtcagggagacagggacaatttcacaactgctacgagcggtcagatctgttgttagacccttgtgtttacttgtgagtttggggtctgatactccgattagctagttagtggtctgattagctgcacactagctgaattttccagttactacctctgtaaaacagtgcatttactttgccttttcttttgtcaacacccaaaatcctaattcctgctcaatggtactactgggtcacaattgtgtcaatatgtagctgcttacttcaacgatacagttttggcgggtcttctttgatgagtgtatcctatcgtgctctagagtctagactatcttcgggccataatgtaaatacatggttttctataatgagtcttggttgggac

SEQ ID NO: 197790 - DNA, 798 bp, Zea Mays
cgaatgtgcattcaatttcttctcttaccttctccagctattccagtgatccaaatgatgtgaatgaaaggaacttaaacaaagcaaatgtttatcaatgccagaaatgcaatttgactttcggtgaccggacttcatatgcgcaacaccatttggcgtatcatgaaatgagtgttaagaggcgtaggactggcaagtttggtgagccagtagtagggaaagatggaaaatttgaatgccctatttgtcataagacctttgaggaggaaccacagtactttggtcatgtcggatctcatgcaagatatgaaggtttagctcctgaagcattcttggataaggctacttccagaagggcagctaatgattcattggcagaaattccatttagccttcaggaattgactgaatcacatggacagaacaacaaggtttcttatggtgaaaagggttttcagcaccacaatcattcaaataaacatggtgataataaccttacagccattgatctttttggtacaaattattcggataatttcatcaggccaaataaaacttggggtagtcctgaagagggaccttcctgtaatgatgctccaagtgtatctagatatacaaattttacaggccatgctgatgtgatagtttcagaaagggcatcaatctccaataatcaatctgttagcaacattaatggctttatatttagtgatcagccgggaggtaaccatgttgtcagacctactgcctctgtaacagccaatcattatgaggaccagattattgatcgtggcaggg

SEQ ID NO: 197791 - DNA, 810 bp, Zea Mays
taatcagtacaatggagtgcaacagagaagaagccttgaaagccagggaaattgctgttaagaagttggaaagcagagattttgttggtgctaaaaggattgcccttaaagcacagaggattttcccagagatagagaacataccccagctgttaactgtctgtgaagtacattgtgcagcagaagcaaaagtaaatggaatgttggatttttatggaattctccaagtagaaggaacagcagatgaggtgaccataaagaagcaatatcgtaagcttgtcctctcacttcaccctgataaaaacagttatgctggtgcagaatctgctttcaagtttgttgcagaagcatactcaacattgtctgatcgaaccaaacgatatgcatatgatgtcaaatggagggctgctcccaaagttgcaccaaagcaggctacacagccgacacaaccaaatcaggctacacaacagaaacaggatgcaaaaccaaagcatgttgctaaaccaaagcaggctgcacagccaaagcaggctacacaaccaatgtggactacagagccaatcaacaaaaatagcacaaatagtagtgcagcaggatatggaccttggacattttggaccgtatgcattcactgtaaaacaaaatataagtaccatggtgacatactcaatcgtcagatccgctgtcagaattgcaggcagaatttctttgcacaccagacaagtacagaggatgtgccttctgcattctcatcaaaaacagcaaatagtgctgcgcagcaaggctgctctacaaatatcttttctagag

SEQ ID NO: 197792 - DNA, 360 bp, Zea Mays
gacgggagtacgggaccggcgggcggaagacgaacgggattccaaaaaaacgacttgtcgtggcggagcggaatccacaatagcgacgagccgtcggggtctgccggcctggatgcaaaccagtctcgtcgtcacggactcccggaataaatactccctcctgcgtatagctcttccctgtcctctcatacactttctctgctcgcgcaaagctcttcctcgtgtaaagacgacgagaaatttatgtactctcgcaccacctcacaaacagacctgatcctctccgtttctttttgtttcccttttccctcttccgcgattccgtcgcccggttcaatttggacgcgcgcggcgtagggc

SEQ ID NO: 197793 - DNA, 345 bp, Zea Mays
gctgagaagtatcactgacacgtgctacggcgtccccattggtgctctagcaatattacatgctccagtaccagcacctgccccagtagcagaccctaacccaacagcagcacctaacccaggagcagcagcatctgccccagtagcagcagcacccactgctactggcacatctgctgatgtgcttggcacatcccatgatcccgtcggtcatgcttccttcaatatccaactctgagtctttatcagtaccctagcttcatatcttcttttggtcaaagcattattgatttagttggaaggagtaggaagtcagatgcgctgaacatcttgaaggcttttgat

SEQ ID NO: 197794 - DNA, 437 bp, Zea Mays
gaaagaattgcacaaggccattgttaatttgaaaactgtgtgggtcagactagcttttcgtcacctttctttgcccgtcctccaatggcagccgtgactcagactagcttattttgatagtgtactagacaggacctttgaaaattgtgtgtcctccgaactttttcatcacctttctttgctcctctaatccaatggcggccgcaagaaccgaaaaggtagcatatgtatgtgcccctacactacaccaacacacgaagagaactacgtagcctacccagcatgtcttcctcgtgcttttcgttccctcagtgctcgtcaaagaatcaccatgcccatgtgaaagggaaaccgatcgaaaccgcaacagatatagctgctgacctgtcacgtaaacttgggcgacggttactcctcggatgccatgccagtgttca

SEQ ID NO: 197795 - DNA, 474 bp, Zea Mays
ctctctggctgggcgtgcaaaggtcgtctggaggacacatccaaccctggaaagttcgtatgcatggcatcaggagcggtcacttgtgcgtcagatgggaatggtttcaaaacatgccagtcactctgtccatgttatgtaagtagcaatggagctttttcaaaaccagttaagagagcaagtcaaggagaatctagcacaaatactgacagaaatcatagctcacacaatgctgctactgaagcatcgcaatgtaacaacagagcctgttacattcccaggttaagagtagaaagtagctaccttggtgttcattcatctacccctacaaaatcctttcgccctctgtctttcaattatgttgcaccttcattatattcaagccttttctcatgggacacagatacactagtatccggcccagataacatttctaagccaattgataccatattcaaattccacaaggcaatt

SEQ ID NO: 197796 - DNA, 299 bp, Zea Mays
tgatcaaatgcgtagaaaagagacaacactttctggatcagaatcctttaaattaaagaagagcttttcggattagtttgtgcgatcctgtttcttgctagctgtggctggtttttttggttcatagcctaccgactccgacacacgctatgttaccgaatccagatctccccaagatcgtctataaatatatacatctcctggctgttcttgggcgacgacctaacctaccagacgcacgcacgcacacaacagaacagctaacgtcggtttcagaccttcctgacatgcagtttctt

SEQ ID NO: 197797 - DNA, 758 bp, Zea Mays
ggaaaattagcatattggagaaagctgtggagctcaatccagatagtgaggaattattgctttgccttctgaagtcatatggcaagagggacaacactgagactctattgactaaatgggagcaaatacttacgaagcacccagatagctctacgttgtggaaacagtatctgcttctgtgccaaggggaattctccagattcaaagtttctgaaattcggaagtcctacgtgtatgctgtacaggctctatctgcagcttgcaccaagttatgtaggcaggttatacttcaatgcttctctgtaaattactttgtctgtttcccatacccctatgaactacgaaacattgctaacgccttttctttttcttttccatacaggataataaaagcatggattccaaatcttcatccttagttcaactagaagtggggttggtggatatatttgttaatctgtgccgatttgagtggcagacaggacatcgggaactagcaactgggctatttcaggcgcagatggagtttagcttatttgcccctcctttgtatctgacaacaagcagtaagcaaaggctctttgaacacttctggaacagtggtggtgccagaattggggaagatggagctcttggatggtctgaatggttagcaaaagacgaggagagtagacaaaagttgtctatgcaagaaaattcacaagagactgaaacaggaggctggagtggttggtttgatccttctctgggtaatactg

SEQ ID NO: 197798 - DNA, 337 bp, Zea Mays
cgggagatggtacttcccattttcttgaagaacaggatgtagttcttttttatgcctaagtttaccatgtccacgcgtgaattgagcccttcttttgttttgccctttatgtctagcaaggtgccaattatgctttcaaaaacgtttttctgaatgtgcataccatcgattacatgtcgcacatcaaactctttccagtaaggcaagtactcgaagagaatagacttctttttgaatatagcccccaaagctggtttggcatccttccttgttttcctatcttttgtcttcttcccgaaaacaaagttgatattcttgactatttcaaaaactctat

SEQ ID NO: 197799 - DNA, 556 bp, Zea Mays
ccgagggtgagtaggaactgttcgcgccagcgagggaaagtaccggcgccgagttcgagggtagaggggcggcggtgcctgggtggtagacctccagggtagcggaagaggaccaggggggtagcgttgagggcagcacaccagagggaagcaaggtggcgcctagggctgcgtgccgagcagggaaccggccaggaaatgggtttggtctgctgataccatgtagaattgcagctagaatagtattgattgatgtcacggatgatacgcttagtgtgatcgttctgcaaggaggtgtagggatggaagacatgcgaagaagatgaatgtcgtgggtgaggaagaatgtgcgagagctcgcattatcgaactcaaatgaactcattctgcattgcagtgatgatatgctgcaggagagcaacagaagatgcagtgagcacaatatcattcacatagagcaacgtgtagcactatgacggaacacaaacagtgaaggatcaaacttggccgcaacaaagccaagtgagtgcagctatgcagcaatccagtgtaccag

SEQ ID NO: 197800 - DNA, 520 bp, Zea Mays
ctcggataatgaaaccacatcagttggaaggtttcaactttttggttaagaatttgattggagacaagcctggaggttgcattctagctcatgccccaggtacagggaaaacatttatgcttataagcttcattcagagcttcatggcaaggtatccatctgcaaggcctcttgttgtgctgcccaaagggattctaggtatatggaagacagaaattaaacgatggcaagtgcaggatataccagtgtacgatttttactctgtcaaggctgaaaaaagagtagaacagttgcaaatcctcaaatcttgggaagacaagatgagtatactatttcttggatacaagcagttctccacaatcgtcactgatgatgggggcagcaatgtcacagctgcatgtcgagacaggctgcttaaggttcccaaccttctgatacttgacgaaggacatacacctagaaatcgggagactaatgtactcgaatcactaaatagagtggaaacaccacgcaaagtggt

SEQ ID NO: 197801 - DNA, 378 bp, Zea Mays
tcgcggatgatacgctcagcgcagctgttttgcgaggaggtgtagggacaagacatgcgaagataaatgccgtgggtgaggaagaaggtgcgagagctcgcattatcgaactcgcgaccattgtcgcattggagtgcctttatggtgacgccgtactgtgtatgcacaaagtcaatgaaactaagagtgtcgaaggtgtcagatttaaggcgtggggcatccacgaataatgtgaaaaatcaattataacaagatagtatttgaaacctgaaacactaacgaccggggaagtccacaaatcacagagtacaagttcaaagggactagacacacgagatgatgatgactgaaatggaagacgagtgtaagcccaagctg

SEQ ID NO: 197802 - DNA, 323 bp, Zea Mays
gccagcacccatctccatggcatgttccacatcaagctgttcaaaccgtcctacgaggatcctccgacgactacgccatacatgccaccagttcaggatggtcggttgttgcatgctccaagtgttacacacccaattacgttgtggtgtctagcatgtgcttgtatagtggcagggcctgaccagcattgacgctacttgggagccactgcacgatttcacaaaccgataccgagacgttaagcttgaggacaagttgtttgaagaagtgagaagagatgttatgacctgtatatcttatgcacgctagaaaacaagtcatg

SEQ ID NO: 197803 - DNA, 333 bp, Zea Mays
tctgctgcagccgctgcctgctttgctgcctggactgccagcgccgctgcttcctctgcagccttcaggcgtgcagcccggctggagaagtcgcccagctctccttcgctagttcccttggccttgagcctggcagcgcgctcagcagaggtcgacatgagtagagaagagaggagtcggccttgaggctctcaggtgtctaacctaagctctaataccaaatgttagaggtagacagagtgttttgccgggggtactaaccacagctatcattgcttgattatatagaaggatgagtcacattgattacataacagctcattagagcttagc

SEQ ID NO: 197804 - DNA, 441 bp, Zea Mays
atgggattgagaccactcgaggttccgagctcccgcaatcaccagtgaggtatgtcggagaacttttcttataagttatgcggatacgacccaaagtgctagggagcagcatcgtgttcctcgtgccgcaatttctcgctcgcctcagttccgcctccctgactcaccaggactggggattcgctgatcagatgcggtgtgtggggccttgctcagcggcggggctgggaggtccgagcggaatagatgtcgatggcatggcggttgctccgcacaatccatttccggcatctgaggtaaacgagcgagggctttcatctcaccacctgtactgcactgatttttctttcggtctaactgattgattcaatcaatttcagcccaggtgtcaggcgagcatccaagattgtagaccaaggctttaccaataatgccccagag

SEQ ID NO: 197805 - DNA, 401 bp, Zea Mays
gtaacaaatatcccaggaaaccagacagctacctccatcagcctgtttcctccccttccaaataaaccctcttctaattttgtcgatagatttatcatttaaccatccaattgggaatattcattgcaatcagaagataaaccgggatagccgaaagcacaatcgcacaagagctgtgcgaccagcaaggttaagaaggtgtgctttccaatttggtagacgatcagcaatcttgtcaacccatatcattagatcactcctcctaagctttttatctgatactggaagtcccaaataagtgcaagggaaggcagccggtgcacaccgaagggtcctgcaaccttcctgcatagctgacacatcacaaccaataggaacgacacaacttttatgcatattgg

SEQ ID NO: 197806 - DNA, 352 bp, Zea Mays
actccatatcttctgttccgatatatacggtaacttccagcttcgtgggcgcgctaatcacggtggtgtgtggacccacctgaacgaaccaatgaaatgtttgttgccgctctcctgttatgcaagtctgaaccattaaatatgttagcataaacacgagtaggaaccaactacccgaccagcgaacacgacactagcccaccttcgtccatcctaactcgaccccaccacgtgcgcaccttctgtttacgtaaaacataacacatgtttacacatgcataaacgtgccccacaatcgcgcagacgcacgcgccccactggccccacgtgaccacgtgcgtgaccactacct

SEQ ID NO: 197807 - DNA, 455 bp, Zea Mays
ggaagcctttaaccactaggctagaggccctttcgccatccctttcgccatattatttcttagtttctcctaaaatgtctgatctatggtattgcttctcataggtttgtggttttgatctcttaagatgtgatgggagatcatatgtctgtgacgttaatggatggagctttgtgaagaactcatataagtatttttcttaatgttcagtttttaattgggaaacctgtcagtttgatttaataagtgctgaaatgtttgaacaaacttgtcatccaggtattatgatgatgctgcttgcatcttgagaaaaatatttcttgatgcaaaagctcctcatctttcatcaaccatccctccaactcttccttggaagtctgaaccagttcagcccactgaaggtcttacacgacagggaagtggaattattggtacatttgggcagtcagaagaac

SEQ ID NO: 197808 - DNA, 406 bp, Zea Mays
gattccacttatactatcatcagctaattaggagccttgtctatttgggatcacatgtcctgacatttcacattcggttcatatcttgaatcagcttgtctcggctcctacacagcttcgttgtactcacctccttcgcgttctgcaatacctttgtgaaactatctcacgtcgtcttttctttccccacttgagctcccttcatcttcaggcatactctgatgcgacaagggcaatcactctgaatctatgatcatcgctctctctcgacttattatgtttttcttggctccttgattgcctagaaaaccaagaagtaaatagttgtttcccctcgagtgttgagactaagtttcttgccatagcaagtatagctgtggaggtgacatggttccaatggcttctt

SEQ ID NO: 197809 - DNA, 316 bp, Zea Mays
gggatttgggtgatagaggggcttaaacagggaggtatgcagagggagcaccaggactgatggagtaaattcagagttggatttagtaaactgaagaagctttattcctccttgttgtgcccatctgatgctatggatcgtgatatggatggatataaggatgtatggtctaactcaggttctagagttttttcccactgaaatatccacttttggactgatttggagatagtagagagagtaattcggttaactgaaccttggatcagatttggcggtgaagaaaagatctctccctgctggtctccttgtgtgt

SEQ ID NO: 197810 - DNA, 957 bp, Zea Mays
tttggagaaggaaagaagtggattggatgagcaaggtttaaagattgcggagaatcaagaaactagtcaaaagaacaggcgtaagcttgctgagaacacacgggatttcaaaaaggcatcatcagatgagaaactcagtttactcaattctttgctgaagagttatcaagaggaagttgataacctcacaaagagagcaaagtttggagaaaatgcatttctcaacatctatcagaagctctatgaagctcctgatccatatccagctcttgcttcaatgactgtatgttctttcaattttttcttctgttgtatacttgcattcttctaattcaattctcttgtactcccaatcacaaatgcacagtgggaagtccttactctttcaaggctgaaagattgcacatcatcatgaacatgaagcaacagatatcatcttattataatttacctaacatattaaatactttatatgatcaaaattcttgtatagcacctattttgtactaaatcacccagctgtattcccacactcgaaaaatgcaaggtttttttgtgcaacaaatgatgcggatttaacattgagaaatataaatgtatcacggtaagttatcaaaatgtaaaaaaaaacatgatagtagtttgtgaaaaatatgacgtggtctgttttcctccgtagcatcatgaattttcaacttcactttttttgcttgatcttgaatcagtttatctaacaagaggcttgtctgaatatgataggtgggtttaataaacaattctagtgttaatgatctatttcatgcaggatcaagaccagaaattgtctgaactggagactgagaaccgtaagatgaaactagagcttgaagaataccgtgctgaagctgcacacttgaagaaccagcaggcaacaattaggcgacttgaagagcgtaatcgccaactggaacagcaggt

SEQ ID NO: 197811 - DNA, 344 bp, Zea Mays
ccatagggcaaaccgaacacttgaccacaatctagaccctactcataatagcaggaagaccaaaacttgctagctgcttagccccagccctatcccagcagcttaactcattcataaacaatttttttacagagcttagagaagggttcacaccatcaaaaacaactctgtttctagtcagccataagcaccatgaccccaaaataatgagactgttgaagcctttctttctgcttttgtgcaccttcttaatcaccttcctccaccaatcagcaaaggagatttcatcaacagcaggagtaagagcccctagactcaagggaaaaaggatagcatgccaaaac

SEQ ID NO: 197812 - DNA, 559 bp, Zea Mays
tgagatttgtccggatagagctgttagaaaagggttcaaacaatcttcacttaaattgactgcaaatgcacaagatgggacagtcactttggagaaatatacatttgaccaagatgtagctaggaaagagcttgcattgatgatcattgtccatgagtaccctttgtctatggtagatcatgatggatttcgcaagttttgtgctgcacttcaaccattattcaaggtagtgtctagaaacacaattagaaaggatatcattgatatgtatgaagtgcagaagcaatccatgctgaaatattttagaaatttaagttctcgtgttgctgttacaacggatttgtggactgctaaccatcaaagaaaaggttacatggcagtgacaacccatttcttggatgatgattggaagctcaaaagtttcctcattaggtaataatgaaagcccatcttgtttcaatactcatcaacaatgaaagcccatcttgtttcaatactcatcttgtttgttttgtaggtttatatatgtcccagctccacatacagcagatgctattac

SEQ ID NO: 197813 - DNA, 754 bp, Zea Mays
gatgctgagatgctgagaacatatgggattggtttgcttgctatggcgttgtgcaggtactgctaatgcctcattgatttattatcatctggtaccgaatattatccttttactactgaatttattattatgttattctaattcttgtgtgcttcaattttcacctcagcagtgggcaattgatagaggatgtcttgactttgggggtatcagcgaagctcatgcgctatttgcgcataagagtccttggggatgcctcatcttctcagagagatgctaatcatccacaggacaccaagcatccttggggcggagacgacagtaggggtaaatcacgtctgtcccaagatggttctcgattggacggaacaagggttgggtatggaatgttaaccaacccgacagcagagaagaacaacgaaccttgtgttggaatgatgcaagcatatggagcaaggtcattggatgacagttttgcttcattggatgattctgatgtccctgaggctgattggaccaatgatagatcttatagcacacgtgtttgtgacacaaagtcaaaacatggggaaaggaattctgtgacgaggttgcttaaagatgaagaggtcagcgaaaatggtgaactgttgaagagaaagctgaatcgagccccctcccgacttagagtgaagggaaaagcaggtgacagcttgccagaatgtgaaatgacacctttatcgccaacctctggattgagaataggaggtcaggc

SEQ ID NO: 197814 - DNA, 272 bp, Zea Mays
ctcgagctcgagttcgtgcagggagaagaaatccggtccaagaacagagtggaatgcaagaaaggcggcaacttttacccctccaatcgaaagaaaacccccacctcctcctcaatagcaccaaaaccagcgccggaatcaagaaccgctcggcgctacaaaccaccagaaaaacggcgtgctttcgccgcaaatcgaggcaagaccctggtgctccgctgcagcagctgcgattcgagggagtggggactccgagttggatcggcgtggag

SEQ ID NO: 197815 - DNA, 570 bp, Zea Mays
caagaatgtaaacaacaccaccatgcttggcagcagcccaggcaagctctggtgtgctggctaaagaatatagtacagcaagagctccatccctgcaaggaggattgcagtggagtatctgaaatagcaaaatgaggctcatcctttctgcaaccatagcctccaaacaaggagcatgcttagtcaacagagaaagaatacttaaacagatttgtgggatgctgctttcaggagaaacatggagtgcaaggcattcaaaaagaggaaccagacgctccttggtagcaaaaacagcagctaagcctggattacttgtaagaagattctgcaatttcaaacgaaatgatgacatgcaattcagtaaatgtgcctcacacagaaaaggtagaaagaaagtactttttcaataaaagcacctgaagtgatgttagcccacattggaggtttataataacttcagaatctccatctgtactttgttttcctgatgaattgtccatttttccttcaatagttgaatcactgacttgatcattttcagaaatagatgcttcaataactgaaccatgt

SEQ ID NO: 197816 - DNA, 279 bp, Zea Mays
caccgacccacaggtcttaagcttttgggctgccattacagctggaactgcaaaaccaggatggacgaaagctgatggtctgctactatttcaagggaaggtcttcatcccggacgcttcagcagtttggacagaaatcctggcagcaacacacaattgtggtcacgagggcattgagaaaactgtacatcgatggagagcatccttctacagcccgcatgccttacgacgggtcagagaatttgtgcaagcgtgcgccacttgccaacggaataaaat

SEQ ID NO: 197817 - DNA, 345 bp, Zea Mays
gcgaggacggtgggatgtacagacgcctgtcgtagaggaccatgttgtcggccactgcccatggagcagcgtgtgtgcctgtgttgatttcgtcgtggagggcggccagggcggggtcaatggcctaggcgtggcggagccggctgatgaagtcgaagcggggcgccaagatcgcctgtagagccccgtgtcgtccttttcggtgtcgcggcgcgagagggcgtcgaccatcgtgttcgttgctcccgacttgtattcgacggagaagtcgaaaccgagaagtttgcccacccaatgatgctgagggatggtggctaggcgctggttgaggaggcacttgaggct

SEQ ID NO: 197818 - DNA, 286 bp, Zea Mays
gaggactaacaagtagacttacaatttttactcaagtcatttagtgcactaaaattaccacatacatttaacaaatgcattcaccccgtacatagcatcatcacacatgacctcgacttaaccgcaaaggaagagatgactacttcggcatgtcacaacctctctaccgaccaaatcaatcttaactacatcgatcggacctcatatcacgcaacatttataatttactatctcaaatacaaccatatcacgacatgtacttgggacacttcggttcaacttacgc

SEQ ID NO: 197819 - DNA, 296 bp, Zea Mays
ctggcggggccgtttctgttggacccggggcctatataatccggtctccatccctgggatcccttggaactggtgctgcccgccgtgtgcaagaagaagtcgtttcaaagcaccatggggaggtgtatgtccgctcgcatgggcatctcgtcgggagctttactctgggcttggttgatggtcgaggagagtctccagagcacaatgaacacgttcgcgacctcacatggcggtattgggggcttgtggagcatggggattgctcgccggagccaaagaaccaccgcggcgccgcc

SEQ ID NO: 197820 - DNA, 395 bp, Zea Mays
tcaaaagattagtaacctgctctacaaattcagaggacccgagtctgttagggatgaccacgacatggtcctttagccacacgacaccacacgagttggttgtcccaaggtcgtgcacatgtccattgtttgcaaccctcgactatcatttacagtgatttttccagtcataatccaaaaaatatcttttatgatcatgttttagactagtctagtgatagtcattcttagcgttagtcgaaaaaattaattagccgaccagtcttgtccactgtttgtagccctcgactatagtttagagtgattttccagtcatagtcaggaatccagattatctgcctggagtaacactaagaatgtctatcactaaactagcccaaggtcgtgcgcatgtc

SEQ ID NO: 197821 - DNA, 462 bp, Zea Mays
gctggtactaaatatttttctagtctggatcttactgctgggtatcaccagattagaatgggggaaggtgatgagcataaaacagcctttaaaacccatcagggtcattaccagttcagggtcatgccttttgggttaaccaatgctcctgcaacctttcaatgtgctatgaattctgttttggctccttttcttcggaaatttgtcatggttttcattgatgacattttggtctatagtgctacatgggaggaacacttggctcatattaagatggtgctgcagactttgagagagcaccagttctatctgaagaggagtaaatgtgtgtttgggaggaatgagctcatttatttgggacatattatctctcacacaggagtggccactgatcctgctaagacaacagccatggagaaatggcctgttcctcagtcagtaactgagttgagggggtttttg

SEQ ID NO: 197822 - DNA, 2179 bp, Zea Mays
cctcctgtatcatcagcaccaggaacacctatatgcgatcctcatggtgatccaccactggtgggagactgctggtacaattgcacccttgaggacatagctgggaaagacaagaggcaacgtctccgtaaggtgcagttctcatgcttttgttgtctctctgaaggttcagttcaaatgcataccgaacactctggactggtatagaagctgtatcatccatatccccatttccatatttttctgacttctgttttgttgttgagaatcatttaacaggcactggggcaaacagtagagtggtttagaaaagctctagctgttgaacctgtcaaggggaacctacggctcagtgggtactcagcttgtggtcaggatggaggtgtacaactacctcatgcgtatgttgaaggtaattttcagttttaatgaatcagtttagcaatcttgcattcttgcctgctaattgcctgactatgttttcatgtgaatctctcctcaattgcagatggtgttgctaatgctgatttagtcctcttagtaacaactagaccaacaacaggtaacacccttgcatgggctgtggcctgtgaacgtgaccagtggggtcgggccattgcaggtttgtgaaccaactcaattaagtacagacatccacatgccaggggtttctagtgttgttctgaccctacatgtattctttttctgcttttaggacatgttaatgtggcccctcgtcatttgacagctgaagctgaaacattactttcagctactctaatacacgaggttatgcatgttctagggtttgatcctcatgccttcacacattttcgtgatgaaaggaaaaggagacgtggtcaggtactcaacaatgtatttcccacttcagtattgtgatatattttcttttgcttaaaatagaccctaatgctcaaaatgtcagtgcattaccttatttaaatttgggttgcacttcgacctgcttttaatgtttctatgactaaagcgctagaaattcgatgggtgatgtcaactttgctggtttatggaataatcgctttggcaattaccactatatggtggtaatacaagggcagttaagcggataatcctaaaaaatggttagatataatttaggttgcaggtgcttataagttggagtcttgggagttacgtgtagacctcatcggtctgctgtaagctttgtcacatcacatgttgggcaaccagctcacgatgacatttatgttaaaatgtatgccagcaactcaatgattgctgaagaatttgagaacatgacctccatacttgtgtgtgaatatgtactggacaaaaagaataaaattccacacagtgtggcatgcttagcttaacaaccaatattcttctctaatctatgtttatctatttgttccttcaggttactgctcaaagtttggataaaaagcttggaagaatggttactcgtgttgtcctaccacgagttgtcatgcacgcgagacatcattatggagtaagttctaactaaagatgtggaaaaagttaattgagtcattggcgacagttatttattttcatgctctttacttagaaaaccccttcatataaactaaccaatttgttttcatgctctttacttagaaaatcacttcatataaactaaccggtttttgtcttgtactcttgtgctaggcattttcccaaaacttcactgggttagaattggaagacgggggaggccggggcacctcaggtagataacatgcaccctttatggtcttaatttttatttttctttctttccttttttcatttgctgttatatgtatgcatcatgcaagtttccaaacacattcatttgttttgatgtttgatatactattaggttcacattgggagaagaggctcttaatgaatgagatcatgactgggtcagtggatacgagatctgtggtttcaagaatgactttagcattactggaggacagtggatggtatcaagctaattacagcatggctgaacatttagattggggtcagaatcagggaacagagtttgttatatctccttgcaactcatggaaaggggcataccattgcaatacaactcaattatcaggatgcacatataatagggaggcagaaggttactgccctatagtaaactatagtgggg

SEQ ID NO: 197823 - DNA, 563 bp, Zea Mays
tcgtcattgtctgctacacctccgaattaatcattcagcttgctttcttcagtggcccagagggttgctgctccatggcccccctggcaccggaaaggtactgaatttgcaattccttgtcttgactctcagctctttcttccatcatctaaaataactaactctatcacaagtctttacaccgtgaagtgtttgggttgtttctgtatatcgtggagtgcttggattgtttttttgggtttgatgtttctgcaagacgtaaacagtatggtgattgttattttgacagacaagcctggttcgagctattgttcgagaatgcaacgcgcacctgacaacgatcaagtactgaatttactttgttgtgtttctgttagtgctgacatgtacattgtatttttcgatatgatttggaatattgcttctggccaccttgacagcccatattctgtacacaaagcccatgtgggagagggagaaaagttcctgcgtgaagctttttctgaagcatattctcaggctttgcggggtaaaccagctgtgatatttattgacgaacttga

SEQ ID NO: 197824 - DNA, 406 bp, Zea Mays
cacatagtcatacctaaatattagagacttttttaatcacgctgtctaattcaatgacatttttcagtcatttcgttgcatgttgcaatataagacagtaaactgtcatagtcgtctcttacatgtttaaactcaattataagactttcaactttgttcaataaatcaacgttttgtttcgcagctttattttgcaatgactagaaggacagcagcataattaatacatcaggattttaattaaacagcaccaaataaatattgcattattcattaacaagcatctatcatccagcgtccagagttgaactggagaatgagcatatgtaagaaattaacatgcccagttcacatgaggtcacgcaaaggaacacgtgagtcgtgagatgttatttgtctttttttt

SEQ ID NO: 197825 - DNA, 990 bp, Zea Mays
gaaagatacacagcgttcgataccaatcggcacattatctgcaactctttcaacaactgctatgtacttgttctctgtgcttctgtttggagccttggccacacgggaagagcttctaactgataggtatctagtctactttttagtactatacacgagttcttgtgtcaattgccgataattattttaagggcttaatgaatctggctttatagttcatgatgccgttacagcatatgtgctagttttttcatcaagttcaagcaaacatgattttatggccaaaggcataattactgtcaagcttttaagtttcctaacagtagcgaaaatgattcatgttcttacttgcatccatcacttgtttctggttgtttatgaagtggacacaaacttttttattagcaaattgttggttactgttatatagatcctattttaggatttatgctccatacttctgcaatcagaatgctctacgattaccattgtgcatctggagctactatgaataaatgccagcagatggtctgttactaatctgctttataagattgatgttcatattattgtggtagatagtcttaatggctaagaatactctggctgctttgtataaccttaatgaagtctttggtttatttttaccttatcggttattgtcttagaacaacattctaacagcattactgtagtttccagttgcttattttattatgtagccacgtaaggcttacgccagctgttacagtgtcttctcacttgtgtggttatctcataaatatccttaaccacttgcaggcttcttactgctacggtggcttggcctgctcctgcagtgatttacattggtattattctgtccaccttaggtgcagcactgcagagtttgactggggctccaaggttgcttgcagcaattgcgaatgatgacattcttcctgttcttaattacttcaaagtttctgagggatctgagccacatgcggc

SEQ ID NO: 197826 - DNA, 285 bp, Zea Mays
aatggttgataaggttgaagcaaattttggtgagtggccaataatgaacaatactggaatataaagatgatactgggaaaagggacacgttttagacgcagaagagacaagacatgctggtgaaattgatcagattctgctatctgttctgacttgatgtatcgacacagctgaacatgacttgtactgttgactagtgcaaaggctttacagcctgtttggtatcgacaccccctcactctttactttttgtatgatttgtggaatggaataagttgttccatc

SEQ ID NO: 197827 - DNA, 427 bp, Zea Mays
gcccttccctgtttcctggcctggctttataatctctcggtcgctactgattgcccgggtcactacttccttcggttttactatcccttcgtttccgctagccttctccttccagagcaaccgcgccattcgtctcctccgtctcgttcgtagtgcaacacatacagcctcgtctggtgaagtgaaagaacgacaagatctgtggtacggcggtgccggccgacatccacccactgtgctaccccttgcggttccagccagcgcagcgatcgattcccgctggccgctgccgtcggtgcctgcccggtcctccactcctcccgctactagtactagtaccagcacactccactgtccactccactgccagtgccatcccattcccatccgaggtaaacgcgtcaacgcgaccagctcacctcgtcat

SEQ ID NO: 197828 - DNA, 297 bp, Zea Mays
gtcagactgagggtggaacgccgtcgtcatgtgtagctttgtacccatcaggcgcatgagttcgcgccaaaatgcggaggtgaagaccgtgtcccgatcagagacgatggactgagggacaccatgtagacgaacgatgtcggtgaagaaagcctgggcgacggattcagcggagtacgggtgtgccaggggaatgaagtggcagtacttgctgaaccgatccaccacggtaaggattaccgacttgccgcggacgcgagggagggcctccacaaaatccatcgcgatgtccgtcca

SEQ ID NO: 197829 - DNA, 1431 bp, Zea Mays
gcgcccgtggtgatgagtatgatggggccatgtattcacagcttgtacgttgttctggtcctaagaaacattctgtttacactttccagtttcccctggacttctaataccatttttacacattttttgttttctagaatttgattgatctagctggttctgagagctccaagacagagactacagggttaagaagaagggaagggtcatatattaataagagcctcttaactcttggaacagtaagttctcattgccaattacctgtgacaacaacagatttccaggttattaccagcagcattgacttcaactcagcttctgaagaccttgacctcatataattataacttgtatcaaaattgaatctgagcatatgatggaaagtaactggtagaatatgtggagagcttagcctgttatcggatacaagtactcatttgcaacttcatttcttttgagcttcactgtgaagaggagggtggcggtgacctagtatttttttattaattttccactcttaggatctttagctacttctgtttacgtgaacattttttaattcaaaggtcattggaaagctcagtgaagggagggcaacacatataccctatcgtgattctaagttgacccgtctactacagtcatcattgagtggccatggtcatgtctcagtaagtattaacttttacaattgcctttctgggagccattccttttaactcattccattgttctgttggagcattgaagtgaaccactgaaacctcttgaagtaatcagctgatacagttactttttcttatgcagctaatttgcacaattactccagcatcaagtaacatggaagaaacacataatacattgaagtttgcaagcagagcaaaacgtgttgaaatttacgcctctcgcaaccgggtaaatagttaggcatacaaaactgatttcctgcaccactattatagaaaatgaaatgaaagacataatgatcttgactgcccagataattgatgagaaatcattgatcaagaagtatcagaaagaaatatcctctctaaagcaagaactcgatcagctaaggagaggaatgattggtggtgccagccgggaagaaattttgagtttacgtcagcaggtatgttcagtttgttttgtagaactacagaataaaactgttagccaactgttttgtgctccttgaaattgactctgtagaataccttttgtgttggtaagttgataactgcctcaaaagtacctttctttcttgtcttaagttggaggcgggtcaggtcaagatgcagtctcgtctggaggaggaagaggaggcgaaagctgctctaatgagcaggatacaacgtttgaccaagttaatacttgtttccaccaaaaacaatattcctgccttgacagatgggcatcagagtcaca

SEQ ID NO: 197830 - DNA, 650 bp, Zea Mays
cagagcgacgagctggtggagtagctccatctcgaaccaacgacgatctgcgggagatagttagccaagttaccttaggaatgcgggacgggtcctctgtccaggcccagagacagagggcgcgcgtgtcctccttcctcagcgactgaagctcgacatagtccagatcgcaggccctcgccaccacactcttggcaatgctctcgttccaagcgtgaaggggaatcccctccaggcatagccggacgtgatacctgaggtccacagggtctgcttgggtcatcggaagccaccgccgaacgcggatgtcgaggttgccgaagaggaattccctgcgctccaaagccgtctccctgtggtgctgatgggagaaggtgacaacgaagtccgctgggtgatgtcttgctacggagatgtcgtcggggcgcacgcagaactagtggcagaacgccctcttcatcctgtcggcgcttacctcaggccggtcccgccccagccaggcgacgacggcgtgggtcgagagcctctctagctctgcctccatgtcgccggtggaagcagcgacggcgaaggtttcactggggcgcgtccctggctcgcctggacgaggcatggtggcttgaacgagcggagggaagtcgtcgctgtgg

SEQ ID NO: 197831 - DNA, 504 bp, Zea Mays
ataagcattgggtatttatagaagcagaagcgagcaattagtggcgctaaaacttgccaaatatttttcatacgcgcgccgattgagttaggcaccaacagctgaaaaatgcatgcatgcatggacgtgggaatacatgcagtttttttagaaacgaggggtaattaatgtctttcttggtctttgcatttttttagtcgcgtctagtatcctgggacagagggagtattcatttcataattggttgttataatatgaattttgtgtgggcataaccttttcaacaaaaattatattttgtaggcgaaacttaaagatcttattgaaatctacccagagttgaaagagcggacaattcaggaaggtgatgcatatgctgttctttgtggactgaaagagccaaaaggatatgtccgtcttatgggtctaggcccgactcctcaagatgttggtactccaggattaaagtgttatgcaccaacaagacttcaaatggaggttatg

SEQ ID NO: 197832 - DNA, 309 bp, Zea Mays
ttgttaatctctggacctgcttctcaattttttctggtatgccatctcttaggggcattagaatatccatgtattgcttctccagtgccttcataatttctctctcaacatcagcaacagcctgaaaaagaaaagaaatataagttgactcaattgtaggagaaatatgaggtctgtttcaaagaatgcagttgtgtacatacactctctaaactcatcagatattgaggccatctattgataaccactccatactcatttatgctctcttttatttgctcatacatttgctcaacaaatggcgagact

SEQ ID NO: 197833 - DNA, 883 bp, Zea Mays
cagcgatgaggaggcgatggccacatacatacctcttgtgcagaaggaacttcctcagttcccagattagttgttcttcactccatgttccttgattgatgtccctgtatttgtctccatcaagctggtagagcatgtttttgaaaaccttgacgacatcaggattatgagacacataaacaaatgccccacagccaaattgccctttaatcttctcatacacaagattagcaagagtagtcttgcctaaccctccaaagccagcaatagacagtacaactggctgcttggatgcctccttgtcgccctccatgagccttctcacaaggtcactgctcttctcttcggcgccaacaagttctgtcgcctttctgtaaagagccgacagccgcaggttgtcgatgcttctgccaacaggcttggaaggaaccaaatcaaccttgtacctgtcacgccgttcactcacatcctttatgcggctcctgatctccttgatgtctatgccgatgctgtgttgaatcctgccccttgtcagcaggtggaggcttctatcaatgaatcccttgaaactatgtggcttgccatcgccaactcgcaccatgaatctgtcgatgctgtcctcgaggtcgtaggacagctctctcacctcccttgtccagagcttgacttggatgtcaggtgggtggtcgatgggtgcctcggagaccttgatgagagcagcctccatgctcttgagctcagcctccaggaacatgatctcacccctcaccttcttctgcaggttatactcctccttgatcaggttggccagcttgggcaagagagtgcccatcgccccggtgactatctccgccatggttgctcagtcagagctcttaccgac

SEQ ID NO: 197834 - DNA, 449 bp, Zea Mays
gcgagggagtgttctgaactgatgaattctattgggttgaataacgaagtgcaatcaaaagagcggatactttctgtattcatgaactctgttcagttgccttcacaaaagaaggatggtgatagtactcatttatcgcattcaggaagtcctcagcagggtgagatcaaaactccagccaagggcgatgtacaggagacaacaggtaaggtcctctctattcttgggattgctgtgagtcagctatatggtgatattagagccaaagtgtctgaactctcaattaaagctattggaaaagctaaatttaggacagatgattctggtcttcaagctgatgctggaatgagcttgcaagtatttgaacaacatatagaaaaatgtgcattaatttctggagttgttgatgaagtgcatgaagttattgggagaaccttagcagaaacaag

SEQ ID NO: 197835 - DNA, 454 bp, Zea Mays
cgccggcatggataacatgtgtatgggcactccttgtgttgctgtcgccccggtatggggaagggcatagagtggcggctgtggtgggggtatggtaggtgacggggctggctgggagtgcatggatcgcaggagaaaatcctgcatggctgccattgaccaggacagatcgtggaccgctgtggccacagattccagcgtgagtattggcggatgtgtggtggaaactggcggcgagatggtggtggacggccctggaacagtggaaggcgatggtggcggtgggtggctggtgaatggaggatcgctggacatagctgataccaggttgataggatttctattcctaccagggatctccctcaagctgtactggtgtactgctggaggttggcgggggactgggcgagagggacgccgggacgccgtgttcacggcgtgggaaaacaggcta

SEQ ID NO: 197836 - DNA, 430 bp, Zea Mays
ttttagatgatgggggaaatttttcttcacttctctggaccaacttctgctctgccagccatgttacaaatacttgcagattttgcgtcttctgaaggttaattacatttttaattcatttccatctgattgagttggactactgaatttgcaacatgtgtttgtttctttgaagctttgcagttcaccccacggttgaaggacgtgcttttgcgtgttttacctatcctaggaagtgtgcgagatggccaacggcctgtttttgcgaatggtattgctaatgcatttcccgaatcatcagtgattctcctctaatgtttctgaaaaattttcaatatttagaaaaattgcttattacttttgctctcttctgttttgcagcattcaagtgttggtgccaggctgcatggcagtacctgggagatgcccc

SEQ ID NO: 197837 - DNA, 426 bp, Zea Mays
gcttgaagttggactgtcagactgcttgatgtctgaaattcagattaacagtgggatgacatgaacttagggcttgattttaagcaagatccagtgactttttgtgggagcacattgtagcaaagttatagatggattgtagttctacaactttgctgcagatcattgggtatgttgccatgaaaatttgtgagcaaatcgagcctaaactatggctgtcaggttgactgaatgctgcagcccatggtacagtgcccaaccggatcagatcagccgccgcagaagaatcccaccgctgacgaccttcgccgtgattcacgccaccgctgttggattcgtgctctgggcgagtggataacatcgtgcggtagaagcccctcgccgacggtgagctggaggtcactccggtgacatcaccgtggctct

SEQ ID NO: 197838 - DNA, 437 bp, Zea Mays
ccggcactggtaatcgatctagtaaccaggtcagtgagaaggaagctgctatactgtggggatcttttttctgctaccctaacatgaaaggtgtacatcaagatagtttgtcactgctgaggaagttaatcatcaactttgatcggttgcttgaagtgggagaaggtgattttacttgaagatttctttatattactatcactgcagttggtttttctaaatggcataaattcaaaggatttacatgcagggaacatgaatggtcttccaatgactacctggagaggtctacttggtgcagcattgtcatcgtaccacaaactactgttggtcaacaccagcagaaattcagaatttagttttttcttatcgcttgccaagagtcacagtacatgcccacaagtactgtctgctgtagctgaatatttggattccct

SEQ ID NO: 197839 - DNA, 634 bp, Zea Mays
cgggatccgagacggccgtgccgcttgcattgctcgatcgaggagggaaaaaaaacaaaagggaagcaggcaggtcgtcgagaggggaggatcggagaatgcagcagcagatggcggcgacggtggaggagcagatgatggtgaaggccatcagggaggagtcgtcgtgggaggtcctccccaagcgcatccaggcagcgctggtctccaaggaagaatggcaccgcaggtacgtaaatgtcagcgacagatcaaaccccgacaattagggggcgtttgtttgaactactgatagttgctgttgacatctgttaaaaatgcgaagagaattagaagcattatatgcgtccttaaaaacgcaatgattctagctacctaaaaagagcagaaggcaatggacacgatgaaaaaaatttgcaaataaccataatcaatatctctacaccatgcagttcgtgaataccaaatttgttgcagaacataattcaaagccatcatccctgttgtataatgagcagcgacctttttgattgcacagcgcctcattcatttgttgtcacacatgcatgtctggattcctctggtttacatacaaatattgccacagggttgtgaattactgtatacgtaagag

SEQ ID NO: 197840 - DNA, 330 bp, Zea Mays
acagacgtcgatgcaacctaaaccctaatcactacatggggaataccggatccgtaaaccctaaaccctaatcagtacatggggaataccggatccgtaacagcgcataggggaggagagaaatgtacctgcgaatacgacgagttcggatacgggaggagtccaaccttgcggacgaactggcggcggcgcgggcaaaatcctagcgacatcaatggtcagggaggtttgcgaaacgaggcaggcggggacgagcggatacggaacggaatggaggaatgtacctgagaagcgaatgccgcggaggggactgtggtcgaggtccccgac

SEQ ID NO: 197841 - DNA, 299 bp, Zea Mays
ccgaagatgttcatacgaggggtgtttgccaagtaaggcgaagtggggtgtgccgcaagtaagtgtcttggtgggaagaatatttaggagatatgtggcagtaccaagagcagcagcctagaaagtgggagggatgctggcttggaagagaagcgtgcggacgacattattgatggagcgaatgatgcgttcggccttgccattttggggggaagtgtaaggacaagacatgcgtaaaagaactccatgggtggagaaaaaatcgcgagcgttgaggttatcgaattcgcgaccattgt

SEQ ID NO: 197842 - DNA, 503 bp, Zea Mays
ttggcaaaatggaatccttgcatgtggaggtgtctgaatttcttcactgtactgaaaagaacattgtaactgaggatgaacctgtgagggaatgtgttcaaaggcagattatcgagatgaaggattggcttaaaatgcaaagaaatgaatatgaggtggtacattcagactttcctggcattttttaacctttcctgccatatcattaactttttatcaagagttacaatgattttatattgatttattgccccttttcttgcagatgttgcttttaccagtcatgagggaaagcaatcaccccatgcagacatcaattgatattctggagctcaaccgcttgcggcgtggtcttcttcttgatgcttacatttgggatcggaggctatgccatatagactcggttcttaatacacatggccatatttcaaaaaccaatccagataatcttgatattctcctatgcaccagactgaaggagtggaaagctgatttgctttgtg

SEQ ID NO: 197843 - DNA, 279 bp, Zea Mays
aagtcggttgcatcctggaactcgctatttggcccgtggactgaacgcatgttcaggcacaggcaatgaggtagagtgcgagcaactcgtttgggttccacggaagggcggacagcgcatcccttttagctcgtatatctggcgccgtggaactattccaatatggtggggcgcagaaataaaaaacgcggtgtcagtggaggctgaaatttacgttgccaacgatccttacaacggaagcttacagtactaccaacggttgggtaaaagatatgggaa

SEQ ID NO: 197844 - DNA, 421 bp, Zea Mays
caccggttggatacccgataaactaaagggaatcaataatctccagtaagtacctttactgcaaccattgcagtgattattatttaagtatatgggatggatacaacaatctactcatcattttacaggacaagtggaaactcgtttaacaatggccctgctccaccacctccaccatcaccattatcacctccatcgacaaatacccctcctccctctcggcagcatgctgttccaagtagcgctggtaaaaataccccatctgaaaatggtggaaaacactcgaaacttggtggtggtgcagtagcaggaatcataatatgtttgctggttgttagcgcaatagttgcattccttgtgatcaaaaggaaatcatggaggttatcacagggacaagaccctgaacaaaatgaacctctca

SEQ ID NO: 197845 - DNA, 579 bp, Zea Mays
atcaaatatgatgtcttcatttagagattctcgtgcaaatcctaaaggaaaccttcttactagccatataagtagtactgatttcactgaagacggtgcatccattcagtctccgagctcaaaaaaattattggttgggagtagtcaatctctgcgacccttagaatcccaaaagaatgagggagatggtaaatctagtgatagcattccacccataccagctcaatcaaacaagatggctgaaaagatatttgagcagcttaatataatagctccatcgccaaaacaacaacagtctgttactctgaatgctagtaactctatgtcaaagaaacctgtttttcaagatgctgggtcaagcagtatgtataaccaatctagttccctgaagtttcaagatttggatggtgcaaatggaccccatgatacaaacttgaatggttccctgctgaagaaagacaagctaaatataataaaagacggatcgccaaaagctgccttttctgatagacctgcccttttggggaactcggtttctgcttctaaatcatggacgccagcctttaaaatggctgtgat

SEQ ID NO: 197846 - DNA, 495 bp, Zea Mays
ggaggggataggatcgcgtcgtggatatttttgggttgccgtggcctcgcggtattccgaccacgtgcatcgacaacgtggtcgtgcggccgtcgccggagtttgcatcctccgccgcgattgtgccacgcttccggtcagtgaccacgtcgccgtgaactatgatcattacccagtgactgtcgtggcttctcatcccgtgaactgccacgaatcaccatgccggtgactcacttcttctccggccgccaccgcgccatcctcaattcaagtgccaccgacgaagctgcctataaattgagctcgtgactagcttcgcaatatcattgtgcaccccccacaccaagtattgctcctagccgattccctacgagctctaattttgcattcgccccaattcggttcaagcacacccgaaacccaacctcatcgtggccagcgctcctccggtcagtaatgatcaaattactctttgttttagttagtatgtgatct

SEQ ID NO: 197847 - DNA, 813 bp, Zea Mays
cgagtcggttaaggacgaggcggtgcacgggacgcttgccagcccggccttcaatggggagatggccaagcagtacccgttcaagcttgaccccttccagagcgtatccatcgcttgcctggagcggaacgagtccgtgcttgtctccgcgcacacttccgcggggaagaccgtcgttgcggagtacgccattgccatggcgttcagggacaagcagagggtcatctacacctccccgctcaaggccctgagcaaccagaagtacagggagctcagtcaggagttcacagatgtcgggctgatgactggcgacgtcacgctccatccgaacgccacatgcctggtcatgacgacagagatcctcagggcgatgctctacaggggctccgaggtgatcaaggaggttgcctgggttatattcgatgagatacattacatgaaggatcgtgagagaggggtcgtgtgggaggagagcatcattttcttgccccctgccatcaagatggttttcctttcggctaccatgtcgaatgcgaccgaatttgctgaatggatatgcagcctgcacaagcagccctgtcatgttgtgtatacggacttcaggcccacaccattgcagcactatatgtttccaataggtggttctggtctttaccttgtagtagatgaaaatggccagtttagagaagataactttgcgaagctacaagactcctttgctaagccaaataatcaactggatggaaggaaaggtggtggacctaaagcgagtggccgaattgcaaaaggtggaagcgcctctgggaattctga

SEQ ID NO: 197848 - DNA, 298 bp, Zea Mays
gttggcgcaattgctttcagatcgccggtcaaggaagtcgggaatcttgttctccatggtggtggagggtgaggctgccttgcgtgtgcgggacatccgagtggtgtgtgactttgccgacgtgtttccagcagagcttccaggcattcctccggagcgcgatgcagcttttgaaatcaagctgattctgggtacgcagcctattcataaggccccatatcggatggctccaaaggagcaggttgaattgaagcggcaattggatgatctgctggctaagggtttcattaggcctagc

SEQ ID NO: 197849 - DNA, 296 bp, Zea Mays
caagagtaggacccaggccttctctaagcctagaattgatactagcagacctgcctacaagtgcacgaacacatcgtggagagccagcagccaaagcaaatactataggtgggtcttcatccttatctaatatatctacattctcttggtaagccacaatagcttccacaagctctgccgagcctcggcgacatgctaaatgtagggcagtgagtccatctgtattttgtgcttctaagagagaacggatgaaaccaccatttctctctgatgcaaccttcgcaagtagatccctg

SEQ ID NO: 197850 - DNA, 619 bp, Zea Mays
gcctagtcatagatgaatctagcttatcaggcgagagcgaaccagttgatgtttctgaagaaaagcctttcgttcatgctggaagtaaggtggtagatgggactgccaagatgcttgtgactgctgttggtatgcgtactgaatggggcaaagtcatggatactctgagtgctgatggagtggatgaaacccctttacaagttaagctcaatggtgtggccacgatcattggacagatcgggctggcgtttgctatcctcacatttctagtgctcctagtgaggttcctggtggacaaaggaatgcatgttgggttgtcaaattggtcagcaaatgatgcgctgacaatagtgaactactttgctattgcagtgacaatcatcgttgtcgcagtgcccgagggtctaccactggctgtgactcttagcctcgcgtttgccatgcagaagttgatgaatgacaaagcgctagtgagacatctcgctgcgtgtgagaccatgggttcagcaagttgtatttgcactgataagactggaactttgacgactaaccacatgatcgttgacaaggtttggatgggcgatgtatccaagtctgtcaacagtgatacaaatatgaa

SEQ ID NO: 197851 - DNA, 1008 bp, Zea Mays
caagtcggcggcggggcgaaagtccgaagcgcccgccgcctcaggtgtccgtccccttttccccgttaagtccgagaggctggcttcgtcgaccagttcggactcggacgcgctgcccctgcttgttgaggaggctgccacctccggtgctcgcaaacgcattggcgtcatttcttctggaagctactccggagagcttgggattttctctaaccagacaagcgagatggactccgacctgctgtctgagtctcagtcggggcacaagtcactggcctcgcgctcgcagcatggccgtgggcgtcatcgtagcctgacacagaagttcgcaccaaagacgttcaaagacgttgttggccagagcttggtggtgcaggcgctgtccaacgccatcctgaggaggaagattgggttggtgtatgtattctatggtccgcacggcacgggcaagacttcgtgcgcccgtgtctttgccaaggcgctcaattgcctctcctctgagcaccccaggccctgtgactcatgcacgtcgtgcattgctcacaatctcggcaagagcaggagcctgatggagattgggccggttggcaacatcgacatggagggcattgtggacgtcctcgataatgtgatgctttcacctgcaccatcacactacagggtgtttatatttgatgactgtgatactctgccagctgacacttggagtgctatctcaaaagttgtggaccgggcaccccgtcgagttgtgtttatccttgtcagtccaaaccttgaacttcctcacatcatcctgtcgagatgccagaagttctttttcccaaagctgagggagtccgacattgtcaatacattgcagtggatttgcaccagcgagagtctagatgttgataaagatgcaatgaagctaattgcatctcgttccgatggatctttgagggatgccgagatgactcttgatcaactcagtttgcttggacaaaggatttccttgtctcttgtccaaga

SEQ ID NO: 197852 - DNA, 921 bp, Zea Mays
gataaagttgatccttcaagtgtcactaatggtagtgcacttagttatttccatgctctatgccgtcaacctgttcctggccctctggttggtggaagtgctgcatcaaaggatgtaaataagtggcttgatgaaatgattgcacggtacgagtcttcctctagtgaattccatagaggtgatactcgcaagttgcttatttcattgctgaagatactgtctcagcactatggaaaactgcgttcaccttttgcgtctgacccatcgcaagaggtacttcctctcatactctattattaactgaattgtgcatttacatatcttctctgttttctctggtccgctttcctttagctatccttatttattttgacaacttgcattagaaacattgcgtcatggcgatttgtttcgagttggatggtgtaaaccaaaacacaagttggataagctactgaacttaagatttatatatactcagtacaacctagagtttgtttacgagcaatatttcaaccatgtaatgatacaaatacctgtgattagcattgtcacgtgggaactttgcttggttttgtattttcatgtttcattactaggggaattcaactactttttaaattctgtagtttgtaaaccatgcctaattttataatttgtacatcttttacatgaattcttaattcttaataataggagacagatggtccagaaatggcagtaactaagctattttcatcgtgtaagagaagcactgttcatatgggagattatggatccctagttccctgcatgaaaagtattccttcagaaagtcagatgcaggtaagttttatttataatatccctgactcttatttttgccaaatgtttcttattgagacaacaactattcttttaggctgttgcacaagaggtcca

SEQ ID NO: 197853 - DNA, 392 bp, Zea Mays
aaatgatgcatcgacaccaatgtgtttagtaagttcatgcttcactggatatgagaaatctgtatagcactcaggttgtcacataatagaggtgtatgagtgtcacaagaaacaccaagatcagccaatagccaacgcagtcaaataatttcagcagtggtagtagcaagagcccgaagttcagcttcagcactagaacgagatatggccgtttgcttcttggatttccaggcaataggagaggatccaagaagaatacagtaacatgtagtagaacaacggtcaatagggtcacttgcccaagtggcatcagaatacgcatgtagctgaagtggactatcagaagcatagagtaaacatatggatcgtgtcccgcgtaagtatcgaagcac

SEQ ID NO: 197854 - DNA, 302 bp, Zea Mays
atttactatatagtgtatatgacgttccttcaattcctgctacgcaaacctactacgacatgtgacgttcttcgatggccgatcaatcaggagcgcagaaattctctcgcgacacttgacctcgccaaaccccgtccatccacttacactactatgtctacgactacaggcgacgaatgcgagagggatcggctggtactatcgccgacggcgggcgcgtcctacactgatacacgtgaagtcgccaaatcaccttcgtgtcctacaacactaactttcttcggagttttgaagatgtcgac

SEQ ID NO: 197855 - DNA, 478 bp, Zea Mays
ctacgaggaggtgctcaacttctacaagcgctatgccctgcgcacgggcttcggcgtctgcgtcaagaagtcctccttcaccaaggccggcctctgccgccgcctcgtcctcgtctgcaacaagtggggcaacggcaaggaggacgcctgctaccaggccaggcccacggccaagaccaactgccaggccaccgtcgtcgccagactcctgggggacgacttgctgcacctcacggatgtgaacctggagcacaaccacgcgctcaacccatccgccgcacgcttcctcaggtgctacaagacgctgcctagcgggttgagcaaagatctcgtggtgagggctgccagaggggaatgctcggtggcgggtgacatcgatgtcccgatatttgatgaatgggggcggcttaagaccgggcaagctgatgtcctggccatcaacgctttcttcacccagatgcaggcaaagcttccaaac

SEQ ID NO: 197856 - DNA, 358 bp, Zea Mays
aaaccagtcgccgacctccctccatccttccctctcaggcacgcagctcgcgtggcattgcgttgcgcggcctgcttctctccggtctccaccgcgccgcgatcgacagcccggccagcgagctcctctcctccgccttctcctcttctaccgctcccgatcacgcggccgcgacatggaggacgacgaggggaagaagcagcaccaacggatcatccccaacgccaacggccacgtcatgatcgtggtccccgacgacgcgcacgcgcacgcgctgcccgcctccgcctccgctcctcctcgtgacgccgacggcccagacgaggagagcggggacgaggaggagcggacgccggcg

SEQ ID NO: 197857 - DNA, 799 bp, Zea Mays
ccacggacggcgtcctctacccgcccggtcactcctgcgccggctgcgctagctcctcagctgccccagtccctcctcacgggcatccagggcccctggccagggacacagcagcaaacatgggcgcaccctcaacctcaaccgtggtccgcgccaccaccgagtttccctcagcaggttgttcccatgccatcatgggaccagcaatcgctcgtctccaacttcaacaccatgacgctccagccccctcaacaaaatgagtggtacttcgactccggggcaaccacccacatgtcctctgatgccggtactctctcccattccactcctttacaacacccttttccctcctctattattgtcggtaacgggaattctattccagttacatccacgggtgctgctgttcttacagattctcttcgccttaataatgtccttgtttccccaagtcttattaagaacctcatttctgttcgacagtttacctctgacaataattgttctgtggaatttgatcctcttggttgctctgtgaaggaccttcactctcggagagagatcgtccgatgtgacagctccggtccactctaccctctgcggtttccggcatctaccttccttgcctccaccacttcgtcgctctggcatcaacgcctcgggcaccccggtcgtgaagttttgtccaaattagctcactcagggatttcatgtaataaacctgctagtgatactttatgccatgcttgtcagttgggtcgccacacacgtcttccctttcatgtgtcttcatctcgtg

SEQ ID NO: 197858 - DNA, 785 bp, Zea Mays
ctgatatatctgatgaagacgaaggtgacgacgatgaactgaaagaaagcataaatggttcagaggatgaagctttagaccagaatgaagacagcgaagaggaagacaagtcaaaaggcagtggctctaaagcgcagaagaggaagttaaatgattatattggacagctaagttctgctgatgcaagccttcgagttctgaagaggttagcaactgccaagaaggctgaagttccatctgatgaaactggtaaaattctatccgatgaagatttcaaacgcatcaaagaactcaaggtatgtggattttggatggcttatagatctacagtaaattttttttaaagctaattttggcaaaataaatttgctcatattctgatcttagatggatcattgatgtcctaaccgaatatatttgtgtttcaggcaaagaaagaggcgaagctggctttggctcagcatggactaatcaagggtggcgacacaaggtctgtaacctttaagatgccatcatctgaccagctcagcaggaagcgtgtcgatccacttgagcttgaggtgctctccttgtacctttgtcgcgcactcacgcactcacacagtgacacacatgcaatgcacacgcttgacactgaataaatttcgtgaggcaggctcacgtcaggagaaagatgtccaaggaagaaaggttagcgatggtgaaagctggaagagaggatagaggtccttacatggcaagggcggccgtgaaacagaaaaaggtaagcttcctggctgttggcg

SEQ ID NO: 197859 - DNA, 291 bp, Zea Mays
caggtcataagtatgtatatggaaggtttcacttctgtaatgctagagtcgatggaaaatcggctaaaccataagtgaataatgatgcatacacacacaaaattgtgtcaggttgtgggcggtgtgagccctgaggcctgacagtttggagtccagcagagagggttgcagtccacagacaatcacatagatggtttggcccttgaggccgaatagtccaaagtccagtagagaggattgcagcgtgtaacccctctcgcagacagtccgaccctcaaggctggacattcc

SEQ ID NO: 197860 - DNA, 395 bp, Zea Mays
atttaggagaaaagtcacatattgcaaatgagcaccctggtagactgatgagaacacaagcacacatggagagaaatatgtataatcatgttgaaccaccatcgcctaataaaccttaaaccctttaagtttcatacctgcaagagaggaagtggtgctggtgccagcgttggattacttgagggggagttcattgccaggcagattaaagaatagccagtccaacaccgattcaaacgtcattgaatcctaccacaataaaatacaagacacacaaaaggacatgagaacacaagctggaccgaaaagatttctacacaaacaaggacggcgattcctgatccacagtgtacaaaatacagagttcttgttcagatgaacaagcaaaagctggc

SEQ ID NO: 197861 - DNA, 1076 bp, Zea Mays
ttgatttattgggggatacaaccgacagaaacagagcttttgaaattctcttctagtccaagcaatagagcttctgctgatgacctggattggctctccggcatgtatggttctaagaaaaggaaccttccagcagaacgagatatgaagtcatcatcttctaaaataaaatcctccaaagcaccagaccttaaagggtcaacttctactgaaaattatgacgacaatgatgaattcaaccttcatgatcttgtactctatgggtgagtgtgttccatggttttttttatcattgtccactaactacggatttcatccttatattttatttcctaacgagcaggcgaaaagattttggtgtgatcattgctgttgagaaagatggttttagggtaattaataatcttataatgcacaattcaattttatattcttaattttctctaagaatgggttctgtgtagatactaaagggtggtcccgaaggatctgcggtgacagtgaggaagcaggatattaagaaaggctgtgtagacaaaatgtttacagctgttgatcatcataaaaagacgatatccattaatgacactgttaatgttgtggaagggccatttcaggtgaaaattgaactattaatctgacatggatctgcttttggcctctcattttgtaagcaatatgggaatttatgtgtcttttttacttttatttcaaggaaaccttcattttttatcttttaaaaaacctggtgtggattctttcactgagtattgccaatgatagttttaacattatgcgtgtattagtagtgctacattgttcttatctgttattgcaataacaggtagcacacttttgaattccagcatatgtgtttttggagtattcaagaatactgtttattccatttagcacacttgtagtttgattaaatatatttgcagggtaagcaagggctcgttaaacacttgtacttgggaatactgtttatttttaatgaaagtgaaagtgagaactgtgggtttttctgtgctcaaagtgggtcatgcgaaaagatacggaagggtctgggaagc

SEQ ID NO: 197862 - DNA, 618 bp, Zea Mays
ttcatataccaagaaagaagcaaaattagatcaaccaagcatgttattaagttatcaatcctctagcaataatcaggtccatcaaataggtcagcgattagttgtatagttgtccgacatcaactaatcacactgcattccaccaggcattcccatgaggcctcaagcacatccgcctggaggttgtgcccgtctgctactctgttgtgtgctgccgccgtccgaagatgagctcctcctctgaaggttagtgttttgccgcatcctcttactatcttgtctttcaatcctccatcttattgctgtgtttctagttcattactagaatctttatggcctgctattgctgctctattttttgtttccttctactcttgctggttgctgctgccttttgttcttgctgctctaggcctttacctcaagtcctatatgctgctggtgcttacataagcctgtatcctatagatgtggatcaagatcaacggcgtgcagctatggtagaagtgataatgcctcctgtgatcgaagcagatgtcacaagttcatcagctactgccactgcttcctctgctgctccagatttcacatctaaatccttagcacttagcagaaaag

SEQ ID NO: 197863 - DNA, 584 bp, Zea Mays
tggagataaaggcactggagcctatgattcagccgcatacagtagcaaaaacacagtgaggaagcaacgggcggaacatgtagtgaaggatgagagtttccatgaccagagttcaggtgttaatgatccaagcgagatgccaagtaactcaagaaatttttttggaggaacagaaacatcccatgttgatagtgagaatatatcgacagccccatatcaacagttccatgcctacaatccagacagccatccatatgtttatgaaatgccaactgaaccacctcgtgctcattcacctgacccacgttttgatgatttatatgagagggaaagtgacattggaagatctgaagttgatccgtttgattttcctagagaaaacttccaagatactgcatctgttgggcacaatttcaaggatgtggaaatcaggacacctagctacgatcaagaaagcacagatgactactatggtaattttaattcttcacatgatacattggcccatggcagcagcaccactgcttgggataagcaaaacgacaaagctcaagacaactcttcacctgttgtttttgatcaat

SEQ ID NO: 197864 - DNA, 397 bp, Zea Mays
cgccaattcgcgacgcacacaagctggggcggcaggaggaggagggatagcgtacctgcccacgaggatgcccagattgccgctccgacgacgaggaagtagaaggcgtacttgacgacgaggcggaccatggtgtccgggtcgtcggcgtgggagccgaaggagtcgacgaggtcggcgaagaagcggaggaagacggggagcgagcagccgtggacgagcgcgccgagggtgccgatgagcatgagcgcgcagtcgaggccgtcggcgaagcggaagaggtcgcgcagggcggcgggcggggtgggcttcttgctgtcattggcgccggcggaggctggcctggcattgggcggctgctcggtctccagagaagccggcggagggggaggcgaag

SEQ ID NO: 197865 - DNA, 550 bp, Zea Mays
gtcaaatgagagaaatgtccctacacttgttaaactcgaccatgttttctgtacagccagctgggaggagatccatccggattgtattctccatagcaactcttcggagctccctgaccattgtcccttagctctgcatcttaatgaggatgtcaaggggaagcgaatattccattttgagagtttttggaccaaaattccagattttttggagacgatggctacctcttggtagcagccagtgatgttttcttgtcccttggaaagaatggctctaaagttgaaaaggcttgcaaaggctttgcagtcgtggagtcataaaaggatcggaaatgttaaatcagcttggccagggaaattttgcacagacttgagattgctcaagacaatagactgttgtgtggggtcgagatatggctgaaaggaaggcttaagcatcactgcctggggcttgcttctctggaaaggacaattgctagacttagatcgcggatcaaatatctgaaagagggagatgccaacacttccttttttcatctacaggcttgct

SEQ ID NO: 197866 - DNA, 601 bp, Zea Mays
ttgcaaccaagacagttcaacagaaggaatcagatggaagcgggacagtgagcttgttcgacgttgaatattacggccaccacatttgcaagaaggatgtcgtcaaccatccgtgtgttgttgacacagcacactattacagtgtgccgattgccaatcagaaccaaagcagtagcagcccaacgtttgttcacaatgatgtctatggaatccaggatgaaagctttgaaaacctgttcatggtgccgagcataccagagtatctgacagatttcacagacattgaaatggcgggggcacttgaggttacctccgagatgatctctgaaaatatatgggcgtacgagatgatctctgaaaatatatgtagacagccattgattgcaccgtgaggtgtgacaagaaagagacacgagtatgttatgtgtgtactgtagagagtataatatgtgagacaagaaaagaaaatggacgtgcagagagacagaaattatgtctcaaaagttgtaaatgctgtcccgcatggtagaatgttggtgtgccaatgtctagactttcactttgagttgcaattgtaaccatctcacttccagcagcctct

SEQ ID NO: 197867 - DNA, 733 bp, Zea Mays
gatcagcttttgtagcagcgatgtgatcgatgaaagctcatacaaggactaccttgtgccaccatcttaacttttgttgccaccatgttcacacaactctaaggttggtgaatctagcaccataccaccatttgtcccaccatcatctaatgaaaggatatctgaccttttagtgtagatgaatgtaggtcaatagaagatggtagtggagggcaaagcagtaaaggcttctagtatagtaggaacactatgatgaagaggtcaaggtagagcagagacattaggccaacctctaagaacactagattaagaggacgtttaacatgtttgagtagatttcaccttgataagactagatctagcaatagatagggccttcaattttacatatttctagcatatccttcaacatacatgagttctttccttagtaccaccagtctagattgcagtccttgcccctctttagaaatactaggctagatatatagtttgaaggactttagtttagggcctttatcattaagtgtcctgccccacccatgatggtagttttcactccaccaagacagggagtggcactagaggccatgggtgtatctcaacaactcaccaattcaccaagatagggagtggcactagaggccatgggtgtatctcaacaactcaccattaagtgtcctgccccaccctatgatgctctaactccttagggcgcttaagccacatgagt

SEQ ID NO: 197868 - DNA, 970 bp, Zea Mays
gttgaggtggagtagcaggcactgaagtcggtggacgatgtgttggcggccgtgaccctggccacatgtagatggatcctgtccagggattgtagtagttgtggccacctgggggagtggaagtgtggctggaaccaccgcggttgccaccggaggaccgaccaccgcgcttgccccgcttgccacggtgctgaaaggaaccgccgccactgccacgcccaccagtctgctgctggtgattgggtgaaggtgggcgcggctgggacgactgggatccagtggagctgccggtgttggacagggcagcgagggcagcggccggagcagcttttgccatcgtgagttcctcaagagccaggtcgtcgcggacctgcagaaaactaggaaggggattggtgcggcgcaaatggagaccaagagcctggaagcgctcgttaaggcctctgacaatgttgaggactaaagtccgatcagaaacaggttcgccgagatcacgcagatcttcggcgagtttcttgtagcggcgacaatattcggcgaccgggagatcgccttgggagaaggagcggaattcttggtcggcataaagagcacgtgtggtgcggtttcccaggaactgggactctatagagagccagagggtgcgggcagaggcgctgcgctgagagatgatgtcagcgagggcatcggaaagggtgccaagaagccaagtgcggacgacggcattcatgcgaatccaatcaggtgactcgggaaaaacagaatcagagaggacgtggcattccagggaaaatttggtgagggtgagaaggaaagattcggaccagcgggcgtaaaagttggagttggtgtcaaggagtagagggacaagagcccggatgttggttactgcaacagcctgggcgtgaaggtttagcagcgtggctgcctcgtggtggagaagagcagcatgcagagttgcaggtgggat

SEQ ID NO: 197869 - DNA, 316 bp, Zea Mays
gatctctatatcctcatcggtatcctcatctgatattttttttggaaaaaatgagtaagacatatgtatttatataagcattggtatcataaaaagattgaaattagtacattgcccagcgaataggtatccctcgttctcatcagcatcgtcttcaaatacgacaccgtcatcatcatcaactggagggcgaaaatacaagccacataaaatacctgggcattcaggataaaagggtggggaaaatatgtaacctgaataaagattcttaacaattaccattggaaatgacccttggctttgactgggtatgatc

SEQ ID NO: 197870 - DNA, 426 bp, Zea Mays
caagtatccatcaccaccatcgccttctcatggtgaggcacaaccaccacgtggccacaggaaacttccaccaccatctagatcgatgtattcaaccatagcaccctcaccggcaaattacaatgttgtctcaccatctgagcaaggtcccaagatcaaagatcatggcgccccggggaatgcacctatgtcgtcgggtcaagaaggagcatcgccgccatggtatttttgatgcgaagatcaagataaatgcttgccaattgcagttctactctccacaagagatcaaaagcccaaaagctactttagagggagttccttttttcttatcacacttatcacgtcgaagcataatattattgaataatttatgtaatccatttggaccaagcatgttgtcaatgaaatcttatgtcaaaatgtttc

SEQ ID NO: 197871 - DNA, 274 bp, Zea Mays
ctgaattttgcaacaaacatagataacaaaaccgagctctgctgctgctcacttgaaccaacttgattctagttagtctatggaacataagtcacagactcagacactaaaattttgttcgtgtaggtcgtttctcacggtgaacaagtattccccagtgtgaaaaaatgtgcaagcaagaactgtttcgcaaccggagacatagcagtcgttgaaggtctgataggtcacctccgaaggctcaaagaaaacctagggttcattacaaatagag

SEQ ID NO: 197872 - DNA, 526 bp, Zea Mays
aggggatgtattgggtgtcccaactcattttcaaaatgatggatcagccctatatttgctgacacatgcactttcgccaccatctgcaggagctgtgggccattggctaacccaacaatctagttccagtattttctcgggtattcaatatttcctgcacaatttagttgccatactattgtacaagaagtttcttgtacagattaattttcatttgtgtctgtatatgttttaggttacaccaactatgatggagtcgcagctgataaggaagaggcacacagttctactttatcacggaattctcctaccagatttaccaaggagaattctgcaaataaaatgcatggagatgtgatgggatcggctctatcttacaaagaaagtaaacatttggacgaatggcatgatttttcccagatatcagctggaaatgagaaggataggctcacacctctaagtcaaattggatttcgtgaccctgctagtataggtggcgggcaacaactgactatacttagcgtgg

SEQ ID NO: 197873 - DNA, 353 bp, Zea Mays
gtggccgccagtgctagcaggaggcgcacagactccatgcgcgccaccagagcaaagacctcctcgaagtcgactcctttctacacgtagcctttcgtcaccagcaagcaaagcaccatgcgaagaagccattgggccccataacccctgcaacaccgagcggaaaccaatatttccttctgttggttgacgattatagtcgatacatgtggattgctctccttccctcaaaggacagagcagcgactgcaactaagaggatacaggcagctgcagaaagaaagagtggtgaaaaactaggagctttgcacactgacagaggaggggaattcacagctggagaattcactgat

SEQ ID NO: 197874 - DNA, 286 bp, Zea Mays
ccgcgcatggcccagcaaagacatcaagtgcggaggtcacgggtcagtcagccgcggggacaggcgtggcagtcggcatgaccatgggcggaccggcggtaattgcatcaacgggcgtgcagggacagcgagccaatcgacaatcagactttggccccacctgcagtctcgtatcctcccctgaggcgggcccgggggccactgtcggtaccctgaatcaggggtaccctctactacagtatgaagacccggtgcccatacgacgttccctagccgaacggtgaac

SEQ ID NO: 197875 - DNA, 327 bp, Zea Mays
gcggatccccatgattcccctaggcgagacaaaacatcgtggtcgttgtggtactcctcgacaagctccccacggcagagactcagggcaaacggaggacgcaccgcgaaatttggggtcttcttgacattgtcatgcaattgcaagccaagagttccatgtcacggcaccgggagcctggggacggccagaatatcgtgttcgtgccatcggaaaaccacgattcgtcatggcagatactcgattacgagggggaaggcacgacacaggtatcgtcttgtcggtgcccatggacgggcagaaacgcatggagtgtacctgaccttg

SEQ ID NO: 197876 - DNA, 530 bp, Zea Mays
gtttgtcctggcttacagtctgagctagcagagagagacgctaggatagctttgcttgagaaggctagctcagcgagtgcccctgcacctgcgcagtgtgcactttgtgagggtttgcaatctgcccatgagtcctgcagacacgacaagacaagaatcaaggaagaaaacacataccttcgatctatcttgagttgggtgtcgtgtagtgaaccccagttgggcatgatggtcagtcagttcaagaggggaactggcggaccggggttaggctttgctactaagaatgggagtgtcgcttgctttgggaaggttggtgagtgcagtggtttgacaccttcagagaaaccttcacccactcccaagcttatcaaaaccacctctgttaagcctgtcacccctgtgagagatggtgtgattgatgaacctatgagagatcctcctcagaaacaagtgtggcttccaaaacctaaccatcttaggaacacacttgacacctttcccgacatctctagtgatccccttcctag

SEQ ID NO: 197877 - DNA, 356 bp, Zea Mays
gataccactcttctgaaaattagttttaaggcctgaggcttcaccaaacatggacaaaatctccttagctagagacaaatctgctaccaatggcttaatgaaaagggcgacattgtcggcgtacaaagatactcgttgaccaagaggttttctagacaaaggttcaagtaagcccaactcttctgctttgagaaacaggctgttaagcatgtccatgaccaagatgaaaagcatgggggacagcgggtcaccttgcctaaggcctctcttgtgcctgatttcaggaccgggctgcccattaacaagaatacaagtggatgatgatccaaataggttaaggacaaggattctccagc

SEQ ID NO: 197878 - DNA, 611 bp, Zea Mays
ttaaacttagagataattggaggcgactacatattagcacgaaacactgataccaaaaataaaagttacagataacttgcgagggctgcaatgactctttagtttagttaatgacagcatatcattattatcactcacatgacttggatacattcagaaaaatcgtggcaataatttgttacgtttactccttgatcacacggccttgacagaaaagaaaagctgatcagaaaggacagaaaagaaaagctgatcagaaccaaagtgtagtaatcaaccacagattcccgtagcaagatgtccgcagtggcacttgccaacaagatcggacgacgattagtgatgctgcgggttgggaccaccggggctgagcctcttcgacccgtcgtacggtatccccggcgcctcctccgaccaggcagaggctgaggcagaggtcgtgttcccttcagggcccttggcaatgacaacttcgtctcgcagccagcgtcgccccatcgcagggcggctatcagagagcgggaccggcgacgaggcgatgacgagaacgacacagatgcagaagcacaggacgagcttcatggctgatgagaagtgtgctgctaatagtg

SEQ ID NO: 197879 - DNA, 329 bp, Zea Mays
agccaatcaaacaaatagggaaacaattcgatcatcacatatctcctcaccataaaaacaaaccatttaactttatataaaaagcaggatcatagttacaaatcagaaatgtcaactgtgaaatgatggcacaaccacaagttgaccgagtacaatatttagaattatttttgttagaaaaaattagttgttgaagtctgaaaatggaagctgtgaagtccaagctctaatctctaagactcctttcgaagcctggcatggaaagaaacctagtgtcagtcatttgagaatttttggtcctgtgtttggtgtaattgattaaagagcta

SEQ ID NO: 197880 - DNA, 499 bp, Zea Mays
acagctcctgatgcggtgggcgggaagtccgtgatcacaccgtcgacagagaagtctggattgtcgatgaactgcaagtactcggcagtgggatcgtagctgtagttgtagctcaagatgatatcgttggcaaacccggaggcgtacacttccaggccgagggcatgagcatccttgaccaagctggtggatggcgccaagtactggtcctttttcagtggccagatgtacgtcttgggcacaaggacgccagctgcaaactccttgatggacttcagatctttcaggagctccccgtacgttttcttggtcgaaggctcctcgacgtcttcgttgaggaaccggaagatgagctttgtcttggcgttcctgagcttcccactcaagcttttcaggaacccaatctccggcgaggagatgtacgtgaggctaaaatcttttggtagctctagtatgtagtcctcgctgcttaacttgtgctccataaagaatgaattgt

SEQ ID NO: 197881 - DNA, 928 bp, Zea Mays
ccaaattaggatggctgaagttcaacaatgccataactcaagtaagaatttctgactcttcaattacacattgtttgatgtaagtttgctctcatgaactctgttctataccccttttttagcttgttactttctgtgagctcaaatatcttagggaatgcatactattgttgcattataaagaaagtccactgtttcacattctttgccaatttaattgatggcttttagaaagcattcgtcatacctaacctagagatggatgtttcatcttcatttctagtttggttgatcaagtatcgcagtactgtagtagtatagtatggagggagtttatctaattcccattgccttgcaagtttagacagcacgtctgaagttgactgtacactgagacctgtattgtagtctcacagtttttccatattctaagatattttattttgaggcacaatattactttatgtttttctaccagatctttaactttgaatgcattttatgctgaaatttgttggcatttctgcagttgaacgcatattatcttcatcaagtgccagtgaaaatggtgaagtggttggtccggaagacattactgtcaggagtagttctgaactggtgaacaagacttgcttgactgaccatgccctgcaggaaaatggacatacaagtggtgatatttttgtgccatctcaggcagcctccacagagcttagcacaatatctatgcaggatatcagtgcactcagtgaagttgaaattatgcaaaccgaagatgctagtgcaaaggacatgactgcagtatgtagcattgattgtattgaaatgaaacaggctatcaacactacagcaaatgatacatatgcagctattgttgaagaaaagaagttgattgaaggcaccactgcaaggatgaatggggtgcgag

SEQ ID NO: 197882 - DNA, 368 bp, Zea Mays
attcttttggatgacacactttcaattgaggttgacaagaacttgctcaatgcagtgaaagattcaattgttcaagggtagggctctgcactcttcagttagtttagtccatttggaatcctttacattgccttttttaaccagattatttattaacctatacataggttccagtggggtgctagagaaggtcctttgtgtgatgaaccaattaggaatgtaaaattcaagatcttaaatgcaaacatagctccagaaccattgcaccgtggtggtggtcagataattcccacagcacgtcgtgttgtctactctgcattccttatggctactcctcgccttatggaacctgtgtattatgttgaggt

SEQ ID NO: 197883 - DNA, 411 bp, Zea Mays
cggggctgttgttcaaagaattggagatggacaggaagaattgtcctccatcgccatcgccaagatcgaccgagaagtctggaagagaattgagatctggggaggccaatgtcagcacaaataccaatagcaacctcatcgcaaaaggtgacaaggagaaaggagtcaatgtgcaagtcattctaagatgcaggtggagagggctcagtagttaaagcttaaaagttctgtctaattttgtttttgttatcacaatgtgtgatttgatacattcaggccgttgagtgatgaagaaacaaagtcgaatactcctgtggttatttcgtgcaatgaccgtcgccgggaagttgccgccactcaaattattgccaataagcagattgatcgcacatttgccttcgacaaggtatt

SEQ ID NO: 197884 - DNA, 436 bp, Zea Mays
taagtgaggcatctcttctcaagcgtgtgcaagcctggctcgacgatgtggaggtccataacacgatgtaatcttccaggatcgaaacaccaagcactgacccgaaaggatgagtaatctttcttttgcaaagtatcaggatgcacttccgatatccagcatgagtctctcaagatgtttgctgccgtagaacgaaaccaagcgtgctctggaatccctctaatctcaacctccaccataccagacatgatcgtcgaagatgcatgagtaaacctcgaccagcgcttgaacttcaaactgaaatgagcccccctatatgccttgccatcattaagcacccttgaggcattttcttcatcaggtagaatcaagaggaaatcctctggcaggacttgatgaatccacatggcttcaatattgacatcaaaattatgag

SEQ ID NO: 197885 - DNA, 898 bp, Zea Mays
gtggcatttagcccaaatgacagttttgccagtgtttcaagtgatcacacaataaaggtttgagcctctctcccttgttttgattcttatattgaattaacacaacattcaaaatataccaagatggttttcatcgtaacaaggtggtttttaatggggaacctccttccttagcaaggctgcagagaagcttcttggatgaattagtgtgttgggttatggttggtgccaaaatgtagtccccccccccccctctgtttatgcttctatttagcaggtttcgctgctttgtaagcctttttactctttataagatgcacagttctcctgcaagttcgataaagaaaatataccaagataagtgtaattaatttcctttgaaacaatgactgtgcgatagtgtgattaataagctatgctttgatgtacatcagctttggtgcctgaaatctcccacatcagagtgtactctgcacggccattcggacaaagtgaattgcttggatttcgtcacacatgatggtcagcaatatttgattagtggatctcaagactgtactgccaaggtatcgatgttgtctgtgtgtatagacacattatagttccgcgcataacaattgctactgatccatgctatatttttgtcaaatgaggcatgggccttgaaggaaaaggaatgcgtccagacaatggatgttttcatgtcgccagttgtttctgtcatttcccttccggacactccatatataactacaggttcagcagatggcactattcatttgtggagttctgctaatttcaggtgactaaaaccatagtatgaaattctgtgagatactagcaaactattttaaatatacatcagtgcctattttatgtatatataacttatttctca

SEQ ID NO: 197886 - DNA, 319 bp, Zea Mays
atcaggtggaagacctatctgccttggggatcttgggtgatggtcatctcattcagactgcacgcctcaacaacaactgctgattccacagatttagatactctgaggttgaagtaagccggatgctttggctcaggtagaaccacactctcactatttagcgcagcaactacgtcggacatggtgggccgatcgtccgcattttcttggacgcacattagtgcgatgttaatgtaccgcctagcctctgcttcatgcatctctttcgaaatggatgcttctacaagatcaagccatcttcctatctcccacaggtgcc

SEQ ID NO: 197887 - DNA, 844 bp, Zea Mays
agaggcacacgcctacacccgatcgcgaacacacgctagagatccaagggttccgatcttatttggcacacaggatacccattccgatccaaaccacccataggcgatcggacggccagagggccgtcttcctcccacgacactgatacacggcagcgtagcccactgtgcggcggcgacacctcaccggagatgcacagcaacaagcccgacgaccaaaccatccccgcgagaacgcgcaaaatgaaattcgtatattcgcgaatctgatagagggtgccttaccgccaatggggatgcgaaggtgcatagccacgacgcacggcggatctgaagtgatcgagctgcgccgacaagatattccttccccaccgcctgtcgatttagccatgtgaggccaaggtcgcatgcagaggactcccgcgagcacccggattccagcatggagtcccaggtagcggtgacacgaggatcagcgccggcagcttgtttctctccctcactctctctggttgccacccgccatagatacgccatggacgagcatcctggccatgcccgcgttagcgggtgacgaaggctagagcttccccgagcgtacctgccacccgctcgatcccgtcgatggagcccgatgcgaattccccaatggcggcggatctgctcaacaatggtggcggctctctgcgcaatctgaggaagcggctaggggataagaaggggagagggctttagctcgccatttattggccgagtgtgcgggagacaaatccgccaagcagttgcgccagctgaccgagaactccgtggtggcagcgatcgggcgtccgaaatcggcggggag

SEQ ID NO: 197888 - DNA, 567 bp, Zea Mays
ttcttggccatgttgatgcaagtgttgaactccttgatcttgccaatatcctccaacaacaaatccaagcaatgcgcagcacaaggagtccaaaacagatggggaattctgtccataaggatcctccctgctgctttgaaattggctccattgtcagtgatcacctggaccacatgttctttccccaccttaattatttgcttctccaatggatctgccaacatattggcatttgctatctcacttgatgcatcgacagaacctaagaagtaggtccccgctggactgttggcaaggaagtttatcaaatgccgttgtcgtatgtcagtccgcccatctgacataattgagcaaccatattccttccaagcctcttcatgcttagctctcaatgttgatgttctcttcactgccctttcaagccaaggtacccttgcctcatagtatgatgggccacgatatccaggaccatactgaccaatggactccatcataatctgccagcttcttgaattgacgacattcaatggaatcttgttctcatatagaaaatcagctacatggtcg

SEQ ID NO: 197889 - DNA, 1242 bp, Zea Mays
atttttgccacctgtaggattgctccaatagacactccaaagttgggcagtattgtctctggtgttgtggaacggcttactcctgcagctgttgttgttagtgtaaatggcttctccaaggggacaatactgaatgaacatttggcagaccatcatggtatattctcatctgttatatgatttgcgttgcatttaaacattgcatcgatagttttcccgtgtgggttcacacgcatattccttgttgctgttaaatactttaattgtttatattcatataacattactgctctgctgaccatggtctgttttttcaccactaggtcaagctgctcagttgaagaatgtgttgaaacctgggcacgagttcaaccaactcttagttctcggtgaagtcaactaacttcatttgttatcaatgcactttgaaaaaaaaacagaacaaccctttttctgttaataaacatttgacgcattggacatttttacacagttatgttgtaaaaattatagcaaaaaatgaatctaaagtcactacgtcatgaccagtacttttttttgaactgatggaggatcaagcatacactgtctgaagtgttgtatatctagagggagtaccatactaccacgtaacagtttatgaaaggatgtgcagaatttcacaatggcaagtaggaagttcgctgttttgcatgcacacttgtagcgtgtcatggtctgtacattacctcacgatacaatcagttgtttgcactgcttaatgatgatgcaccttttgttgttgtcagatggatatttgatcacattgctaatttttccaactgattttctaataccggtctgcagatactgaaggtcaaaatttagttctttcggcaaagcactcacttataaattgtgcaaatgacattccttcagagatatcacagatgcatcctggtgttgtagttcatgtaatctttctctagttatttttacttagcctaatgtgagcaactgagctgacatttaatttatcttagggttacatctgcaacattattgaagctggttgttttgtccgtttcctcggacatttgactggtttctctcccaaggacaaagtaagattttttcagctccatcattctttttgttgttttgaaaagaatgtctaatttttcttgtttcacaaaggcagttgataggtggatagaaaagctttctgatgcgttctatgttggccagtcagttcggagtcat

SEQ ID NO: 197890 - DNA, 409 bp, Zea Mays
gccgtcggtgcgtagcttagctctactctcgatcgccgttattgactgactgccccgttatgtttttcgtcctgccatgcacctctgctcactagaggctgccggcttggtgtccgcgtgcatgttaatcacgcactaaactcgcggctctcagagctctgcatgggcctggctagaaaccattcgaacgtgccgagacccaaaccaagtcgatgactggatgatttgatcttcttggactaaaaaacacgacaagtctgctttcagttgccgtgttttgttacttcgctgcggaatcaaacaacattaggattaggatacgtaggcttgagagtcattttcggcctctcctgtgggttcagcggaaccctttggaagcagaacaaccagatgatggccctgtttggca

SEQ ID NO: 197891 - DNA, 1555 bp, Zea Mays
ttgaatgaagtagaagcgagaagggagagttacccctcgaccatatctttcctcaaattgatcaatgcacttattgtggaagaaagaaacataagtgacaaaggccggaggtgcatacttttaactgattgtgttgtttcatatcctcaccttcaacatatttgagagtaagatactttttctaacaggttcatgggtatctttaagtttgtttatgaggatgtctttggtccttttcctcaaagagcttatgctgaccccctggaaaaatgggagcttgctcttgcttgcttggagcattttcgcatgtgagtagaatgattttgtttgaaaatttgattgcttatcttttttattgtggacggggaaccatgcaacacgaaccctgatgactcaacccttataacaggataacttctttgatcttccaatccctcttgtttttccgtaaaaatgcagctgtccaatggtaactacttgattatttatgcagggttttgagcatgtatgatataaaggatgatgatatttatgcttctgtgaacacattagctccttcctctcttgagagacaactccctctgctagaactactcaaagtatggccatgtactgatttttagacgccctaattgttaacatattactgatgctcagtctgggattatgtacaccacttggatgtcgaatggaaatcatgttgctactggaacacttttcattgcaaatgttgcacactccttactgaagattccctcgttgatgtgccttgctagtgttgacaggcatttagtgtgtttgcaggatcacatagtagaggcggagctatggttaggattatgtatgaacttggaaggctatttatctgaatattgctaacaaacatagacggatacatattatctgctgtattcagagtagtaggccagagagcactagtcaccagtcaaatagtgagctgtgaggttctttccacgtatacttcacagcagcagtattagctaaacaaatgttgtttctagaacgtactgtcgatttgatatttcatgtatgcaaatcacaatatttatggtgatgttcttgtttcaaaagtttttctttatctttagcatagaaatatatgtttgtccttcagatcacctgaattaatatcttttgctttggtagataagtgcttgcttgtttgccttttctttgtggcatatgttttgtcccatgtacgattgtctgttcaaagatactgaagttttgcattaacttctgttccacctctatttgtacattatgtataatttgtggttgtgaattctgacacaggatttcatgagtgggaaagttgctttccggaatattatgaacatcatattagtgggtgttgactctattatcaatgagcgaactacccaaacatacggtatcattttggagagaactgtccttctatctcttgaaatatttattcttgtcatggagagagatcttgctcttgctgatgtttttcggccgctctaccaggttttgcacttctatctcaattgtggggttgttcctggtt

SEQ ID NO: 197892 - DNA, 707 bp, Zea Mays
ttgatgtcgagcgatgcataggtcaggcccattagagagctagagtcagaacagtccagatggtagcaggcttcaccatggggctaaaggccatatgcctttagcttctgcttgaagatctatttcttggtgagcacattggcgccataggggcgtggcaacaagacccaggtgtggttcgccttaaaggcctcatactcctccagtcctcctacatggcatgcttttagttaggatcggtgagcgtagtacggacaaaggacaacttgggggagaccaccggagaggaggacgctaagagaacttggcagttgacatgctggaggacaccgacgacccgtgccagtaaccatcgggtggacatacctagggtcctagtggagggcaacagggtgatacattggcagctcgtcatgagagggagtcggtgcatcagcccaaccacaccgctagtagatgtgaatgggatttacgaatcgtgacaaggaggtcccctcagcaaacagcggtggggccacacatgccagcgcgagggatgctggctccgcatttggtggcacaagcgacactggagccacgcatggttgtgcgggagacgatgaagccatgcatggttgcaggagacgacagagccatgcatggcagtgcgggagactccagagccacacttggtagcacgagagactctagtactcatcgcagcgcag

SEQ ID NO: 197893 - DNA, 865 bp, Zea Mays
cagaaagtccaccatccagtccaaacatatctcaatgtgcttaagagtctaatttaatccaagtccctcaagttggaatccatccatcatgatccaaccatcagccatcgcattcatcgtgacccaaccatctcaggaaggcgtcttactcttccccttccccatcacaggcaacttgaccaccaagcgaagctgactctctcatctcatctatcatgtcagatctccagccagagctctccgcaaaactactcactgtgaaactccaatgttagccttcatccatcaggcactggacactccacatgatcctcactgcagaactccaagtcatgaccatattgaggtacacaacatggtcctggcccggagctgttggtgtctgtattaacctctacttggtcaatgcctatattgtctagctactgcttgttgcactccgctacgttactgcctccgtgctctacctcaaggcccatcactacggcatcatcatcaccctacatatgcctttgctttgtgcttggtatgtcacccactccactccagtgacctattaaatgaaacaccatgccaggttgtgccatggtcgtagagacaagtgaaatgacattatcttgcttcatctttgacgccagtggtctatggaggtcacatgatggttcggatgagaaagtctagttgctttgtgcttggtatgtcacccactccactccagtgacctattcaatggaacaccatgtcaggttgtgccatggtcgtagagacaagtgaaatgaacattattttgctttatttgatcacatggttttggatgtccaaatccaaacagatcatattcatgtacatccaaagcaggcagggt

SEQ ID NO: 197894 - DNA, 409 bp, Zea Mays
aaatctcatcgctcggccgctctcacagtcacagctgaatcctctcgcagagccaccacgggagctgaagtcgtcccctcccgcagtcacccccaagcgagaccactcccacctcctccactggcgtctagccggtggctgctgctggtgcgctacgtcactggctcggggggctcggcgcaccttgtgatgaagggaaggcggcagtcagtggtccggcgcatgtacaaggcgctcctgttcctcgtcgccgaccttgtcctcgaatccgcaggtcagcacggtttccatcccctcccctcccctcttggtctccccttctgccgttctgcgtatctgccaagcgatttcaaattaggcactgccggtgagtggcctagagctgggcggcgccctctgtttactgttg

SEQ ID NO: 197895 - DNA, 326 bp, Zea Mays
gtgacattgacagtgcccagtcaagtgacagaagcacatcaggtggaactacaagtactgacagaaagactattgatactgcaagcattcgagatgtggatcaaggtaagtcagatgaaaatggtgcaacacctgaagatgttagaggcaacaaagacaatggtagtgttcagtttaaaaggcaagattcattgaaatgcatacatgttgatcaccatcccagaccagagagcaaacaaccaaagatcattgagaagataatgacaacccttagagaggagagcaggctgagagaaatcaactgtcctgtcagaggtggtgtaaag

SEQ ID NO: 197896 - DNA, 476 bp, Zea Mays
ccaggattgatgggaaccgtttttggacgcttcatcatgttgatttttacaattctgtgatcctccccaagaaacatcaacccatactgcttcaacgctatatcaactgggaaggatgtgaggccattggggacccagagatgacacaggcattgagggcctgtgaaagaaagaagatgaagagcataatgacattccaatatgattggaatgatgaagtcattgcccagttttactcaactctgtggatcaagccagctgacgaggaaagtccatacaactatcattatctgaacttcttcattgaaggtagttggtacaaggtgagctaccgtcggtttgctcacattcttggattcactaacaatgatatttctggtgataagatcaagatccatgatttccgccaacctactagagatgaagccagagatcttcatctctctgagtctgggaaatattgggagtccaccaac

SEQ ID NO: 197897 - DNA, 719 bp, Zea Mays
ttcttttgccatcggccaactgttattgcaatcatggaatttatgaatgccatcaaccttgcaaacgggtctgatactgataaagataaaagcacttatcctgctactgtagaagatagtgcaattgaggaatctaagtctgatctggaatcagagccatcaataaaacccttactggctaaaggtaaaagcagaatagtttttcatcttacatccagcatggcagaggcacagatattactgatgaatgaaaatggtgaccggcttgctactttatcacaaaataatctctcgactgatataaaggtaatgtgatcatctccagtttgtgtgatctattttgggttgatttgtttaatgcccacacgtgtatgactatctttggcattactgaaggtgttcacatcatcattcagcataaaggctgcactcggaaaccttaaaataagtgatgatagccttcttagcagccacccttacttttgggtttgtgatatgcgaaatcctggaggtcgttcatttgtggaggtattccatgctgtttgatttaacttgcttaatgtaggtcataacttattatgctttacattgttggttttagaaaagaaaccttttgtgaatcactgaagaataatcaatttcaaaaccattgtgcagatcgactttagttcatacaatgttggtgatgaagactattgtggttatgactatagccttgt

SEQ ID NO: 197898 - DNA, 793 bp, Zea Mays
atgtttttgagtttagtaattaattcctcggagtgcaatgatattgtttccaggcaaaacaaggtactggtgaaccagctgagtcaaccagagccaggaacatcagatctttatttccctacagagtactcgcaatccacaataggacagttcaaagcctgtctctggaagcaatggctgacttattggcgcagcccggattacaaccttgttagatattccttcactctgttagttgccttgcttctcggctccattttctggaggataggcaccaacatgtaaattttcttgctttcttcatctttggtcgccagtgccggacttacaaatctaaaagagttggtgtattctattgcagggaagatgcaaccactctcggtatggttattggagcaatgtacactgctgttatgtttatcggcatcaacaattgttcaactgtgcagccagttgtttcaattgaaagaacggtcttctacagagagagggctgctgggatgtactctgctatgccatatgccattgctcaggtaaagaaatgtcgttgaactgtgcagacacagtgataactaaggtgctatttgctctccgtagcctctcaaattttatgcttcgcaggttgttatagagataccatatgtatttgtgcaaacaacgtactacaccctcattgtatacgccatgatgagcttccaatggacagctgtcaagttcttctggttcttcttcatttcctacttctccttcctctacttcacctactatggcatgatggctgtctcaatctccc

SEQ ID NO: 197899 - DNA, 694 bp, Zea Mays
ctcttaagttctttgagtggatgaaggttagtggcaagctaaagggaaacactcatgcatatcacctagctcttaaagccattgcctggaaggaggactggaagatggctgaacttttgcttcatgaaatggttgctgattcggactgcgcattggatgctcgagcatttaacggactgatatatgtttgtgctaaaaggaggcttgatgcttgggcaacaaagtggtttcacatgatgcttgagagagaagtgcagccaaacttgtctaccgttggtatgcttatgggcctttaccagaagactgggaaactatctgaagctgaattcacttttgagaaaatgaggaactgcaatatcaagtgtgttaatgcttactcagccatgattactttgtatacacgtttaggcctttttgccaagtctgaggatactattaatctaatgaacaatgatgggttagttccaaacatggaaaattggttggtgaggttgaatgtctactgccaacagggtaaaatggaggaggccgaattggttttgcagtccattgttgacgaaggattcaccctgaatgttatagcatacaatactttaattacaggctatggaaaaagttctgatatgcagaaggcaaacaaagtgtttgatagctttggtagtgcaggtttagctcctgatgaaacaacctatag

SEQ ID NO: 197900 - DNA, 511 bp, Zea Mays
aagacatcatcccctccacgcgcacctaagctggctcaactccatctggttttgggcccctcctggcagtggcctgaccgcttcttcccccaaacccgcatgggagattatccatggcgcggattccgggcgctgttgggactctgacgcccaattgaggcctataagccgtgggccatacccactccttctcccccaccacttcttcgctccgaatttctagccaccatcgcgcagttagccaagacctagcagccgcacaacaaaccaagtgaccggaggtcgtgccgccggggaaaaccatctgcgcctgtgttacgtccttggcgcagggtcgagtgagattcgccagcgcccgaggagtccgtccgtgccctcgaatcaagccatgcgcatccgaattgtggtgaattgctcaccggagcgcttcaccgccgccaagccgcccctttgtcgtggccagggtcttccgcacgctcgaatcacggtatgaactctacccttgcgttcg

SEQ ID NO: 197901 - DNA, 522 bp, Zea Mays
gatgaaacagttggctgatgcagttgagttcagtgtggtatatggaatttgaagaagatcagttgctttctgctagtgccactcgattgtgggatggagataatattgagatacatcactaaaggtctagagaccactctccactaaaatatccaaggattttggactgttttggagcagtgagctatggacagcagaatccctattgattttgtttgctgcctgcagtaatggacaaaactgatatttaggattgagataaggatgaactggacagcaaattcagtggcctcatccttgtacaaaatatcaagtgttagacctgtttgagcctatcctcaagtgggatatttgtgggttcccagctgccctctcttatctgcagtaggagacaaaaaaattgatattttgaccatataagattgaccaagttctgtgtctttgtctgtgttgtgaatctgcatgatgtagtgcatgggagccacatttttgagtccatgttgtgctggcacactggaaaac

SEQ ID NO: 197902 - DNA, 463 bp, Zea Mays
ccaagtcaccgccacttggcaccgctttctagacacttgccaaaatgcttcccaaagagccctctgccagctatgccaaaactacagtagggaagtctctgagacaccccttcgctacttcccacccagcaataaaaacacccctacctagaggaaaagacttcaggccttgtcagggagagatcctaatgaagatgaccccaccatagtctacatggccagatatctccacacccttgacaaccactatgacgaccttttctcccactgcacccacctaaattctcgtgtggaaagcctagagcaacaaatcaaggaattaaaagaagaaaaggcgtccctccaagaaagtcttaatggcggaaggcgaagaggccaacactcgcaaggcctaccgaaccctgaagatggattacgcgaagaagttaaagaagctcgcccccgctaagaaaatccataagcg

SEQ ID NO: 197903 - DNA, 353 bp, Zea Mays
aacgccgagagccatacgattacaaacggacggccctgattagatcatcgccacaacagatcggtctgcaaccatagccccaggatattgatccaacggttactgacttcgaaccccgctcaaagcacccgaccgttcgatcttagatcaacggtcgatcgtccactcaccgaatcgttatcttggaaataatcgcgcacgttgagctaggatccaacggttaccaaccaaccctatcgcccaagccgacagcgcggcggcgcagtacccgcacggtcacagtctaacgaccccacgaatcggtaagggttcgttttaatcacgaccgttgcgtgacgatccaagggcaaata

SEQ ID NO: 197904 - DNA, 376 bp, Zea Mays
ttgacgacgaccgggctgggcgagccccggcgaactgcagatggccggctgggagaaggcgcgcaggaactgtgcgcgcaggtaaggagaatacagagggagcaggggtggaagccggccaccatggctgggagcctgggacacgtacaaacggctcacaagcaagtagaagaccggagaagggcctgtacgtgatattatcccaggagaagaagccgagtgcgagccagcagatggaagaacgagcgcttgtaagataaatccgatcaccggatgagactgagaagagagagataagaacacggaacaaaaatctcacgcagcagataaaaaaaaatcccaggaggataagcagaggcgtggctgggattttttt

SEQ ID NO: 197905 - DNA, 334 bp, Zea Mays
gtccaaataaattaactggtcgatatagtagttgtcgtacgtgatttattgttagttagtagttgaattacgagttatgcgagaatcatgttagaaactaatgtgcggcgtgtaactgtgctcgggtggtaaaccataggtcggtatgtattattggtgtcgttggcaaatggggatgattcttgttgtgcgataaaatttgaaaggcaaagaacaggggtagtgtgtcgatcaagttaacaggtaggttccgtgaacacgtttgtgatgcttttatatgcatgataagatcgatgccttgtcgtcgtagtctcggggaatttttggaaatgtg

SEQ ID NO: 197906 - DNA, 728 bp, Zea Mays
ctcttatcagcagcttgatagatacggttaaaatctcccgcaatgacccaaggtccagggcacatagttctgacatcccggagttcttgaaggaaagaaattttatcaccatcattttgggggccatatacaccagtgaacctccaattacgaccttgttcttcaacaaagtgaactgaggctgaaaaaatgtctactcgagaacctaaagcttgaatgatggaagtcttccaagcaatgatcagccctcctctagtgccatcagccggcagtaagacaaacttatcgaaaacagacccaaaagctgagcaaaacaaaaaatggtccatggtagccaacttggtttcttgaagacacaatatccgctctagatgagaaaattacctcccgaacaacatcccgccgacccttcatattgagcccgcgggcattccagatcaaaatagttgatggattcataagagaaactgcataagaaccaccaaaccgggggctgctaagatgccttctagggagatgtactccatcccctcacccactgtccatccaaacaacaccgataaggctgcaagctgagaatctgatatggggtcaaggaacaatttgctatatgcatcttggacagatggctcaaccctttcctcgggaacatgaaacccaaacttttgatcactctcctttgggcctcagaagcaacaagcccaggaggacatgggtccgcccccgcc

SEQ ID NO: 197907 - DNA, 329 bp, Zea Mays
ggagaatataccacgtgcatttctgtaatgccgctgaataatactgtactgcctatacaacaacatgacccttacagaactgttccaggctatcatattgctactggttgctctgatggcactgtaaaactttggaagatgacttgtgcagaggactctttgcagactaagaaagaaagacacatctgggagctagtaggcatgtttggtgctcatcaaggaccaattgacatagtttcattgtcaggctgtggtagagttattactgttggcagaaatttgaagaaaaatagcacctccattcatatctgggaagcaacaaaaatcag

SEQ ID NO: 197908 - DNA, 456 bp, Zea Mays
aggtggcattggtatgagattaatttttattatgttgttgtttcctccatcgctgctttgtgcagggaaacggtatccatgctgcaatattcccaccagtcatacaaaagttcaagcctctgataaaagaaggagtcgtctacaacatcacatacttccgggtcagagcctcgaacaatttgtacaagcctgttttcaatgagaacatgattacctttacaaactggacaaaattggaggaggttgttgaggttccaccagcatttcctgtgcttacctactcactcacaccgatagaccagctccatttgtgtgtcgacaacagggagtactacacatgtagactttcttacttatatgctacaaagtttaagagactataattttgttgtattcattaattggatccaatacagatgccattggaattgtcacttccatctcggtcgtggcgcc

SEQ ID NO: 197909 - DNA, 343 bp, Zea Mays
aaaatacgtcttgcaaggcagacagagcgatgccgcaagtctgctcaccaggaggtcagcagaacagaaatttacacgccctttttcatttgtttgtttgtcattttgcactgtcttcggtgaactgatagagcaaatggaaattgcagatggctcttattgctcgcttgcaacatccttacatcgttgagttcaaggaggcatgggttgagaaggttggttcttcatgaacatgcttctgtatttgccttttatttggttccgtcctctgttacctcaacgcatgagttttgatagggctgctatgtttgcattgtgacgggatactgtgaaggtggcgata

SEQ ID NO: 197910 - DNA, 352 bp, Zea Mays
ctcgacggtgacagtgccgaagaggcaggacatgacgatgctgttgtgcctgtaccgggacaaggtgttggagaagacctctgtcgagggcgtagcgacgaagcgtcaataacatgaggtcgcaccagtgcgtgtagtaggtggagagggatccagaacaactgtgacgatggagcgggtgttctagacagcagctgcctgctcgtggagattggccacctcagcggcctcgtaggtgccaatgacgtcggggatggagtggtcgttgtcctcctcagcgtccttcaattgccgctctagggtggcgagggtggccttctcctcccatgcaagctcagcagtacgctcatgg

SEQ ID NO: 197911 - DNA, 535 bp, Zea Mays
ctgtactccagctaccatcattcaccaaagacttcatggttgattgtgatgcatccggcacaggctttggggcagtccttcatcagggaacaggacccattgcattcttcaatcgtcctttatcagctagacaccacaaattagcaacatatgaaagagagcttattggtctcgtacaagcagtacgacactggcggccatatttgtggggacgccgcttcatcatacgaacagaccactatagtctcaagttcctcctcgaccagcgactctccacaatcccgcagcaccagtggattagtaaaatccttgggtttgatttctctgtccagtaccagccaggtcgcctcaacacagtagcagatgcactctcccgtcacgatgcggacacccttttctctgcggctctatcgggaccaacttttaccctctatgatgacctccgaagggacactgcccaggacccagactgccaaaccatgtgcacccagattcgagagggaaccttgcctcccccatggcgggtgcaggacgg

SEQ ID NO: 197912 - DNA, 348 bp, Zea Mays
cgcccactgcggaaaacaacacctatggcataagcgccgcgctaaggcatcgcttagcgcctaatcacgattaggccggcgcttaagcacgcttttttgaacattgatccagagacagggtgaagtatcctgagacggagggaagggtagagcgagacaggagagatcaagcgatgattgccgatcggacgatgtgtttttttgacaacgtggataggctcgtcgttgccgttttgcacctgctttaatatataggaaatgacgcgcacaaaagagaacaaaaatcagcaaggcaagaatgaaagaataaaaggcaagctgaggaggcagtatcagaccagtgaggcg

SEQ ID NO: 197913 - DNA, 471 bp, Zea Mays
tgtagttggggagctccggtcatggcgctccaccgcggtgagcgcgccgtcgggatttgggggtgctcgaggaaggaggcacttgtgccgttggatcggtttccagcggatgagtttagatcgtgaccgattcgttctgagccgtcgatctccgatgtgagggcttggattaaatctggtttgtgctggccttcaaccgttgatcatacgatgattggcccagatcaaatcctggcgcatcccttcaatcattaaatcggatccgtcgatctcggatctggtggccaccaatgcataccggttcataaaacgattgggtctaatctaggccgccagatggtgatcggtcggctattgtgtggcgataccccttcgctgtgacgcttagctcaagagtctctgtctttttcccgattcaacccgccgtccatacaagttcaaaaacccctccagatcagtcctggaatttac

SEQ ID NO: 197914 - DNA, 990 bp, Zea Mays
ctcgtacccaaaagaaccatgtcacacggcatggtctcattggcatgaattttgacaacctcccctgcacaaatgtttttccactttttcgaccgaaaatcaccatgttgaagtactagtgcctctcggttattttcatttctgtcagatctgtgacgccgccagtcttcatatccatcttttatagcagtcacaaacaacacaaagagtagtgggaaaagagaagcagttcttccaaatacagctaaaggagggagctggttaagagcagctataaccaggaagtatacatatgccaaccgatgaaactgtatgaagaggttcttaggcaagaacgtaatcaaagtgtacttgcttgtcctgatctcattccctgtaaattcatatcgatcatttgtcttgttaggatcattaatgtatatttttcttggctcttgctcggatggatcttcaaactgtgagctcttgttcctgattctctgggagcgatttggcttctcatgtgaagaagataccattccaatctctagggatgatggagaatgctgcctctccattgcgccaccccaagaaaccttccgctgcctctccttctgagagcattccactgagagacgatggaagaattgtgaatcagcagactggaagcgctctgccaccctgctcacatcagacaactcgcgtaaatgtcttggttgagcctccctttcatccgtgagtgtgacagaagccgtttcacaatcctcgtacagtgaagaagagaatgaatcagttgcgcagaggcagcctaatgagcctaccgaaggccgagctggctttgaaggtgaatctgcacttcccgatgatgacaggagcaagggatcaccggtagtcatctactgcaacctaccaaccactgcatcattggaataaggaatctggctacaagaaggatgggctcagttgcacggtgcccacttccagcacgctatatgctgaagccatctcatg

SEQ ID NO: 197915 - DNA, 361 bp, Zea Mays
atttttggtacatccatgtgcagcctcatcaacgagatgtgacgactctactcgctgcagcagttcaggcttgccatgatatggttgcgcgtcttcaaaagttcattgctttgcaactattggttccacttacattactttttttctgaatgcaaaatgtatgtgtaaatgttaggtacctccagatgctgttgaaccactgttcaagcagatagtaaatcagtttgtgcatgaccgttctcgtccagaggtttgcatgccccctttcagcatactatgtgttgttccagctaacaagactgcatgaacatatatctgactttacttcttttaggctattgctgttggcttaaatgttgtg

SEQ ID NO: 197916 - DNA, 275 bp, Zea Mays
acttgtatggtaggggatcctgcgcctatatggcaggaaacacatggctgatatattagctaacacgcccccgcagtctgatcgtcggtaccacagacgttcaggctggatctgaactcagtgaagactgtagagggaagccctttggtgaagatgtctgcatactgggaggtagtaggcacatggagaacgcggacatcaccgagagccacccgatcccgaacaaagtgcaaatcaatctcaatgtgcttggttcgctgatgttggatggggtt

SEQ ID NO: 197917 - DNA, 544 bp, Zea Mays
cgctggcgttctcgtccgcgtcgaaccaggcgatctcgttgcggagcacggcggcgaacatcttctcgcgcacccgcttggtcaggttctcgcccaccgtgtcccagaacacgtgctgcaccgtgttgaacagcagcgccgcggaggacatgccgatgagcaggtagcagtattttgcgatctcgcgcttcatgtaccgcgggtccggcgcgtagtagacgctgagcacggcgctgaggatgtaggcgaagatggcgctgaaggagccgcagaccatggagccgatggagccggcgagcgcgtaggcccactcgggcgagttcatcctggcgaggcgcaggaaggagctggcgccggcgcggaacgccagctgcttgtccgccatggtccggtggtggtggtgcgggtcgtggatggagagggtgaagtcggaggtggagaagtcggagaggcggcgggagtagggggagcggccgtaggaggagttgcgcgtcatgatgggcgagctgacggagttgcgggcgctggagggcctggcgctgct

SEQ ID NO: 197918 - DNA, 658 bp, Zea Mays
attttttatgcacgtgaatttgcaggtatggagcagatattgctcgtggaatagcagaactccatgcagcgggtattgtttgtatgagcataaagccgtcaaacattcttttggatgcacatggacatgcattcgtttcggattacggtctttcagcaattctgaagaaccttactagtaggagagtacctgatgactccagtgctggcattgatgctacactgcttagccccaattatacagctcctgaggcatggggaccactgaagaagtcactgaatatgttttgggatagtgcaaacggtatatcaccagagtcagatgcatggagttttggttgcacgcttgtggaaatgtgtactggtgctgttccgtaagtagcatgatattcaatttgttgtccttaatgttttgtgaatggtgttgttatatgctcattgaaatgcagatgggctggactgagtgcagaggaaatatgtaagtctgttgtaaaagaaaagaagccaccgcctcaatattcaagagtagtaggtgtaggacttcctggggagctgtggaagatgattggtgaatgcttgcaattccgagcttcaagaagaccatccttccaggacatgctgaaaacttttcttcggcatcttctggacataccacggag

SEQ ID NO: 197919 - DNA, 499 bp, Zea Mays
gctccagaagaggagatggggaatgggagcctaacatggcgacctaactgacaagcatgacagaggtgctcaaaagatcccctacaaccggaaacagaggtgttgctggagagtttggacatcacatcacgaccggggtgaccgagacgacgatgccaagtcatagaagaggcggcgacagcaagaacacgcggggcagaggtcggtgtagcggaagcaggcaagcgaagtgtgtagagtggcccggggctgtcacaccgagctagaagggtcctggtggcaagatccttcacagaaagaccaaacaggtcaaactccatggaacaagagttgtcagtagtaaactaacggacggaaagaagattttgaataatgtggggagcaacaagaacgttggataaacggaaaggaccgggaaggaccgcgtcaccgacggaggtgacgggaagggcagagccgtttccaaccacgatggaggacggaagggaggggtgggggg

SEQ ID NO: 197920 - DNA, 319 bp, Zea Mays
agaaaaccaacacgaatttgcgaaggaacttagagagcacctcattcattaaggcctgaaaggtagaaggggcattacacaagccaaatgccataaccagaaattcaaaatgcccatggtgagtgcggaatgccgtcttctccacatctgcagcatgcatacggacttgatgatagcccgatcttaaatcaagtttggtgaaaaatatagccccatgcaactcgtcaagcagttcttccactgccggaattgggaatttgtctttgatagttgtggcattcagttcacgataatccacacaaaaccgccaagaaccatc

SEQ ID NO: 197921 - DNA, 285 bp, Zea Mays
gccgctgcctctgctgcagccgctgcctgcttcgctgcctggactgccagcgtcgctgcttcctctgcagccttcaggcgtgcagcccggctggagaagtcgcccagctctccctcgctggttcccttggccttgagcctggcagcgcgctcagcagaagtcgacatgagtagagaagagaggggtcggccttgagactctcaggtgtctaacctaagctctggtaccaaatgttagaggtaaacagagtggttttgccggaggtactaacctcagccatcattg

SEQ ID NO: 197922 - DNA, 766 bp, Zea Mays
gccatatacacatgtaagccaccaaggagaaccttcatccaagccaaactggactgacactgagtgagaatcaattctgtaattgccctggtgactgatacgatcccgccaagcaactaaaatacctccactagtgcccaatgaaggcaagaccacaaaattgcagaaatacctccactagtcgcaacgtgtaattgtgtgtttggggctgttatgtttgtctatgtttctctcctcttgttatcccctgtaattcttgtgtggcctcttggctatgacttttgtgtttttgcttcttctattaatataaaaaatacgcaattccaaagttttgttaggcgctaggcggaatctaggcgatgacccttagcctagggactagtccagcctaggcttgcctaggcgatgctaggcgtttttctaggcgttttgccaacttatataatatatacatttatagataaaaaatagggaataaccgaggagacatacatttatcttgcactttcagattgaccctcaccctctgtcatctgagttctaaccaacagtcaacaaattacaaactgaatatgtatggattatgggaataaccgaggagagaaacaagattgggaggagagaaagcaggagccgcaggccttgagcaacagtcaacaaattacaggagagaacagagaagcagccaagcaggacaggagcaacagtcaacaaattacaagattgggaggagagaaggaggatttaccgcgtacaggagataagc

SEQ ID NO: 197923 - DNA, 543 bp, Zea Mays
gtagcaacagcggacaaaggtcttttttgaccttttagttcattttctttagcagctatcttatggcgcaagatttctaacctatgatcttcagaatgtactcctaccccattttgaactttctgtttagactttagaggattaacttggcggacaggcagctctttcctgaaaaaggtattacctgatgccctgccggccccaacatttctatgtgtgaatggaaaagcaggcaagtgtgcaggacctacttttgaaccaaggtttttctgctgagatacttcctctctcatgatcctagtttgcatactgttccctgttctctgtgtaccttgagagctagccttcctaactttatctcgccctgtcttcccagagtctgccccactatcatcatctgagaaagttatcagaaggttatcacttgacacaggcttctgccatgaaagattccggttagtgccaggtttgaattgcccctgattcaccctcatgatcttcttgtaacttggagcagacgctttatgattcagagcatttgag

SEQ ID NO: 197924 - DNA, 258 bp, Zea Mays
gtcatggcgtgagagggtgttcgccgccaagttgaggcgaatggggcggtagtcgaccgcaaaatcaaagccaaatagcttgcagatccagtggtgttggggaacgatcgacaaccactggtccaagaggaacttgaggctgcaatggttggtgcggatgaggaagcagcgacccaaaggtacaaccaccaatgccgcacagcctggattaggcagatgagtacacacctgtacgttgtcagcttgtggtgatggacg

SEQ ID NO: 197925 - DNA, 252 bp, Zea Mays
gttcccatggaggaaggtctttctcaaacttccctgccaaagcatcagtcaatagaatggaatcatcctgcttctcactagctttccatattttcaaactaggagggaagtacccattgctgttccatttccgcagctgtatgattgagaaaggaccttggattttattagaaggatccatgtacagccagatcttctcagactcgttaatggctgattgagatgcagtttttgcccctgaacctatgttag

SEQ ID NO: 197926 - DNA, 238 bp, Zea Mays
gtcgccgaaggcgttgatgacctggccgaagatgaccgtcatgacgggctgcgagacgccgttggccagcgcccccaccgtgccgaggagcatgagcagcacgtccgtgccgtcggcgtaccggaacagccccgtgaacggcaccttcttcccggcgtcgccgccgccgttcccgctcccgctccccacttccttcttgtccacgccatccctccctttggcgcctcccgctgcgtcc

SEQ ID NO: 197927 - DNA, 496 bp, Zea Mays
tgtatacctacatacgtatgtatgtatatagacacacacatacatgctatttggcaccattctagttaccgccgtgtcccccgcgctcactgtcatgcagcacccctctcaggcatagctaaacaaactctcccgccacttaaaaaaatgacttggacacatgcaagtttgatggtccatttaaaaaaaaatcaatatctaccaaaccgactatcaaaattgaaaaccgatttcaccattttgttcgtcgccataaaagtttcaaaactagatcccacttgacatatttatctagagttttatcagggttcagtcattccatcttttagcctcagtcattcataagaatactgagatagcagtgttttagtgagcaggcattctacaaaaaacaggcattacatgaaaggaagtgaacataatcagacattctataaatacttagttattctatctttccttagccattcatgagaataactgagatatttttttt

SEQ ID NO: 197928 - DNA, 364 bp, Zea Mays
caccttgcttttctttttgacaaactgataatattcattcagagttcttacttttcaacatgtgatgaaaatattctgttctgataccccctgtgtttctgttgcaagttattcttttttctgctcctctttggcatatatagaagtagtagtagtagtagtagtagggtggattatatatgttggtgctgtgtgaactgtggtggccagtgaagtgtgaattgtttttttccttttccgcccataagttcagagactgagaaattatgaccatgtaatttggtgaaccatgacactttaggtgtaagtatccttcaaatgaagaattttgtgtccctccatcgatgtcagttgtttgatcttg

SEQ ID NO: 197929 - DNA, 287 bp, Zea Mays
ccatagttgttatcgctggagcatgcccctaggcagcccgctccccctccacctcccgtccagggctcacctgcctctgctcctgcgggtggtggcctagctgccgttggcccagccgcccttggcctggccgtcgttggtctagctgcccttggcctaggcatggttggcatgggcacaggcctcgctaccgctggcatggttattgttgacgtgggcccgagcgtggctcccatcgtccccagcatcttgttcttgccctcactgtccttcgtgcctccgtcggc

SEQ ID NO: 197930 - DNA, 681 bp, Zea Mays
gtgtccagcaacacggtcggagccgcggtgcaagcagcagcaatcagaacaggaggcgagcttctaggccacgacgtcgcagctagcgcaggtacgacacggctgtgtcatagcagtagcagcagcatggtggcaagaggagagatggcgagcagggggcaatggaaggaagggcttcggccgcttttataggcgggtagaggagggacagcgaggggacgccgggaggtgaagcaagggcgtcgaccgtggcattcactggtggtagccgagtggctgcggcagtggagagaggagtgttgtactgttaatggaggaggcgaagaggcgggtggcgctgcattgattggattccacagagaactaacgaggtagccattaatggcgttcaagaaacatcgcgcactagtactcgcacaggaactggaaacgccaccgcgggctggctgctgcgcactggagcctacgtccgcgggggccgccgcgagggctggggcgtgctctccgcgtcacggaatatgggagaggggagctagagcggctgcaggctcggtcgagcggcacatgggcgcatgcgtcatgcgaacagccaaacgctgagggattgaagaccaatatgacacaagggccccacatgacatagtaaagaagagatgagggagatagggaaaatacacgtat

SEQ ID NO: 197931 - DNA, 681 bp, Zea Mays
ccttgggccatggcacccgctgatgaggatgcctgatggctctccacggtggccagccgcgagagaacgaccacctgctgcatgttgaggttggccatctgctgggcagcctcagagagggcctttgccatggtgtcaagggagaatggtggcactccttgcagtgccggctgaacgacctgttgtgttggtggagacgaagtcttggtgtcaatcgctgtagtagcgtcggaacctgacatctccgatactagattcataggatccttgatcctatcttggttgcgaagtgtgtaggaatgcgagattggaggccgcagtcaggaatttctgacttcggaaaggcgccgtggtggcgtgggtgtagaacaacggcacgacagtgagcgagggagagagggaacacggagggtaggcccttgaggcccaacaagatgtttgccttgcttccttcatctggttacatcactcctatatttatagtccctagaggactttgttccaaagcaaactagaggaggaatccttatagatttagactcccctttcctaacacactaattctatttcctaaatgggtactttatgccaggtgtaatttgggcccaacacctgtgtggctcgttctccggcgtgcataggagatactggttgtaacatcatatatcatcaatgactata

SEQ ID NO: 197932 - DNA, 462 bp, Zea Mays
ctgaccaagaagtttgagcatgtcagggccatcatccgacactacttacccttctcgtcctttctcaaggtctaggacgatcttgttctagaagagctcaacatgactgccattggcactgctattgcttcgataaccttcatggccactcctctgccagtcccccccactagcttccctagccccttactctactctggcacactcctctaggaccaggaggaagcccactcccacctagaatatggcaagaagaaagggaacagtcagggtaatgcttcctagctgactttctacaacccatggacgagcatcatcaccatgtggcccagctcggctcctggtcacccgactttcttggctccgacattccttgttgcgtctacctagcatcgacgtcttggtcaccctggctcggatgtgttatctagtttgtctaatgcttcaactatgccatgtaat

SEQ ID NO: 197933 - DNA, 507 bp, Zea Mays
ctcttcgatatggctgtgaatgccgtggttgggaatggtgagaaaattattttttggactgaccgttggttggatgggcttactatggctgagatggcacccaatcttttcagaactgtccctatgcgaactgctaagcgaaagactgtggctcaggctttgtttgggcggagttgggttcgtgatatcaagggtgctcttactgttcaggttttaattgagtacctccaggtctgggattttgttgaggaggtcgtactgcaagctgatgttcctgatcagttcagatggaagttgacacaagatggctgttatagcagcaagtctgcgtatgaggccttcttcgtgggctctaccaagtttggcccttggaagagaatctggaaaacctgggccccgtcgcgttgtaagttcttcttatggttggtgcaccataatcgggtttggaccgctgatcgtcttgagcgcagaaatctgccccatccagtgtcttgtccattttgtgac

SEQ ID NO: 197934 - DNA, 228 bp, Zea Mays
agcataattaatctacatactgattggcaaagcagtttgtatgagtttctgcattggttgagggtggccctatgaggttcatggaggctgtatcacccatcaatggaattgaagattcagcatagtcaacaattcttccttctactgtgatggcggaaccagaagaaactttctttgtaacttctccactagaaggagctgctcgcttattcacactaggaccaactg

SEQ ID NO: 197935 - DNA, 884 bp, Zea Mays
ctgcaaccttttctatcgttaagcagtgccttgccttgggatgctttccacgggtaaaggtcgtgcatacttcaaggtggatccgtggccagatttacatacctgagataaattggattctgatggtcctctgtttagctgtgacacttggcttccgtgacataacagtgataggaaatgcttatggtaagcccctgaccatttcagtactgcataaactgggcaagtcctaccaagcgcatggattttattttggaaccatatggtgcttccgtttacgtcacctgcaaattctccatttcattcaagaccctaagtttaagccgttttcaactttgtggttgatatagacagtgcaccctctcattttgaccactaattgctatcatataccccgtacatttgtaccgtcacttttagttaaacaaatcaaatatcaatgaaatgtgcaactctatattttgcactaggcaattactgcgttttgcaacttatgaaggccagctgttattttttttcctttctatattagaaaccaaagctgccaattttcttggataggttgtaagtacggtgctcataactttggaggtggatagtcagtttgttggttctagcattctctccatatcttgatgcacattacatcgatattctctgccatcatatttttcacgaattcctcacactgaatcaaccatcggtgaataccgctcccttcgttggtatgatgatttcaggtctcgcgtgcatcactgtgatgtttgtcaccacctgtctgatgtcattggtcatcatcttcgtgtggcaaaagaatctcctcatctccttgctattcttcgtattctttggggcactcgaaggcgcctacctgtctgcagcag

SEQ ID NO: 197936 - DNA, 365 bp, Zea Mays
cgcaaacacgcaatgtgcttttgtgaggggcagaagcattcgtgataactttattttggtacagcaaaccatcaaatctttgcacaggcagaaggttccaagcttatttttcaagttggacatttctaaagcgttcgactcagtttcatggccgtttcttatggagattcttgctcacttggggtttggggttagctggagaatccttgtccttaacctatttggatcatcatccacttgtattcttgttaatgggcagcccggtcctgaaatcaggcacaagagaggccttaggcaaggtgacccgctgtcccccatgcttttcatcttggtcatggacatgcttaacagcctgtttctcaaag

SEQ ID NO: 197937 - DNA, 320 bp, Zea Mays
caggctgcgttacatgtctggaagacgattgtagcaaatactccaagaactctgaaagagataatgccagtacttatggacacacttatttcgtctcttgcatcatcttcctccgaaagacgtcaggtttgacctatctcatgtgctgcttgaaatctgtagggatttttaccattttaattttgctttgtattgccatttcacaggttgctggaagatcacttggtgagcttgtaaggaagcttggtgaaagagttttgccctcaattattccaatcctgtcacagggactcaaagacccaagtgctagcagaagacaa

SEQ ID NO: 197938 - DNA, 331 bp, Zea Mays
cttttcttctgctactgaaggatgtgttggagtttgtggtgttatggattgctcagaaacatctgccttagaaacaggtgacccattggaaatactatgaacttcttccgattttgaaggcagttttggagatgttgttcctgatacttccgaaggatctacctcagatatatgtttcttagttggtgtgctattaattccttcctctgctgacagattcttcagagattgtggcttttctgatacttcagtgccatcctcctcaccattgtgtcccatgaaagccatgacaggattgaagaatcctattctatcagagttggatgtctgt

SEQ ID NO: 197939 - DNA, 544 bp, Zea Mays
caacagttgatggtttactcaaagaactgacagagtaagaatctgtgaaactagttcctgtagatgactctgttcctgccatttccagaggtgcctcgtaaacacgagaaatagcaggatctcttccaaacccagtactatcagctgtaggaggcaaacagagtggtagctctagaccatattgctgaatggccatagtttgaacacaatagacttgaacaacttgttcactatcaggttggctatcatgtgttcctgtaaggcttaatataggcattgcaactgtgaaatctgctatgtagtctaagcgagtagaagcaggatctgggccatactcaacatgcacggcataaatagcgttctttttagcatttgcaagcaaaatcaggctcgcttggggcagcaccgcaacctggttgaaaaatgcctcttcgactctaggttccagagaactaacaagttccaacgtctgagtacacttccaagtctcagaatcacttggcaacaaccagccatcctcattagtagaagcccaaattttaac

SEQ ID NO: 197940 - DNA, 483 bp, Zea Mays
gctgcatccaccaccattacatcctcttcctcctcttgctgctcattatcatctaggaaaatagctcttttccttcttttggattccaagtaatccctcatctcctttctaattgcagtagtggtctttgaacacatctttgtatctccatagccacctgctagatgctgctttagcctttttatccctccagaaactacggtgtcacaaagggtgcatgtcacttgatctctatttgccaaatttgcccaataaccatacttccaacctggatcatttgagctagccttccttgctttgtctgtctttggatcatagttgacattgttgactgaagatgggctagccattgattgatgagggtggcagggtgttgttgcagacttgcagtggtgcactcttgctggcttgctgcatacaaaataggagatgagggacagagggagagcaggcgagaagcaacactcaacagatgaattgagg

SEQ ID NO: 197941 - DNA, 576 bp, Zea Mays
ggcatatagtgcgagtggtgcggttcttaaggaattgggattcgatggcgagctagatcacgccgccggaggtgccactcacggagacggtgtcgacgaggtcgtcggagatggcaccaagaagccatgtgtggatgagacaattcatccgcacccaggaaggagatgctggggcaacggtgttggagagaacgtgtggttctagcgagcacttgtcgaggacatcgaggaaagactctttccaacgggtgtagaaggtggagttgaggtcgaggacgagtgggaccagagaatagatgttctggacagagaccacctacgcgtgtaggttgagaagagttggaggcctcctgctaaagtagcacatccgcaaaggagtgtccgccttcatctgaggcggcggtgtcggtcgcaccatcgggagcgagatcctcgagtcgaagtggtgctggcatggcccgctcgcgggctgtgcgttcttgagcggcatgaatgcgcgcggaggccgcctcgttctccttatggatgatggcaacttcacagtcggcctcgacggtatgcgccaaggcggtgttg

SEQ ID NO: 197942 - DNA, 287 bp, Zea Mays
tgaagatcataacgttgatgagtgctgtaatgctcggtcttcttccatgtatagcatggaagtgctagataatgagcccgtagactttgaaaacaatagcttactttgggtagctccagaacccgaggacggagaggatgatcacgatggtgaacatgatgatgatgagggggtggatgctacaggagagtggggatatctacgcacaaacagctttggcagtgggcactgtcgaagtagagataagtcagctgaggaacacaagaaagccatgaaagacatagttg

SEQ ID NO: 197943 - DNA, 419 bp, Zea Mays
gcaacttgtgctctgacagattttggaggaagggcactatggtgtttagtgggagccagggatgagtcgccagttagctgccttggaataatgtgctttttcataaaaaaatttggtctgttcagcctccatgcaaaaaaaaaaagcaagggtaaggctgcctgtgtacaccttatcagcaccgagtacaccatataatcatatcaagtattttccatctagtcgtgtcatactcatattgcattaattatcttcagacagaaagtgcatgctcaggttgcagatcaagagagtaacctggtaaacaaagctcctatcaagtatcaaccaagtagtaggccttatttgaggagggtcccaagcctcaggatcccacagtacaatagtacatatagtaaagccagtaggatccctccaag

SEQ ID NO: 197944 - DNA, 463 bp, Zea Mays
tggtttctcttaaaaagacttggaacatttttttattaggtttgcttggaaatgctgagctttgctaattactctggagacgctgatagcaaaattgttcgagaagtttgggctagactccttgatcaggcacttactaaagggggtgttgcagaagcttgttctgttgtgaaaagagtaggctcgaaacttgatcctgcagatggagcttgtttacctttagatatcatatgccttcaccttgagaaggctgcagtggtaatgtgtattttctgtactttccgtacatgcatacttgagactacctgtgagagcattccactgtggtactcattatcctgctcttatctacaggatagattaagttcaggagaagaattagttggtgatgatgatgttgcaagagctcttcttggtgcctgtaaaggtcttcctggacctgtactttctgtgtatgatcacc

SEQ ID NO: 197945 - DNA, 232 bp, Zea Mays
gtcgcttcctaatgagggttgatgtcaattggcgatgtttcatcgttaactcatgttcagcacatgtgtgtggccccactacttttgttatcttccactttgcggtgatcttttgtatcctagcacaaaccctccatgaacagttatccttgtcgcatacaaccgtgtaacgacgtttctcgtacgaatgaagtactctatacggcctcttacgtaagactgcgtaatgctg

SEQ ID NO: 197946 - DNA, 942 bp, Zea Mays
gtttatccaagtattacttttttttagcaccatttggtgcagagtatcatttgtttgccattatgttcgagaacaagcaacgaacacaaggagaggcttctgcatgaaactgtttcaaaagttctgctgcatgagattcagggagattattcttaacatggctattggtatcaccaggtcaaggtcaagcgaatactactaccaaaataaacttgggcaatactccttgcttgaatcagtgattagttgcaagtacaagcagagtccacgtaaggtatggtttcacaggtttatgcatcgatattgtagtcttatagtggctccagactttgggtacctttgtaatacaaacaaagactttattcacgcacaacgtatccgcaagaaacatgtgaaacctgcagctatcaagataccagtagaagtaaaaaaggcagttgtccattccctccagcgtacacagggtgtcctagcgaatggagaatcgtcattagtgtacaatgaggtgcatgacctcttatgggcttgcaggcacaatatgctctcagacccaggcaccaactgttacctggacaaggagaatcagacacacatcattttgacttggcacattgcaacgtgttactgcgaggtgcaaacattgaaatgcctttatcctagagttgggggggcactcaagttacatcttgacatcgcaaccatactgtcaaagtactgtgcatacctggtggtctcagcaccgaagttgcttcctgggaactactatgattctagccttgtgtttgatgcagtagcagtggaagctgcacagtttctgcagaaagtggaagacaagtatgaagccttgagaagtttgcctgtatcaacagaaacctccatcttacagagggggatgaagttggcgaggcagctcgaggagatggaatgtgacaagtgttggaa

SEQ ID NO: 197947 - DNA, 862 bp, Zea Mays
cctctgtagctgtattaatgctcatcaccgattccgacttgccctcaccttgtagcctaaacttgcggctactctgctgccaccacccacctcctctctcttcacctcccattctctctctccgccccctgcttgcctgctctacccacctcataaacttccccactccttcctccatttccatccattcttctccccaggctgccgccgctggcagccgcatatgctgctgctggtgctctgctactccttcgtcaatctctgctgccgtaagttacatatatggctgacactctctcctattttttctcattcttattcgtattttattatgcgattcttgaaagtacagaactgtcaggactacagaaattaggatgttccatgtcgttttttttgggtttttcatgccgttgaacatttacctcctgctcctgttttggtagtgtttgttcgacatttctggtttgtacacgcagctgtgcgaagatcttacacaacggcgactgtaatctttttcctcagggaactccgtagtgcctacagtggcctttttcgtttgtccaaatcttggtagaattataagcaaaaaaaaaaaagttttttccctgttgtatgtgtagtttatcccttccccccacggttgtaggtcagtaggtgtagcaatgatcatccttttgcttttgcgtagctttcatgtcatgactgggtacaccattttcttggagttcatatagttcagaacttcgcgaattgtgcttattaagacgtcggctaagtacgtttcatatgctctacactttcccgtctcaataattgcccccccccccccccccccggcatatgtatgttaattttattt

SEQ ID NO: 197948 - DNA, 576 bp, Zea Mays
tcggcctcaaaaagattgttacctaaattcagttcagttaacccttgcgcttcacaaatagattcaggaagaccaccagtgaggcgattggagaacaaatctagagatagtagttgccgagttctgaactttgttggtaggtttccagataaagagtttagagagaggtccaacatgctaatattttttggtaacaatgggatttcaccagtcaaattatttgaactgagatagaaccactccaatgacataaattccatgttctttggcaatcttccatggatctgattatgggagatgtccaaatgggtggcctttgagaatgtagtactgaaccagtcaggaagcttatcgactagacctgtgcttgagatatctacccaaaggatattcacttgaaactgaagccaactaggaaaccgagggcctatttggcattgttccagttttgcatcttctaaactgaacgtagggaaccattcagaggaaactgcaaagctcaaggaattcccagataagtataggtgcttcaattttgctagtttcgcaaagtgtttttctgtgatactaccattc

SEQ ID NO: 197949 - DNA, 233 bp, Zea Mays
attggcacgaaggttacaatcttgggggcataaggcggttggaaatgtcaattctcagctggggctggctcgcgaggtgctgcacaggttggaggtggcgcaggacagcaggctgctgtctactgaagaagtatggctgctgcagaaattgaagcagcactgccttgtccttgcttctttggagaggacagttgctcgtttgcgttcccggttgcattacttgagagatggag

SEQ ID NO: 197950 - DNA, 390 bp, Zea Mays
ttcattttactatggtttggaaactaaaaccttttagttttggtgtttaaggttagggtttagggataggatttggggtctaggtttccataaaaacgtgtgctatagctcacttgtggcaaaaaaaatgccataactacttccccgatctataacgtaggtggtaggtcgcatacatgacattgactatttggccacggaaacgtgtgctatagctcgtgggaggccaaaaacacctttaaggtgctctagggaccaaaacgcgggtggtggaacgcgtacataaaaatggtcgcacgaccatgaaaacgtgtgttatagcttacgggaggccataaacagccttaccagtctgagtggccaaatcatgggtggcggacgggaggcata

SEQ ID NO: 197951 - DNA, 287 bp, Zea Mays
ggcacttaatgcagggccggactacaatggttacacaatgatcaaacagaactatctcgacctacaaacatgttgccacgcaagagcgcagaaatttaaggacacggtaaatgttgtggtcgttggaggcaaggctgtgaggaagcgattggtgagagacccatcaaccaaagtacagcctcgtactatgagaccactgcatttgctctagggccccaacatccgagcaccccgcagagaacctgcgggtatttcgaagctaaaaagagagcttcccccaagtggca

SEQ ID NO: 197952 - DNA, 1354 bp, Zea Mays
tgcacaacatcactgctaccttctctgtcgatccctcgatctccagacaaccccgctcgcctctctccctgctccggtccccgcccgcctctcgctcgcgacaactccgccgcagcacgcggcggccgcggcgagatgctccgcctgcgggcgttccggccgacgagcgacaaagtcgtgaagatccagctccaccctactcacccctggctcgtcaccgccgacgccaacgaccgcgtctccgtctgggactgggagcaccgccaggtaccgcttgctaatttgatctcgcaatacagaggcggcttccaggctttgtttgtggctccatttagtctcacggtgctttgtaacccgttaggtgatctatgagctgaaggcaggtggcgttgatgagcgtcgcttggttggagcgaagcttgagaaacttgctgagggagatggtatgtggtgcagtacatctttcgttattattggtggtttgggcatgtcatgtggttgttgtgcatagtggtaatgctattcacactgttgaattgtgacatatgattgttcatttgttaaaattggcctttatttactagttggcacgagttgaatttatctgagtgctgaaatgtcatttctttgtccttgtaaagctatgctacgttgcttgatttcttgtagagatatgattgcgttcaatttgtacatcttagcgtattaagtatgggtttgatatcaccactaagtttatgttttaaacatctttcacagaacatacttatctgcaacatgcttaacaccctatcctaaatgtaaatcttgacccttgttgaagctagctgtactgttatttttgtcattcctggcttcacatttttgctgtccccttcacttccaatatccatgagatttatcgttatgtttattatcttttttaagccagaccagtggaagtaatatgcgcttctcgttctacccatttgcaaccttttgtgcagattcaaaaggaaagcccaccgaggctattcgagggggaaggtatcgatttgagtttttggccccttaattatgatgatcatatgcttagcaccttcacctgactccctatgggcctactgttcttccccaagtgtaaagcaggtttccttttatgatgatgatgttcgcttttggcaacattggcgtaattgctctgctgctgctgaggccccaactgcagtcagtcagcagtcttccacgttcattgcacctgcaccttcgacacgaggaaggcactttgttgtcatttgttgtgagaacaaagtcatatttttggacttggtgactatgcggggccgtgatgttcctaaacaggagcttgacaata

SEQ ID NO: 197953 - DNA, 392 bp, Zea Mays
aacttcccaaatttctacataatttgaaatttgattgaatatatttttttctcttgtgaagatatccaaattggagccagtccattgtttgttttttctctggattcactacacaagtaagcattcgacacaatctatcaagaaagatcgcagagatcaacttaaggcttgaagacatcattaacaataaggagaaatacaagattgaagctgcacccaatgattttccattggtgacatggaaaccttctacggacatctctactgtggcaaaaagtttgtaagttcccacaacactactctctaaagtgtcgttcgaggagttgagtgtaaatagaactttgttaatgaccgctcaaacatgtacaaatattcaaaccatcatgtcacgt

SEQ ID NO: 197954 - DNA, 450 bp, Zea Mays
gcgtaagctgaattctgcttttatcactctaatcccaaagaaagatggtgctgatcaggtcaaagattttagacctattagccttgttcacaactttgcaaatctaatcaccaagatattggctactcgcttggctttcaagactcaacgatttggtctctccaaaccaaaatgccttcattaagggtcgctttatccaggataatttcatgttggttcagcaaacggctaaatttctacaccaacaaaggcatcctcgtctgatgatcaagctggatattactaaagcttttgattcagtctcctggcctttccttattgaggttatacaaaatctaggttttgggcagatctggagagatatcatttcagggctgctcctcacttcctctactcgggtgttagttaatggtcacccgggaagcctaatttcacataaaagaggtctgc

SEQ ID NO: 197955 - DNA, 1408 bp, Zea Mays
gttttccacctcttccaagaacccctctaatctgatccagaaactttcaaaatgaaatcttctttttccttggacgagatcatgtagccccaatagtaatggacaatgatcagaaatctgggatgcagagctctgcaagagacaatttggaaacatgtcctcccaatctgctgtacagaaaatccgatccaggcgaaccaaagtaggtgaggcccgttcattggaccaggtgaacttcctacctgaaaggggcagttcctttagaagcaagtcattaagcagccgcctaaaccttcccatcatagctctatcaagattgtcattgctcttgtcctcagctctatatattaggttgaagtccccaccaatcatccacgaaccgaggcactgagatcgaatcaggcgcagctcattaagaaattgaattttatgctcgtcgagttggggaccataaacacccgtaaaccaccaagccacaccatcctgctgctggaattgaacagagactgaaaaattgtctattctagtttggagcatcttgcagaccgaaatcctccaagccaaaataattcccccccgcgtaccagccgccgggagaacaacatactcttcaaaatcagagcctaacagagagagaatcatatgccgagaaatggatgctttctttgtttcttgcaaacaaacaatatcaggcttagtgttatcaatcacaacacgcactgagtctcttcttgccttattgttcagaccccttacattccaaaacagaacctttgaaggatccatcggaaaaaccaaataaaaccactaggtgctgctagaacagcaaccttactcaaggtcttctgggccttgcccggcgatacacaacacattaacaggttcaaaaacatctgggactgtccatccaaagagggctgacagtgctttgatatgagcttcagagagtgagtttttgaacaagttgccataagcttcaagggctttaggacttaacaactctccatcgcaaggcacatccaggcttcttatcaggtcagcttgaatctgtcttcgtgcatcatttgttttattatctcgctttgccaggcgactgcttctgcgtgggatgaagtcagatggaagttgcttggatcgtcttctgtgggggagtggtggagggagcagaccatccaccttcctggttactttgtcaacaaaagcttggactgcatttccaataccattctattcttgaggagaagaggcttgatttggctgaagggcttgagaatcatacttttgccacctgttatcagctgtcctcctagtataaactttgagggacgtactgccctggccagttaaatttttattctgggctgcaactaaactgagggccccagcaggctctggagggggcgaaatt

SEQ ID NO: 197956 - DNA, 400 bp, Zea Mays
caaccaaccaaccaacccgcgcacccccgaaggagaagagctggggtcggaggccccaggtcggagctgaacgcgcccccatctcccgtcggcgagaagaggtactaccgctccgcggaattcccccgctgcctccttccccagcggccgcatccctcgtctctctcgtgagtgtttcgtaatttcagaccgcgcacagggtagccagcgattccgcgggcgaggcgagaacgatcggttcgatctcccttgatctttggtgtgctcgcgtgctgtgatttcatttcgtctgacactagtaactgctacacgatagtgtgtatcggatgctaggacgggagattacgtgcgtacggtatctcttgatggcgttgctaggaatgggatagtaggatctagg

SEQ ID NO: 197957 - DNA, 264 bp, Zea Mays
aatatctgcaatttaataaatttagatttcatacctttctaacatccccatattgtgttccttcacaatcatcatttccaacaagcgtcatttgcagttcagattgatgatgtgcatcaatatttaagcctccatcctactcattagtgcattatagtcaatattacaaataatgtataaatcatcccatttgtttgcactatacataaattacattgtttttttgccataatattacatgttgtcgtgaatgtactgccacat

SEQ ID NO: 197958 - DNA, 496 bp, Zea Mays
gagatttgcaaaatacagcaacactctgttcagggagactagccttgaggtgaaccgcgaacagttgactcccaaggagaacgacaaactcaacaagtctatctccacctaccttcgccttctagctggctatttgcatcttccctctgccctcaagacccttgaataccttatccgcagatacctgtatgaatttagctcagctaattttgccgatggccctacgagctctagcttattctcttgtttctggtgggaaccttcatgtagggtgcatgtatacaattcggatgagttgctgctgagcgcactgccataccatgatacacatgcgtttgttcggatcgtgcagttggtcaacttagggtgagtgtggctctggtctggatagatacttattttctccatttgtcttcaatatcaacttgtgctggttgatgtgctttcaggaatagtaactgggcatttcttggcggtgtcaagtcctcaggtgcac

SEQ ID NO: 197959 - DNA, 249 bp, Zea Mays
atttttaaagtggccagaaaaattctagggaagctagaatgaataagctccactcccatccacctcaaccaaccttccaccgccaacctcagccttgctgccacccacatctaccatgcccatacccatccatcagatacccttcccacactccccatcaccaatcccaggcttttacgaaccccaccataccgcttacccaccatagcaaaaccctcccaaccagcaccaccacaaccttccctttcc

SEQ ID NO: 197960 - DNA, 263 bp, Zea Mays
ccggatgtggcatgctatgcacggatcatgcatgaaaataggactgggtgcagtaccatgtgtagccaacaggccatcatgtctcaccacctgcatgggaaaacacatccgcagataccagtattggataccccgtagatactccgcagatacatatacactcttgaggatatgtatcccggggtgtattgaaggtttacttaatttctaaatactgataagaatagcctagaaactttagagcacgtgtttttttttggttt

SEQ ID NO: 197961 - DNA, 229 bp, Zea Mays
caagaagaagcttgtctcaggggacgccgtactatttttgaggtaggccacagctaacattggagataattatcacatgttggtgttggccctttctgaagattcctcataattttcaggggtgataatggggagctaagacttggagtgcgccgtgcagctcagcttaaaaatggatctgcttttccagctctttataaccagtgcttaaatcttggttcactaccta

SEQ ID NO: 197962 - DNA, 1063 bp, Zea Mays
aggcactaagggctaaggagattgatccaaaatctcttatcgtggaggtactgcttctctgcattaaactcattggtagttggagacttggagttccaaaagctcccttaggctgtctagatcctttatttagtattgctctatattatttaatatgatatttctgtttcacctgtgttttttggtaaaatttatgtgcttcctgaggtgtacaattcacttcaatcgattcaatttgtctgctcataatctttggagaattttttcttcaggcatatgagaaaggattgatgattgcggtcataccattcacttcaaaggtgtccattcctgctaactttttttgtaaaatatttctccaaagattacaatatgattaaactagctcaaagaaaatccaattattaacttgggtgcatcatgagtcatgaccattggctgctctgcagtccttgaaccttgccagtcaagtatcgcatatcgacctccaaatccctggaccatgggaattctaagtctacttgctgaaatttataatcttccaaacctcaagatgaatctaaaatttgatattgaggtcctcaacattccttttttgatagtttctttattgactttgtatctgccctagctacccatggccatgctaaatgttcttttgggatttcaggtgctattttaagaaccttactgttgacataaaggatgtgaaaccaacttccctgctcaaagatcgtctacgcgaagtcgagggaaatccagatttttcaaataaagatgttactgcatctcaaacctctgtggttgcagaagtcccttcagggaccatcccttcactaactcatatggaacaacaacctgagatcaatatcacatcccgagctatgagccttccaaatatacttaatcaggttggctttgaacttctgtatcgaatatgtggtacactcttctgccattatagttggaatatattttctttgcagtatgctgctcctgtctgtctacctacaaacaacacggtagaagatgacaaagttgctctgatgatgcctgagcaagt

SEQ ID NO: 197963 - DNA, 687 bp, Zea Mays
atggaggttagcatcgaaggcgtggaggaggaggcccttgtgtctgctcaggaagagatcaaggattgccgggcagccttgttgcggtgtgaggaggagctggaacgcatccaggaacagaaaatgaacctgcagaaggaggttgataggctcaccgagctcgctgagaaggcccagttggatgcatccaaggccgaagaagatgtcaccaatataatggtgttggctgagcaggcggtggctcttgagatgaaagccacgcagcgtgtcaacgacgcggaggcggtgctgctgaaagcggagaaggtcatatcctcggttgacaccgtggtggagctaacatcacttgctgaagagcagaaaagcgctgaagaggatagcgtttctgaagggtatgagtatagcagcaatggcactgatgatgttcctgtgagggatgaggtgtcaagtatcgagcgtctaatggtaggtgacttgactgttgagggcattgagcagcttgaaccatcccgtgaaatatatgatgaagcaagcagcgataagatgtccgttgagcctcagaaagaagctgagcctgattcagacaagttgaagcaagggaagaagcaggaaatggaacgaaaggagttcaccaaggaaccactgagtgctcaaaaatcactgaagaagagatcatcccgcttcttc

SEQ ID NO: 197964 - DNA, 268 bp, Zea Mays
cttcataatcattgcatctacatatacactttccagtgtttgtgtgtgtgtgtttgttgatggaatcacaaacacacagacaaacatccagaggggagggggagagggagaggggggagagagttagggagagagatgatgatgatgatggaaaaggcgcagcagcagcagcagcaacagcagcagagcatcaaccagatccagagtggccaggcacatccattaacaggaaaagtgcattcagatcatcacacttgatgcaaattac

SEQ ID NO: 197965 - DNA, 281 bp, Zea Mays
tgcagattgagctagcagagagagaaacgctaggataaccttgcttgagaaagctagtgcggtgagtgcccctgcacctacgtagtgtgcactttgtgagggtttagggtttagtgcatgtctttcgttgtgcctactatcccaacacctctgacaccgctcccaacaagctctcccctcgctccacccattgtctttttcttggttactcctctgaccacaaggggtaccgctgccttgatctcctcacccactgcatcctcatctctcgtcatgtcgtt

SEQ ID NO: 197966 - DNA, 280 bp, Zea Mays
ttccgttgtgcagaaactatgcttgatattgggttttcttaaggaactgctcacaacagtgcgcttgtcagatagttgtattctgcaattagcgaaaacatgctttactacgttcttggtggataattgaaagcgattggggttatttgcacggtaattttctgtctatgctcaatcttttttatgcacgttcagttttcaaagaatttgctcacattcaaatccttgtgcaggtgttttcatcatacacacagcacaggagttacttggttgatgaaac

SEQ ID NO: 197967 - DNA, 688 bp, Zea Mays
ctcctgttccgtcctactcatcttcaagccactcttcctgctcccgccatcctcatacctctcgtgcttggaatcatgatctttcttgtcccactcccgctccttctgcctatcacgctccctctcatgctccctgtcccgctctcggtccctatctttctcacgctcccgttctctctccctctccttctctcgtgctctttccttctcacgctctctatccctactccttcccctatctcgctccttctgccgctcccattcttcccccctttccctttcgttctccctatctctgttatccttataatgcccggtactctccttcctccccacatccttctgtttctctgacctccgtttcccagagtcactcttagacagaacctcctcagccctgtcatccacagccactgctcgtctgcttgacctcttggactcatcccctgatcccctggacctgtcggccagcttctccacttcagcatgcccaaaggtctcgctcttggacctcttgtcgaccaggtgatcgtcacagacgccactgttccaccggtcgctgaccacatcaaccacggcctcctcaaccctctccttcctcttcttcccgtgctcagcgtacccgttccctgatctcacggcctcctgtcccgaggacgagcggcgcctctcaggctcgggatctctg

SEQ ID NO: 197968 - DNA, 463 bp, Zea Mays
atataataaactcgtttggatctgaggcgttaagaacgctctgtatcgcgtttaaggatctgggtgaaattcctgacgaccaaacaataccagaggatggttacacactaatagcgctttttggcataaaggatccagtccgtcccggtgtgagggatgcagtgatgacctgcatggctgctggaattaaagttacaatggtgactggagacaacatcaatactgctaaagccattgccaaggaatgtgggatattaaccgaggatggaatcgcaatagaaggaagagagcttcacgataagagcatggatgaactgaaggagatcctgcctaaaattcaggtttagttcaaatttcgtttgatgtttgttttactaattgattttggtgatccacttctcaagcaatgcccaaacctatttcgtgagtttaggtaatggcccggtccttgccgatggacaaa

SEQ ID NO: 197969 - DNA, 549 bp, Zea Mays
ttgaggtttaaaaggtgatctattgttttgaattctttatattccaactttttagcaactgtatggtggaaacctgttatcacaaaaggtcattagctagcccaataacgtcttcatccactagttgtactctaataccctctcgtgcgaatacaatgcccacaatatcatagaaacgtcatttgaggtttaaaaggtgatctattgttttgaattctttatattccaactttttatcaactgtatggtggaaaaaagttgccttacaaccttaacctatgtttggacagttctctcgtgcaatttggctaaatttcccatggtctttattttattttgagaaacgatgtggcaaattgatgtgtggtgcatccactagttgtactctaataccctctagtgtgaatacaatgccctcaatatcatagaaacactatttttagtttcaaaggcatacctaaattgtgtttatgtccactcaagtaaaacaccacacatcaatatgacacatcatttctcaaaataaaataaagactatgggaaatttag

SEQ ID NO: 197970 - DNA, 261 bp, Zea Mays
ttcagggaatgaggtcaggaggcagtggggtggaccttgggggcctcgtcgatggcagaggagagctcggagaggaggtcgaagcagagcagcgcgtcgggggtcttctgcctggccgatgccactacggactccagctgggccaccagcgcgccgaaccgcgacagcggtatgggatccccgccaccgacgcccttcgccatgggagggtaggggcctagagggtgggagagggaatgcgtcactggtgctcgagtgttg

SEQ ID NO: 197971 - DNA, 552 bp, Zea Mays
tggtgtcaggttatgccactgggaagtgttctgaggaggcctttgagctcttccggctgatgcttcagaagtgcccattggagaaaaatgagtttgtaaccacagcagttcttagcgcagttagcgtgccactgggtttgcttatggggacgcagttgcatgggctggtattaaaggatggtttggtgggatttgtgtctgttgagaattcgcttgtcacaatgtatgcaaaggctgagtgtatggatgcagcaatgagggtgtttgggtcatctaaggagaggaactccatcacatggtcagcaatgatcacagggtatgctcagaatggagaagccaattgtgcagctaggatgttcctacagatgcattcgtcaggatttacgccaactgaattcacctttgttggggtactgaacgcatgcagtgacatgggcgcattagtggttgggaagcagacacattgtttgatggtgaagcttgggtttgaaacgcaggtttatgtgaagagtgcactggtggacatgtatgccaagtgtggttgtattggtg

SEQ ID NO: 197972 - DNA, 717 bp, Zea Mays
caagcaatgctaggatctggttctatggtgatgatgacccaaaagagcggctgcgcattctaagtggtaagatgcaaatctaaaagcaaatactgattgtattcgcatggctgctgttttttaaccacctttttcatgatcctccaaatttcctgtttcttatccctcttataatgtctatccttttctttccccttctctagaataccttgaccagtttgaagccaaccctgctcctaatgaatcgaaggtttggccacagaggctattcaaggaacctgtgagggtcatagagaagtaccctgctggtcaagaaggtgatttgacaaagaaatatatggtgtgcatcaattggcttttgtcagaagagccattagatgtagaaactgagcttgcacttggtttcctggatcatctattgctggggactccagcttcaccacttagaaggattcttcttgaaagtggtttaggagaagctattgtgggaggtggtgttgaggatgagctccttcaaccacaatttagcataggcctgaaaggtgtatcagaggataatattgaaaaagttgaagagttggttatgcaaactttgaataatttagcagaggaaggatttgcaacagaagcggtggaggcttccatgaacacgatcgaatttagtcttagggagaacaacacagggtcattccctcgtggcttgtcactgatgcttcg

SEQ ID NO: 197973 - DNA, 727 bp, Zea Mays
gctctaccctgatactgagtcttgctctgctgactgttggaggatggtgccgaggtattcttggggccattcaccgagttggagtaagtaggtcctggtgccttcaactgggggcagttatttttgaagtgactggggtctccgcagtgccaacaagcatttgctggtggttgtttgcttgtgaccgagggggcctgaaaggagctctgactctgctggctgaaacgtgatggagtgggtctagctggtctattgaagcttggtcccttgggtggaaacccgaaggatcgagctctctggtgccggtcttgctgctgagctcggagaacttgaaattttctcttgaggtgacctttttcttcttcctttgccctttccacttgtatggctttattggagaggtgcgagaagctgaggaaatcttggctggcaaggatggtcttgagttctggtcttagcccttttagaaaacgggccatcctcttggcttctgtgctgacatcgtcaggcgcatagcgagctaattttgtgaatttgtgcacgtactcgctgacagatcttccaccttgagttagttcccgaaattcatcttccttgagctgaacgatcccctggggtacatggtgctctcggaaagcagtttcaaattctgcccaagtagcatctctgacggcagtgctgaaggtatcctaccatgctagggccatcccggaaagttgatgagcag

SEQ ID NO: 197974 - DNA, 856 bp, Zea Mays
cgaaaatgagcttcctgaaaaaattgaaagacttgtaagatgtgaggcatctgcttatcagaaacttctcatgacaagggtggaagaaaatcttggtggaattggagccgttaaggtgtgtatcatcttactgttctgagttgtgctagctggtatgttttattgatcatttcctaagtatttgaaggatttggtccttaagatactactttattatctttaggttcgctccgttcacaactctgtcatggaattgaggaacatatgcaaccatccatacttgagccagcttcatgttgaagaggtagaatacatcttccatttcttcctcactgttgttgttgttgttgttatttttgaatccttatgtttgccatcaacaatttgggttctctttatagattgagggctacctacctaaacattacctaccatctattttgaggctctgcggaaaacttgagatgttggacagattgctgcctaaactcaaagctacgggccatagggtgagtgtatctggatataatttgacttgtaatttgattgttcatttttctctctagttgctggttgaactggaatgttcttccctctctggtcccttaccttttttcgtgccttcgttccttttgtggtgattactgattagttctggatcactgatggcaactataatcttccaggttctacttttttctacaatgacaagattgcttgatgtaatggaggattacttggtttggaaaaagtataaatatcttcgattggatgggcacacttctggccatgaaagaggagctcttatcgataaatttaacgatcctaattctcaagcattcatttttcttcttag

SEQ ID NO: 197975 - DNA, 350 bp, Zea Mays
gacttgtaaccttgccattaaacttcatcctagacttgaaatacaccatgctatcatcttgcaacctagaagcatgtatacgccatgggcagccttcagcagcgcaatccgcaatgggctataaaccttgtcttatctgtcttaagaccagcaaattcaaaaccatttgtaatagcgaagtgcctaatagcttttctaaaagtaacaatgtcagggaacaatgcaccctgcctaatgtctggtttaagagggttatgaagcacaactacagcttcagggtcagcatcattcaactctgcctctggaataggtcctccagtagcagctggtgttgtttcattatcaacatg

SEQ ID NO: 197976 - DNA, 290 bp, Zea Mays
gccttcttctcgtcgaacggctgctagtcagcgccacaccgagaggagaggatcctcgatgtctgaggtaccctaggggttgatgccgaggtgccttggggtccgaaacatgtgcctcaagggtagaataggtgtccgaaggcgggaacagatgccccaagtggcggaacaggtgcctcgacggagggaacacgtgttcgaggccaggacaggtgccctggcggtgggaaccagtgccctaggggtcgagacaggtgctgcggaggcgggaattggtgccccgagggctg

SEQ ID NO: 197977 - DNA, 273 bp, Zea Mays
agtgatacaatatatcctccaccaccctcaccactaccatgacatgagccccatggttatgattacttgtatggttcctggaaggcttctccaaccccacaccatccatggatgccctgaccatgaggtgctaccgctactcacctagtgtcgccatggttccgatgaggaagacctcgaggacgacgatgacgagagcctccatctccacagatggctgctcgagttctgagcccaagaagaaatcccactctgtcagcttcgctggcaagg

SEQ ID NO: 197978 - DNA, 456 bp, Zea Mays
ctgtcctgtggtcttccaccattcgagcgctgattctccagacttctagtgaggacttcaatgagtcgggtttggttggctagaacttgggctaaatctaatggcagctccggaggtgcgaggaggtgggtctcactcccctctccaccggcttctccttccgctcctaggggaaaccctgctccaatcccggaggcggtaggcgtggttttatccgaagccatctgccagggaaaaagagttactactatgcgtatgccaaaaaaaattcaaccaagttattttattcattacacaagttcattacaagcatacagttgccacaagtcgcactacccgtgggtgctatctaaggtactcccgaactccttttctaaagtgtccgcaaattccttgaggaggtcatcaaggcaagctagggacatatcctcggtgtcggacgagttctctatcctg

SEQ ID NO: 197979 - DNA, 215 bp, Zea Mays
gccaacactctctagttcgccaagcttgtcgatcaccgaggactgatcgtgttgtattgacgagagagattgggcctatcgggtgggccagtgtcacgacgatgatgagcggggtagggcgctagaaagggagtggggtcaaacaacgtcacatgtcaggaaggggtggcatcgaacggcgtggcaaacagggtgtcgaggcagactgcctcgag

SEQ ID NO: 197980 - DNA, 1248 bp, Zea Mays
atgctgaagcaatggataaccagatgcagggcaaggagaaattggctcaaagtggagattactatgatgagaggaaagtcaatattgaaccagacatcaacaacttgctcattcatgtcaatgaccatttctctatgttggtgattggtgcggattctaggcgaagtgatgttgtgtgggacgaggacatgttatctgacctcgatactcatggtggcttattacagttactggcatgttgtaaagatgatgagctcaaccaggacagagacactccttttctcttgggccttggtatggatcaggtggatgagatgctggccagcccgtccagccttggcatgaatgaggacttgccatctgtacctgagacacatggctcgttattgcagcaagtggcatgggacaggaagcactttgcttatgaaatgtgcacgcttattgctgagatggtcctggaagatgttctcaccgatgttggcaacctcgctttcagcattgattcaagcatgcagatcagtgatcaaccttccaaatatgcgctagtcatcgatgcttatctgctgaagacgcagtacaaaaaaccatacatttctataagccaatgggatccaggaatttggtgcaaaggtactatggcccatgagcagcaacagcttgagatatataggatgtttgagaaacaatgggattcagttatccttaaatggttcaggaatccttttgtgctgctgcaatcatgcaatggggaggatctgaatgaacaaggcacagtgcctgtaaatgacattttcgatgtattggctgctggccaggagttgaattttggcaacgtcaccttgatcatttatgggggatgccaaggagcaatgggtctgcaggttctttttgcagaattacacccttggcaccacaatgtctttacctccatagaattagcaatacagtcatggagaatcaatggtttcagtccaggaagctgcaagctcaacagacaatctatacttgttgctactaacttgcagttcaattataaagcttccaagtttgtatcctttactgatacttatcagatatacaagaacacatgcatttgtatcggagaattggaacctgctagttggagagatacttgttggctacctgagatctcacatgccaatgtgtccacacttgctagtgaggaaatagataacatgcttttccaggttggtgattttcatccaggagagagtgagcagcttgagc

SEQ ID NO: 197981 - DNA, 582 bp, Zea Mays
ctcgactctccgaggcacggccctgcctctccgcctcgactctgtggtaagcatcgcggcgagggagctccgatggccgggaaaaaacggacccagactgatcgcgcggttctggaggcggtgcctgcctcggacgctatccggaatgaggctgcagctgcggaggcgccggcgaagaagaagctggccatggagcggaagaaggagcggaaggagatggataaggagcgccaccgccagtcggccgaatttgccaagccccagccgccggcagcggagtctgcggctcctgtgaatcccccggccgctccggtggctgtgggaccgggactgcacatgaacgtgttcagagacctggcatcaccagaggcatcggttagagaggctgcagccgaggcgctggtggtggagctccggcaagtgcagaaggcgtacgagaagagcgcgcggaatggggagagggatgctggtgatggggatacgcagatggaggctgagaaggacgacgggctggataactgcgccccatcagtgcgttacgccatccggcggcttattcgtggcatctcttcttctagagag

SEQ ID NO: 197982 - DNA, 315 bp, Zea Mays
gctttatatttagccaggccggcgtaaccaacccctatttattctctatacttatctaaacaacttcctaacaacttatccctatttgctagcagcggccagctctgatctgttgctgcacgtgagcttatcttctaaacaaatctcctattttctagctactagcaactactagctattttcatacctgggtcttcatctgggtcttcatcttccactacaccatcaaatccaacatccacacctgatgttctcattcccattacaaatccttctacttcagcacccacttcaaactttgcatctaaaccacca

SEQ ID NO: 197983 - DNA, 216 bp, Zea Mays
ccaacccaaaccggcaaaccccagctccaagcgaagcacagctcccaaagttccaagtcggacactgtaggcgcggcgcccgcggacacccatactgcgctcaccgagacaccgacccgcgatcccgacggcagctcccctccccctctccaggtctccactgtacgtctgaactgcatatcgcgcacgccgctccggtgctcccctcggcgagcg

SEQ ID NO: 197984 - DNA, 335 bp, Zea Mays
cctcgcctagccaagggggccgtgttgcacttataagggcgggcctccctcctctctcagcctaggttttgagagcgaggtgcctgtctgaataggctgcgcgcgagcgcatgaacgcccgacgctggtgatggtgggctttggcggactggcccagtgggtgcgttacaaatggtatcggagcccacattgccgctgctgcctgggagagctttgggcctcttaggggggtgggatgtaaggggccggtatgcatgccctgggttagtaccacctcgcctagccaagggggccgtgttgcacttataagggcgggcctccctcctctctcagcc

SEQ ID NO: 197985 - DNA, 663 bp, Zea Mays
gccaacaacaactacacccgctggcgtaatgtgttccttctcgtcactggcaaatactccctggacagccacatcctcgacgacactcccgcgcctcacttccccgactgggcacgcatggactgcattgtcaagtcctggatctccggctccatctccccggaccttgctgaaatggccatggaacgcggcgccactgcccgcaccacttggctgactctcgagaatcagttcctcgggaatcgggaaactcgcgccctccacctcgacgctcagttccggcacttcgtccaaggtgatctacctgtctccgattactgtcgccgtttcaaaaccatggcagatgccctcggtgatcttggtgaaccagtcaccgaccggacgttggtcctcaatgttctgcgcggcctcagcgaccggttctccgacatcgaccgtcatcttcgcctcggtcgcccctttccgacgttccacgacgtccgggccactctcctgttggaggaactcacgatggcccatcgtgcgtcttctccatccgccgccctgcttacctccaccaaacctccacaaggcgggacttcgatggcctccaacaaggttcctgctgcttccaacaaggcgccttcggctccacgctccggccaccccaaccgtcgcagcaag

SEQ ID NO: 197986 - DNA, 407 bp, Zea Mays
accaggaatggaagggggtgtggcaaaggctcctgcttccttggaggaaaacaagtcctctgctgatgaggatcttggcagagggcctgccttgactgggaagaaaaggagggactgcaggggttctgcggatgaggacagaaacgtgacaaaaagggtgttgagatccgacgcaatgaagctgcgggctgaggctgaggcagcttgtgtggtagctgtggaggttagtaaaactgacagtttggagaggaaacgctgtgaggctattgtggaggctgagccttgtaatagcaggctgctgatggaagttacttgcaatggtgaggaagccaacgaattggttaacttggactccagtgacgtctcggaagagtcagctaggtgttctgagaataatatgggaatgc

SEQ ID NO: 197987 - DNA, 365 bp, Zea Mays
gagcaacaagaaggaaagatcaaataaggcaaactacgaactcatcgggatgtgatgaacgtggacgtctccgacagcaacatgctcatggatgaagtgaagatgaatctcaacatgctttgtatgctggtgttgggcgaggttgacgaagaggtagacggtgctgacgttgtcgcaatagacaagcatgctcctggtgagggctatgaaactcctgaaggagatggcgcaactagctcgtctcagacaccacactagcgacagcccggtactcagcctcagcactgaagcaggagaccacaacctaacgcttggaggaccaagatatgagcttggcctaagaaacaccgtacaaccggagacag

SEQ ID NO: 197988 - DNA, 267 bp, Zea Mays
tgaggtcaaactgccattaatcctctgcctcccattccacatctgttgctctacttggcgtgcgccgcttagctccactctactcaaaacttgacagtcggcaggacacgagaaggactaaggatgatgagaggaagaggaccgattgatcgaggactgattgagtaaatggtagaactagttggtcacctaactgtcacctagacaggcgtccaaacgccctagaggtgactcagtaagtcacctcgccagggtgccgtgataacc

SEQ ID NO: 197989 - DNA, 372 bp, Zea Mays
attccattgggttttatttatattcatagtattaaagtcttgtacttacatacatagctcagctactaatggggtgtttaggttgaggaatagagtgatccatcaccaaactcatgatattattgtttggtttggtatggaatgggttcatcaatcactacctcatggctcatgcacttcattgggattgagtcatctcgtcacattttaaggggcaaactcatgatgaaccactctcgatgtaggatgaggtgatcccactatccaaacagcccctgagtacaagtcctatgccagaatattcattatgacttgtgagcatgatttaggctactgcagataacctaaataatttgcactataatacatcag

SEQ ID NO: 197990 - DNA, 418 bp, Zea Mays
ctcgatgagtgtgctaagagacttttctgggaagacttagatggcatggttagagctatacctattagtgagaagcttttcatggggggcatgttcaacaagtgcagatttcgagacgattcatgaaggttttaggtatggttgtaggaatcaggagggagagaaagtcttgggatcaagttaaactaattaccagggaattaagtcgatgagccatactatgaagctatggggcaattattgagcattatctgagaggaataacaaggatttctatgaaccaatttggtttcatgcccggaaggtcaatcatggaagccattttattaataaggcaagtgatggagcagtattgaaagcacaaggacctacccatagagaagacttatgacaatataccaaagaatgttatgtggtg

SEQ ID NO: 197991 - DNA, 365 bp, Zea Mays
atatcctagagaaagccaagatattgcaatatgtaagagtgaatgatgtaaggacaactcgatatgtatacaatgatatgtttttcttcaaaagatctcaaacttgacttactggtatttataatcgtgacagtggtttgaaaatgaaaagcagaggcttgggcatcttcgtgaccgtgcaagtgaaactgggcgcagaaaggaatatcctattgactatactatggtgtggtgatgcctttattatcacttatattgtttctcatcgactactatgccgctgaattgctatttcttgattttatatcattatttgctcgttcccaaaaattggatcattatttaacttaggcaattgccatttt

SEQ ID NO: 197992 - DNA, 326 bp, Zea Mays
caaacatggcctaataatcattaacagaatgactaggcaatgcaaaaataggtctttatttttccagataattaaatattcaatagagaaactaacaaacttcccagttccagctggcacactgctagactttcttcatgtggcacttccagaaaaattatgagatctattgtgtagaactagttctttgtgcctctgcgaacccaactatcgggtaccataattaagggtacccagattacatccctaatcgtaccaagacacccgagtaccaggaaatcacagggcaaacacgccctgacctccaaggtcacgcaggaccaagc

SEQ ID NO: 197993 - DNA, 613 bp, Zea Mays
tgaggttatgggcagtgctggaaaacaccagctattaagttttatggatgaacttattcctaccattcgtactgctctatgtgacaggtatgctttcttgcagttctttcattgtttttatctgatgttctcatctaaccatatctatctaatacttacagcacccattctgatgttctcatctaaccatatctatctaacacttacagcacccaagaggtccgtgaatctgctgggttagcgtttagtactctgtacaaggtatttgagctcaaacctattctgaatttctgatgttacagatgatttgttattttttccttttaaatttttttcttattcaccttataatagagtgctggactgcaagccattgatgagattgtcccgacattgctacgggctttggaagatgatgatacatctgcaacagcccttgatggtctaaagcagattttaaggttttcttttattatctttttctggttgtcattaatttggtgagatcagatgtccgacttgatgtctacaactcacaaatattgaccttttgatgtgattctacagtgtccgaacagcagctgttttaccccatatattgcccaaattagtc

SEQ ID NO: 197994 - DNA, 234 bp, Zea Mays
catcgaccacaggatgcaaccgagtcatgattcgaggtcatgagggagcaatatagtgttttcatcaagtcaaagctactagcatgtatctcctgttcaggtttgcatccagtatggagactagctaccacatgaggcatgcttgagttcatgtgcggggaaaggtccaaaataacaaagttagtgtttagatggtttagggcctggtgcggtggtagagcctaccgtctgtaa

SEQ ID NO: 197995 - DNA, 293 bp, Zea Mays
catgctattcatattttgagccaatttgtatccacaccgacctcagttcattatggtcatttgcttcgtgtgcttagatacttacgcgggacaagatcaagatgtttactctatgcctctgatagcccacttcagcttcatgcatattccgatgccacatgggcaagtgattctgttgatcgttcttctactacaggttattgtattcttcttggatcctcacctattgcctggaaatccaagaagcaagcggccatatctcgttctagtgctgaagccgagctccgggctct

SEQ ID NO: 197996 - DNA, 272 bp, Zea Mays
tcaaccttaatgtgtcctcccccatcagctccaccctcgccatttttcctgaatgtaccttgcacgagtctcgtctgcgatatagttcccggtgcatccaatctctgcaatatattaagacaaataagttagcaacaacaacaaaaattaaatgtgcaagagaaaacaacgcatgcttttctcactcgcactcagacgaccaacaagattccccaacatctatttctcgactctagccgcctccatttctttgcatcttgtgttctcttctc

SEQ ID NO: 197997 - DNA, 253 bp, Zea Mays
ggggagggtggatctgacatgtacgagcgtggatctggccagagacaggcggtggtgagtcccacgcggtgacggtagcgaagagtccacaaccggcggggacaactcagccttacctgcaaagtcgtcccgggcagcagcgacttgatccttgggcgggctccccggcggcgacgacgacgacggcggtgggatcctcggacggctccacgggcagattccttgagagcagcaggctccctagcggcagcgg

SEQ ID NO: 197998 - DNA, 324 bp, Zea Mays
gtggtggttcaaggtcctggtcctggtccacggtatggacatgtgatggccttggttggtcaacgattcttattgacaattggtggcaatgatggtaggaaattgctcgtgtctgttatgtctagattattgctacatacagatcattccagctgatcgatgttgatagtaagactgcatcaatgtttcaggaaaacgacccctggcagatgtatgggcccttgatactgcggccaagccatatgaatggagaaaacttgaaccggaaggtgaagggccaccaccatgcatgtaagtgccccaataatactgaggaaactttac

SEQ ID NO: 197999 - DNA, 443 bp, Zea Mays
gacatggagcaggcgaccgatccacaacgtatatgtggctgctatctgctctgatgtgacttagcttttttgacgaggagaagattcatagtatgatggtgtggcctgtccgtcctgcgggttgggcaatacctaagcaaactctacattacagggggagcgagcgatggaaaaatgcgaggaaggcgattgctactcgatgtgtagtaatggtatgggagcgcacattgcggcaggctggaagacaaccctaacactgaggggacgcagatctgtgaagttacggtgaaaaagattgttcgtacctatggcaatcggagagacgacgacaaagcaaacgggggaggtgcggacacagaggaatggctgccaccatggtcgctgtagccgacgtcaacgatgtcgcagctgagcggagacgacggtgcctgctccccttttcc

SEQ ID NO: 198000 - DNA, 369 bp, Zea Mays
gtctgttttcttttgtcacttgaccatgctttgatcatatgaaggaattgtgctgctctttcatttacctccatgaccccatgatctgttattcattttctaaatcggtactaagacttttatccaaggttgtctggatctcagattttattgttattatttcactagcaaacatacccatactttgcaacgggacattaagcttgttgtgtggttacttggatgacttgcggcttggggatttatttagctatatcacgtcatgcgtttcaattcgtccgggaatcgaactctgtactatgcttggacctgtgttgctctaactcatataggtacgatccgttttgtcataatggcattagactttgc

SEQ ID NO: 198001 - DNA, 555 bp, Zea Mays
accgacagaaacagagcttttgaagttctcttctagcccaagcaatagagcttctgctgatgacttggattggctctccggcatgtatggttctaagaaaaggaaccttccagaaaaacgagatatggaatcatcatcttctaaaataagatcctccaaagcatcagaccttaaagcgtcaacttctactgaaaattatgacgagaacgatgaattcaaccttcatgatcttgtactctatgggtgagtgtgttatatggtgtataatcgtcgcccactacggatttcatccttatattttatttcctaatgaacaggcgaaaagattttggtgtgattgttgctgttgagaaagatggttttagggtaataatcttgtaatccacacttcaattttatatcctttattttgtctaagaatgggttctgtgtagatactaaagggtggtcctgaaggatctgcggtgaaagtgagaaagcaggatattaagaaaggctgcgtagataaaatgtttacagctgttgatcatcaaaagaagacaatatccattaacg

SEQ ID NO: 198002 - DNA, 592 bp, Zea Mays
cacatcttgatcttcattttctgaactgatgtcctcctgggtttcccaatcccactgagcctgttcgtcgaagatgacatcccttgaaatatgaacacgcttggtgatggggtcgtaagctcggtatgccttcgtgccttcttcatagccaatgaagatcattttccttcctcgatcctccaacttcttcagatgaggaacaatgtttcggacatagacaatgcagccgaacgtcttgaggtggtgaactgctggtttcttgccatgccatgcctcaaatggagtcatcccatctacactcttggttgggcacctgttcaaaacataaacagcagtttttactgcctctccccaaaaccagccagagagtttttttgccttcaacatactccttgctgtggccacaacagtcccattccggcgttccactacgccgttttgttgaggactgtacggcgcagtgtgttgtcggtgaataccactggccatacaatactccgcaaattcacccgaggtgaactccccacctcgatcagttcgaagtgtcttcaacttgagtccagattccctttcagcttgcatctgaattctt

SEQ ID NO: 198003 - DNA, 613 bp, Zea Mays
tagaggcgccaccacgctcttggtcgtttgtcacataccttcttagatgcctgttccggttgctagaagttcacaacctggagaaatctgaatcagcatacttcgagaaactgaggagggtgaaaaaatttgcaccactacaagaactctttggacccatttcagaagggatctgtgcagaaattttcagtgctattgaagcaagccaggggtgccttgagtatattgcctggggctcgttgatcactctactcttagatgttttcagaactcgtgagccgcatgatttctcatgccttgatcaggttcttgaccttttcctccggttcccaggttgcacttcattatttcaggagctcattgtggccctttcttgcatgtgcaaagttgcaccacttgtgttgacagaatgcccatattctgggtcatatccatttttagcgctggtttgccaccttcttaggcataaggatgtaatgtgtttatggtggaaagcagaagatttcgttttctcgtttgaaggcttccttacaaggaagattccaaataagcaggatctacagtgccttgtgccatctgtttggtggcctggttcttctgaggatgaagttag

SEQ ID NO: 198004 - DNA, 349 bp, Zea Mays
agcataggttctcttaccaagctaaaagttattttcctttataaaaataatttgtccggggtcatcccatcaagcctaggtaacatcaccaatttatctgtaatcgctctttcagaaaatcaactcaatggacttattcccactgagttatggcaaatgccacacatagcgtctttgtacctgttttgtaataatctatccggtgaaatcccacaaactatatctaatttatcttctcttcaagagctatccttggcagtcaatatgctgagcaacactttgccatccaacttcggccatgccctccctaatctcaaattgctatacttgggaggcaacttgtttgaag

SEQ ID NO: 198005 - DNA, 329 bp, Zea Mays
tgtgcttgacgaccttgacatggatgatgaagaaacaaacaacagtggtggccgtggtgatgagcaagacaaggatgatgttggtttagatgatttggatgatggttattgagtgcttgagtaacacttgtgtgctttgtggttgtggacattgcattctactttagttgcttttgtgctatgtttgtgattgtggtctattagacatctcattccactttgtttgcggttgtcaacttgctattagttgaacttgtgttattgtggtaatgtggttgtggacatgtcattttgcacaatattattatgtgaacttatgttggttgttt

SEQ ID NO: 198006 - DNA, 317 bp, Zea Mays
tggccacctacgtcgtctcccgcgcattgcaggagtggtagctgtagctggtgccacgaccaccattgagcagggcagctacttgcctatgcattcaggcgtccacgaaaagaagaaaaatccacgcccgttcgatcacggtgacgacgggatagaaaatgcgggatcccaccgcgcttgtaacatgaacagagcaataacaatgaaacgaatttcgtttaaaaaaaattccttctggttcgttggcacacaccgtactacactacacatgatgcccaaggcctaacgtgcgatcagccggacagctagaatccgag

SEQ ID NO: 198007 - DNA, 504 bp, Zea Mays
tacatgggggcactcttctttgctctcgacacaatcatgttcaatggttttgctgagcttgccatgactgtcatgaagctgccggttttcttcaagcagagggatcttttcttcttccctgcatgggcctacaccataccttcatggattgttcagatccctatcacatttttggaagtcggggtttatgttttcaccacatactatgtcattggatttgatcccaatgtgttcaggtaagatgcattcgaacacgtcttatatcttagaacagttcattgttttctaattagaaataatcaaattgaacatgaatgataaataaatttgttacacgaaatttgaatggttgtttttgtcatcaggttcttgaagcaatatctgctgctccttgcactcaatcagatgtcatctgcccttttccgcttcattgctggaattggaagagacatggttgtgtctcatacctttggccccttagcactgttggcttttcaagcactg

SEQ ID NO: 198008 - DNA, 294 bp, Zea Mays
agcaaacatgggtaaggacttgaaagcctcctttcggagaccaagacttttggaagtctataattttgtttttggctaatttttgggcctctatagttcgaaccatctgaaagaaacacaacccatgatattaaattgcttgccttgacctctagggtcgatggtgcttatttatttatacaagcaccgacaggagctacctattgcaagtggaatcctactctgtactatatggcaatgctttctttcagcaagaccgttttactgatgagcatgaggatgaggacaagacac

SEQ ID NO: 198009 - DNA, 322 bp, Zea Mays
cgacaaatatggaaattcagtgcttcaggagattatacagctaattctgcttataaagctctcttccatggttcagttcagtttgaaccagcagaacgagtgtggaaatcttgggctcctaggaagtgcaagttctttatttggcttgtggagcataataggtgctggacagctgacaggcttagaaaaagagggctagaccggccagagcactgccccttgtgcgaccaagaggctgaaactataaatcacttgttggtcaaatgtgtttttgccaagcagttttggtttgatttccttagttcagtgggacagcaggagc

SEQ ID NO: 198010 - DNA, 312 bp, Zea Mays
accttctactgaacgtgcagcatctgatatgaatgaacagagtacgtctttggatttatcatttgttccttttccataacatgtaacaggcagcttcagaaggaatttacattctcattttacataggtgatcttgatcctatcactgaacttccattcaagaactccagtgccatatctactaatttacctggaaatgttgcatgcaaaatggatggggcatctgtaccgccactgccaccacgtgctgcatgggtgtgttgtgatgattgccaaaagtggcggtgcatacctgctgaacttgcagatgtg

SEQ ID NO: 198011 - DNA, 747 bp, Zea Mays
gaatgagcttgcaagtatttgaacaacatatagaaaaatgtgcattaatttctggagttgttgatgaagtgcatgaagttattgggagaaccttagcagaaacaagtgctgcttatgcaaagcccagtcctaggcactgggcctctacttttcaggcagctttgcactcaagcatcaacttgattgaacaaatgactgaagcttttcttccagaatttatcagatcagttgttccacataattcagaggtaaaggaaaccgtcaggtcaatttctgaggtacgtggttctgttgataatgctctagagaagctgattgaggttgaacttgagagaacatctcttgctgaattggaacagaactactctgtgaaagttggcagaattactgagcagcaaatagctcttgaagaagctgctgcaagaggtagagaacatctatcatgggaagaagcagaggagctagcttcacaggaggaaatctgtagggctcaattggaacaattacatgaaacatggagacagaaagatatgcgtattttgtcacttatgaaagtagaagacaatatcatgaattcgctgctttcttctaaacagtatgtttcatctttggtggaccatgatcaggaaagtgagtttcattatggacaaattaaggccctcctttcaatcttcgcaaagccctttgctgacctggaatcgctggaccatatgctatcatcatctggcatgtttcctcacatagaca

SEQ ID NO: 198012 - DNA, 316 bp, Zea Mays
gtttagcactacatgccaatttgggggtttatttatgtaccatagtatgtggcaatgtggaatctagtgaacttttgcactaaatccagattagaaattactccctcagtttgaaattataaggtgttttgtcttttctaggttcatacttttgctacgcaaagatgtatggtatatctagatacatagtaaaagctatgaatctagaaatgtcaaaacgtcttataatttgggatggaggaagtataaaactttgcaagagtcactttagttccgaatagagcctaagtggaggaaaataatttttcattcatat

SEQ ID NO: 198013 - DNA, 377 bp, Zea Mays
gacaggtgatgactctttcagttcttatgagctaggatggtgcctttctttctcgactaaaggctactggtttaagtgtagcatgtctctactgaacatgtgattatgtagtgcagagaaatgttggaaagagactgcaaataactcaatgcactcgctatgttagcttcataagtggaaattgattatacttaaatcttggcactgtagtgctcatgtgttgtttagcaacttttgtttactgtttacatgctattcaaatggcaattttatcctaactgatagatctactaaggcacagtcccctttaatgttctaagctctgtgagtccatctaattacatgtgtgtacatgcacctgccaccttcgatccctt

SEQ ID NO: 198014 - DNA, 378 bp, Zea Mays
cctacggcatgcctggatatggtagactgccaccggctaggacagcggtcgatggccaccttccaccaccacccatcaccatatccgcaccagcaccaccaccacctcacttccactgcacctgctgtcattaccacattcaccatctcccattccatcattaccaccattcccacacaccacttcaccaaccccatcttttcccccactaccgcacaccatacccggtgctttctctccaccgccatctgttgttgttcctcgcttccaccgtttagagtttgcaatctttgatggcaaggaagatccaatgcactggttgactcgatgtgaacaattcttcgagggacagcgcacgttggaagaggagaaagtctg

SEQ ID NO: 198015 - DNA, 537 bp, Zea Mays
atgaaagccttaacagcagcagacacttgctcagggctcttgctctcaggcaacgcagtcgaaaccacttggtcaatgagttgccttctatattcattctcaggctgaagaactttatcccacagatcaccatccattctctcaaccacatacctggcattttaaaagtatgaacatgtaagctatcagacaactgaagtggaggcttagaaacaggtgtcacacgtcacagcaacaaaaaaatattacatacctagcttgtagcttgaataatgagtttttgttagtgacattaataagttcatcatcacactgcccacgtctgtaagcaacaacagcaagtgtaggatcccgcttttcacaatatttacccacaacacgagagtcgtaaaatgggttggtagtaaggaaatgctcaggattgttgttgctgtcgatgatgatttttccaagagcattatggacatgcacgtcttggctaccttcactcactaagtgctccaagaattgagtgagcaaacgtaagcggttcctggt

SEQ ID NO: 198016 - DNA, 205 bp, Zea Mays
ctcgaactcgccgtccgagtcctcaccgccggaaaccacgtcgtcctccgtcctgacgacggtgggttcctggcggcggacaaccggcatgtctcgcatgtttctgctgctcgctttgtttgcgatcgggtgcgttcggcgtggggagggaaaaggggaacaactgctagtcggttagcgagatgggaacggcgtttatataggg

SEQ ID NO: 198017 - DNA, 1539 bp, Zea Mays
tcatctgatgatcttatcttacatcttgactcgtttcaggaaccaatcatgtaagtcttcctaatttgactgtctttgacgagtatgcatgtttgtcattagtcattacatttgtttggtttgatggagatgatttggtttagtattgtaccacctccattcttttttatttgacgtcgtacagttcaaaattgcactaacaaacggcaaatataaaaaatcggagggagtataatccatgaacaccctataacttgtattaatttgtattcttttttttaataacgtgagccattggaatccttatgatgcatgcttcagattctatttcttcacatcgattatctattctgtagtatggattatcaatgttatatcatcaattttcatccttttaccctgaaattataggggaattgccattttatgtttgttgaatactaaggtacaaaggtggctaataattcctgtgtccctccatcattatctaatatttgcaactgttgagcttttcaattgatatgttacactggtgttccatcatggtatcggtgaggtgcaaatatagaagttaaatactccctccagtacaaattataagttctagctttttctatgtctagagactagaaaagccagaacgacttatagtttcgaatagagggagtagcaaataaaggatgtttttgaaagcaatatatactccctccaaaatgtcagagcacaaatacagaaactttttcctcatatttccccattcaaaatatcttttcattttttccgtggtgagaggtctctttatcatccctgatggctgtggaaatgagcaatttcttaaatgttgaattattatactcatgccattcttttggcttaatatttggctgagatttatgtgacttacggatttagcgatgattaactttgatacatgtttattgaagatctgcagtgcatgattaccggactattagtccatccatggcaacttaaggtaccaactcacatgaacattctgttttggtataggtggtcagatcttcttaacgcagtccagtcaattttgccagcaaaagcttggaacagtctttcaccagacctatatgctgctttctggggcttaacactctatgatcttcactttccaaaagaccgttatgatacagaaatcaagaagctgcacgagaatctcaaacaattggaggacaactcagataattctagcattgcaatttcaagacgtaagaaggacaaggagagaatccaagatttacttgacagactgaacagtgaatctcagaagcaccagcagcacgttgcatctgtggtccaaaggttagctcgtgaaaaggataagtggttgagctccagtccggatgcaatgaaaatcaacatggaattcttgcagcgctgcatattcccacgatgtgtttttagtatgcaagatgcagtgtattgtgctacatttgtccaaacactacactcccttgggactcccttctttaacacagtcaatcatatcgatgttcttgtctgtaa

SEQ ID NO: 198018 - DNA, 413 bp, Zea Mays
ccgatccccaccgccgaacaaccgacgggtgctgctgctcctgctcctgccgccacctgctacgtagcatacgcggacggacgtaccaccaaacccccaccgaactagctgccggtccatcgcgctacgccgctacctacgacgatcgggcaagcgaagcgcgcgagttcgacgtcgtcgtcctctggcatcatctctatccgccgtcctgtggtatcgtcagcagcaccggtgtcgtcgtcgtcgatcgtttccggttgtgaggagaggcggcgatgaagaggaccacgagcaggagcggcgcgtcgcccgccgccggcctgtggctccggccgggccggctcggtgaggttctcgccgtcgcgactctgctggcctcggcgttgctgccgtcggcggcggctgcgaccgac

SEQ ID NO: 198019 - DNA, 629 bp, Zea Mays
catagctgtgctataaaggcaatctatttttgtttttcccttatatttttggacaactgagttctttgggccagaacagcatgttccaatgaaaccaaaatccttaattttgtaagaaaatcttatcagtaagacggtgggcaagatagttgtgtccatcataaacttggaactgtttcgtttcatcttatgcatatgaatagaactctcgtgttagtgatattcttgaacaaggcaccactgtggactaacaaatgaaattccaaaattgtgggtggttcgttactgatgataatcttatcttgtatgtggcattaatttctttttacttaagtttgctgtaccccctcttccctgtaacagcattctctcctactgttttaattcaaaaagaaaactttaggtatgggttattatctatttacattttggtatttatgcaaattgattagtgatcctgagaatttgaggctccgtagtgcaacaacattcttgttcgactctaacatggaacttgcatactttttggtgtttggcatgtgacttcatgtagctgagagttgattgaactggactacagctggagttccatttttttacgcagtacatttgtttttctcaataaaaaa

SEQ ID NO: 198020 - DNA, 229 bp, Zea Mays
tcagaggttagatgcttcagatgatatggaggaaggagatatggcacaacatagcgatggtgtggtagataatgaaggggagcatgttgaagatgcaaatacagacgcaggtgagatggattcacaccaattggacaaggcggattcacttatgcctctgtcacaaggcctacagcctgacaatatgcaaataaattctaatggagaatctgaagcgaacttggccaac

SEQ ID NO: 198021 - DNA, 373 bp, Zea Mays
cctcaagccaacaaccgaatagagagagcagaggacgcactacaaggccgcacagacggagcagagcagctagaggagagaggcggcgtcgcggcgaggtggaagagagagagagagagagagtggtgaaggtgcgtgggttaaaaagaggaaacaaaaaagaaaacgagcgaggcagaaaacacaagcaaagagacgacagcaaaaataggaggccggaggcgggcgaggaacgtgaataaaatatcattcggagaaacaagagaggccggggaatcgcgtcggaattccggcgaatcggcgggatccggccgggatctgcgcgccggatgaggggtcggcaccatgaaatggtccacattactcagtaagg

SEQ ID NO: 198022 - DNA, 624 bp, Zea Mays
gcagaagatgttgctagtatttcaggcaccgctgatgttaatattgagttgtccataagaggttcctcacagtcagatcttggagttgtgctagaacattcacgctcaacatattgattatcagaagatacattgaaaatgtgacaacgagaatactgattaagtgaagcatttgatgcatccacttcaattggtctttgctgattcacaaactcctccattttgcatttatcagaagcagaagatgttgctagaatttcaggcaccgctgatgttaatactgagttgtccataagaggttccttacagtcagaccttggagttgggctagaacattcacattcaatatcttgtttatcggaaggtacagcggaaatgtgaggctgattaagtgaagcgtttgatgcatctgcttcaactgctttttgctgattcacaaactcctccgttttgcatgtatcagagacagaagttgtcgctagcatttcaggccctactgatgttaatactgagttgtccacaagaggttccttactgtcagattttggagttgggctaggatattcatgctgaatgtcttgattatcaaatgatacaggaagaacgtgagaatgaggatgatga

SEQ ID NO: 198023 - DNA, 395 bp, Zea Mays
ggaactctacgcccaggatgagatcaaactcgccgaggttgatgccgtaacagttgacgcagaaagcttcggcgttgatggcgatctccacgttccgtgctacgccctggcacggcacgcgttccccgttagccaccatcacccgaagcgtggggcagggtttagtggctaatttgaggcggtgcatgatgtcgacgttgatgaagttggtcgtcgatcccgagtcgagaagcgccaccacccgatggccatgaatgatcaccggcaggagcatggcctgctcggtccggacccctgcaatagcgtgaagggataccgtcggtggagggtcggagtcctgcatggcgtccgcccctgggaccgcgggatgtccgggctcgccgtggttgaaggcc

SEQ ID NO: 198024 - DNA, 677 bp, Zea Mays
actcaaggacttgattatgatgagacttttgcacctgttgcacatatgactactgttcgaaccttgattgcagttgcagcctcctcttcttggactatctcccagatggatgttaagaatgcttttctcaatggtgatctacatgaagaagtttatatgcatcctcctccgggggttgatactccatcagggcacgtttgtcgtctccgtcgtgcattgtatgggctgaaacaagctcctcgtgcttggtttgagagattcatctctgccatcacagctgctggtttttcttctagtgaacatgatcctgcattgttcgttcatgtctctccaaaaggccgcactttacttctattatatgtggatgatatgctgattacaggcgataactcagaacatatttctcatgtcaagcagcatcttagtaaggaatttcagatgtctgatttgggtccacttcgctatttcttgggcattgaagttcagcagactccaaaaggtttttacctgtcgcagtccaagtatatacaagaccttcttgatcgctctggaattactgatactcgcacagctgcaacaccaatggatattcatttaaaacttcgtccgaaggatgggacacctctagcagaccccactcgatatcgtcatattgtgggtagtcttgtttatctcac

SEQ ID NO: 198025 - DNA, 207 bp, Zea Mays
gtcaaacagcctgtaggccaccctagccagacattaagcctggccaagaacgatcatctgcagctccagacaatgcaccaaggcaaagagtcctggccgttaatcacgctctggcccacaggtcaaattctcatcaaccaggtttaagtacttgccttcttattaatcaaagatgcaacagtacgatcctatagaacagatcctgtt

SEQ ID NO: 198026 - DNA, 248 bp, Zea Mays
cgaggccgggggcgtggcgttgttgaagtgggaggcgagggcgcggacggggtcgaggacggagaagccataggtggtggtggtggcgtcgtcgtggtcgttgctggtactacgggcagcgcggtcgcggcgggcgatcttgatcctcttgacgagcttcttgaggcccttgtagtcgacgaaggcggccttccactcggggatgatgctggcctcgtactcccgcgagaacttcaccatcgtgggat

SEQ ID NO: 198027 - DNA, 244 bp, Zea Mays
acactgataacaatgtactcttgggagctccaactgggagtggcaaaacaatttcggcagaacttgcaatgctccatcttttcagtacacaaccagacatgaaggtttgtttatcaacttccaaaaaatctgaaagtttttttttggcatgatggcaatttaatgccttcccaatacctgttttaggtagtttacattgctcctctaaaggcaatagtacgagaaagaatgaatgattggagaa

SEQ ID NO: 198028 - DNA, 880 bp, Zea Mays
tcttcttctcaatcctgctcctctttgatggcgactcagttgagttctgcatgactttactgtcatggccagtgaagataaccactccatagataaaggctgtattccttagttttgagtccctcagaagtatctgagacggatcaagggcgtacacctgcctctcatactcaaagttaccagtaaatgtgtacaaggacgggttgggatcctcgcagcgtatcactgcctggaaatccttaaatgactcgtcttcttccagcggcagcgttacctcaagtgacctcttcaccttaaggttcgtctcaccatcgaggttcattgtctcaacatagcaaataccatcctcatagctcgaggacagtagcagtaaatcagcagggaagaactggtccttctcaactctgaccacatcaccgacacaaaggtcctcccagtgccggtagtcgaattcgccatcacccttgtgcgtgctgacatagcggttgttcaccttcatgtcctggatgaagcggcgccagtcctccaacccctccttcatcatgctgaggccaacaacaaaggccagcggagcaatcatgctgacgggagagaaggggcacactggggtgagcgagaggatggcggtgaggaggaagtagaggttggcaacgcgtcggaactgctcgaagatggccttggggaagaaggtgatgatgttgtacttggtggtggtgatgtagttggtgatgtacttgagcggcttctgcagggcggcgttgttgcagtacacgacgcgcgagaagcccggcccgccgacggcgccagccccatcggaggaggggcccgcatcgccggcgtgctcttgctgggcacggaagcaggagaaggtgtagagatt

SEQ ID NO: 198029 - DNA, 782 bp, Zea Mays
caggatgttggagaaagtttgcaaagatccccaaatgcttgcagatgtgtttgtgaactatgactgtgatcttgaggggccaaatctttttgaacgcacggtaatcattttttcaattgtccagaaagcatagcttctgaaatgtgcctttttttctttggcttgtaacacatctgattgataatatatgtcctactaggttagtgcgctatcaagaatagcacaaggatctcaaattgctgatactaactccatcgtgtcatcccaaacagtttctgtaaaaagctcctctctccaggttaatatgattcacgttactcgggcctcctgtataatttcttgtttattgttgttttgacatgaagattttgaattgcagtgtttggtgattattctgaagtcattggctgattgggagcaacttcgaagagattcctcaaagcaagggagcattgttgaatctcatgaagaggatgcttcaaggagattgacaactgatgagatgaagaaccaagaggatggtcggaatcagtttgagagagccaaagctcataagtcgacaatggaggctgcaatctctgaggtgggggtgtctgcaggtttcataaccacttcggaactgaaatatcagattatttcttgaatgttttagtttgtaaatgtcacttctcctaaaccttttgcagtttaatcgtaaaccaagtaaagggattgaatatttgttgtcaaataaattggtagaaaataaggcatcatctgtagctcagtttctcaagagcaat

SEQ ID NO: 198030 - DNA, 325 bp, Zea Mays
tggcgatccaggaggaggacgacgacgaggtcggcaacggcaagggagctgcagttgtgccggcagaagagatgaggacatcggaagtggggctcgtcatggaagggtgggatgtcgaggaggagaaggctgtgatgatgggggatgtggaggtggagaagaaagatgagatcttggtagtggggaaggaagaagaggggagagtaagtgtctgcatccccccgaggaatgcactgctgctaatgcgctgccggtcagacccagttcgcatggctgctcttgccacccgcttctgggggtctccagctgcagctaccgtggagca

SEQ ID NO: 198031 - DNA, 309 bp, Zea Mays
ccagtgtcaccatcatcttggtcaaagtcactgtacctccctccccttctcgccacacctgaagccctccctcgctggcttcgctgctccctaggagacctaaatgtggcctcctcatcaaatccattccccctccctcctcttctcacgaaccccgacgtcctctcaccccgtccccgccttcccctggaggaaccaaagccggaatcagcatcatccagtccactactaatcatcctccccctctgctcgaagccgccgcgtctgtctccactgaactcaccgccggccgtacttgacctcgggaac

SEQ ID NO: 198032 - DNA, 347 bp, Zea Mays
tccctaagacctctcaaagatgttgagacagatgtgtgccttgaagtcattgagacattcccacgtaagttctctggttcactatgcgtatcatgtacatcgtactccaatgatgcagctcttggtgtatgcttagagtgtgcctgccttgcaatatccaataatgtttcatcaccatgaccgcttacatgctctaatgaacctcctgaaaacctatgaggatggtcactcccatgccccagtgagtcatgagatgacctgccaaggccctccatgatgtatctgttgcttgtctcgtagccaggttcagtgtacatcctgtatggatggtggtccttggcaggcaa

SEQ ID NO: 198033 - DNA, 344 bp, Zea Mays
aggacccaacatatacccctgaggttggacgtcatagaacagatgcaacacaaccgtatggatcctcagttaccacttgcgactgggttatccctgaattcgtcgggacacctttcctgccaacttcaatacagaccgaggatgttggttcactcactatgtctactgagccactaagtcgtaaacatcatgtgctatctggggcaagaccagctatcttaggtagtcgaaaccaacaatttgaagctgccatttcaaggaacgtggctacggtgactgaggatacaatcagtgacgccgtggaaggggacgattggacacaaccccatacgactacagagatc

SEQ ID NO: 198034 - DNA, 594 bp, Zea Mays
catggcttggtgaggagatatgcataaaggatccacagacgcagaacaccataatgcctggtctgagcttggttcagtggatgaacatgaatatgcagcagaactcatttgcaaactcggctatgcagtccgagtacctacgatcgctaagcaaccccaacatgcaaaatcttggcgtggctgatctctcaaggcagttaaaccttcagaaccagattctgcaacagaacagcattcagtttagttctcctaaactgcctcaacaaatgcagctggccaatgagttgtcaaaggcatctcttccactgaatcagattggtgtgggcaccaaacctcaagaacagactcaagacccaaacaatctgcagaggcaacaacagtccatgaaccaactacttccattgagccaatctcaaaccaatcttgtccaggctcaggtccttatccagaatcaaatgcagcagcaaaagcaaccaacatccatggctcaaaatcagcagccagctgccagccagtcactgatcctgccccagcagcagcaacaacagcaacaacatcaacaacaaaagttggtacatcaacagcagcagattt

SEQ ID NO: 198035 - DNA, 584 bp, Zea Mays
ggaatagctagacatttggatgaaatcatagaagaaggcaaccagctcaattcaatacattccacacttcaaattgtaaacactgagatgtccaagttaaaagatcgtatgcaacttcctctccatgttcccatgatcaagccaatagctcccacaaccttgccatcatctgtaccatccaaatgggttcacgcaaaagtttcagagcagtggaaaaggctagagattgagaggaaaatccttgagagctcaaccatttctaacttgcaggttagctatgataatcttgatctgcaactgaagttgtgcttgttatgcttctctgtcttcccagaaaattctatcatcagcaagagggccatgatccattggtggattggcgaggggttagtagcagccacaagaagtcagacagccgaagatgtcggaaaggcatgctttgagaagctgattgctctagagatgattgaaccggtgtatcagaaatgcaggtatggggtaaaccaatgcaagttacacccctggattcgtcgtatgttgattaaagttgcaaagcaagcacggttttttgaatttgattcaga

SEQ ID NO: 198036 - DNA, 310 bp, Zea Mays
cgacccgtccacaagaattcccttcttattttatcaatccttttaaccacccattttggagtttggacattgcaatgcaataagctgataaataggaatggctgagaggactgacttgattagtgttgctctgccgtccggatgtataaccacagctttccaaccggggagtcggtctgcaattgcgtcaattaggggatagaaatcattcttagccagcttcttgacgagagaggcattccgagatatttacacgggaattgtgtcaccttgcatggcagcacatcagttaccaccaccaccttctgcg

SEQ ID NO: 198037 - DNA, 905 bp, Zea Mays
tacgggccattaccagcattcattggagaactaactgctctggaatcaatgtaataccctgaaataaaaaaacgtgctgcagttcccagtttttcagcaatcttatttacattcttttccttgaaaaatcacaaggaccgtgggcatcaatgcactatctggacctgtcccaaaggagcttggaaatcttaccaatctcttatcactgtaagatcctccaatcacgttattgtcctgggaagtcttaacaaatggatattctctgactaatatttatgttcagttactgtcatgcatctgttgtcctggttatacttgcttttcaattgttgcgttaaaaaaatacttgctttccaattgtatgaaaatcatgaggctgtatgccaagagcttgaagttttgcatatactatggccatatatcgagtataatcttataatatcgttttctcacgaagttagtataatataatggaagtgagaatctgaatgcacatcttcccaatccaacattttaccagcatttcaaattttttattgtcaaaaggcacttaacagcacttccatttgaacttttctttggatcgaacttaatttaattagttaattctttcagggcattgggctcaaataattttaacggcacacttcctgatgagctggggaaactgacaaaacttcgacaaatgtgagttatctatttggttgctttacatgtcttctacatgaccatctatgctttcttcactctttaaactgataactatatgcatgacataactgaaaaatgctatccaactttgagttgcagatacattgatagtaacgacttcagtggttctctaccatcgacattgtcccagctgaagaacctgtcaatcttgtaatttagtaaaataagctagc

SEQ ID NO: 198038 - DNA, 235 bp, Zea Mays
tggacgtccatgtccttcggcttaattgtggagcaaacaaaaaatgtttgtatattcccaagcaaacgtcaaatattaagcctctgggtgttgagaggatccaattgaattttctccatctgaaggcggcctcatattccattgcccttggtagcggcgttgctgcattgaaactttgggactggccatgaggcagacagttctaccccatattaatagaacaagctcggtttag

SEQ ID NO: 198039 - DNA, 1180 bp, Zea Mays
gataaaggtggatgagcttgcctgagctgggatgttctggtttgtacctccatccattagctcaggtagaacactggacacattctgattcaatgtatgttgagctgatatggaagaatgtgcagggcgggtggcctgagaaggcagcgatcgaacactcggagcgataggacgtacatacctcaactggccaaattgatacaaaggggttgttgaagggtgcatatgaggcagggatgggttaaactgattgtggagatggattggcatctgtatggaaccaatttgaatggctggaaccggagttggtattagaggaggacctgtaaacaaaccaaactggaggctgacaggtacttcattctgcccaactactgttgaagctgacgaaaaaataggacccacagaagatgcctgaggtaactgggaacttgaagcaggtgtccttgagctattggatggctccccattactgtcttctgtcaggccatttacaccatcaagagtcaatgcctgcagtgctttctctgcttcagtaacaggatcagaatggacaactgaaccactgacattctcttgctctgcaactcctgagtttagatgtactccaactgtcctttccgtgctcctcacagaagctaattcaagttgactattcggtggaatttcaacctgcacgccctcatcaaacccaagtataactggttccagttctacgggtgtatcctgcccctctaagaactcatcatccaagtctatgttctcatcatcagcttcattcatttcatcttcctggtagctatcattgtcttcatcatattcatcctgttttcgcctatcatcattgtttacacttgaccattcatcctcctccaagtggggcactcctgaggcagcaattctgcttgtattgtctgcatctacagtcagagctgcatgatggttgtcagagagcgccgtatgttcaccatcagcagaagtcggtaacacaggagaatcaccagatacgtccatctcatcatgtgaaacatgtggaggtgagctaggagggcttgaaacagaaagagaagattgtgaacccaatacagggctttttctgtccacaatttgttgctcattgacagaaatgtggtcagatcgtatcccatgctggcgagatgcctcttggtatacacttccg

SEQ ID NO: 198040 - DNA, 2642 bp, Zea Mays
cgaaaactggaggggtaaaggggaaaaggcgacggccgcctgggccctggaggagcgagaaggcggaagaaggggagcggcagtcgcaggccgcagctcgttgatggtggttagggtttcgccgcccgcacgctcgacctgctgaagaatcgcccccctgttgaagaggtctgcgcctcgccctataaggctccggggaagaggagatagacatcagtggaccccggcgcgcggctgatggcggagcaggagcggagggacgcggaggctgggggcgatgccgcgggcgcagcggtggcgtctcacaccagcagcatgcaggtgaggtctccgcaccctacttctcggctgtcctgtacgattttgggagctttatgatgcgtagatccgctcgctgctatttgattggctaaacctgcgtccgttgcgtgccttcattttagtttgttagtgcgtagtaggttctggaagggagctgtcggaattttgcatggaggcggtggggaatttctgtgggccaaccgtgccttagatccgagttagctgccgttggagctggtaaattattgttctgagagggattgggtgtgcttatttcttggtgaactgtagtaatgagcgagatatcataagacttggtttttttgttcatgaggaatatgtgggtatgtttttttttgttttttgtgctatccccatgctgctgtaccagcacctgcatgtttgggaagtagtgaggcctgctttactgtggagttagcctgtgtcacttggtttctcactctgtcagtgaacttattggtgatagtctcgatgtgaacagttcagcacaatgagattgacaatttaaacaaagacgaatgtgccctgagcatgatgtaatcactacccatatgccatatcatttcgtaaacgtggggcatacttgattgaattatattgatacaatatatcagctactaccattttgattatttctatgccggcagtagtatccttctatcttgaaaactgtagagccttcccatctcatctgaaatttctatacaatcaaaagttccagcttaggtggatgtgatctacattgataaacttaacatctaggaagtaggaacagaagttgttttgatttaaatttattgcatcatttgattatatgtaccggtgggattttgttcctctgaagccaaatatcccaacttcattgaatgtctcacttcattgtagaaaaacaatcgacttttggtagtttgacctaaaagaaagataataaaaggcacccatgatactccctttcagtggttgttgcgtatgtcagaaaggtcaaaacagcttgtgatacctgccagctgatctatggtcatatttgtatccgtagttaactagttatactacccaatccaagtatcggtcacttcagtattaaacaaacactgatagccatgatttgttagacattgttgcaatggactagagcacgtgatgaatgtttcacttgcacagaatttttattgtggataagaggcccttgcagcagcatgtcattaggtctaggtgcagcagaggtaccaaggatagcaaagtatgacagtagctgggcataatgtgggagagcctagagtgcagatctaaccacgtcaaaagtcctacaagtcttaacgttcatatgattagaccgaaattttgtttttaggaatttgcaaattttgattagttcttactgtgttagtcattggtccaacgtccaatgaatgtttaatttgtgttaactactagcctttctagggtatctatatcgaggaggtccacacgcataatataatgatgaagcattcttctattttctgtctctcgagctctctagttctctctaccaagctatatctgtctgtctcattacaatccttaaccccattcagccatgtatattactaacgatggttacaattctaactgttccagcgtgtcaaagtataccgtttggctgatggtgggaagtgggacgatcaaggaacaggtcatgtttctattgattacattgaggtatgaagaatttctttgctaatatgggtggtatttataatttcttattcatgggtctaagctaattctcatactttctcctgattttctttgatagtgcccaaatatttgtttgcctcttgatctactttagttttgctaccctagtaccttgttgcaacatgcttcatttgaccctcattctgtttctacaaataatgaaattgtcaactattcatttttttcactgtcaagggaacagtgtcccaatgtaaaactaaagaaaaccttgtcgaagtagacatcattttcatatttcatactgtaatggtgattcatggaacagtgtcccaatgtaaaactaaagcaatagtccactaaaaatgaaaataagcacaaattacttgatgatgattcatggatcaatatatcggtgtaaaagtaaagaaatggtccagtacaaatggaaacaagcagaaattacttgtagtctatgcctctatggcaccatgatattctgtcattgtattatgatttctaatctgtgtgcttactttttggaccttatatgatttattatttcgttggtttcagggttcgaaagaactcggtttgactgt

SEQ ID NO: 198041 - DNA, 215 bp, Zea Mays
ccattttcacgggccttgaggtcctcgatggcgccggtcgcgaggcgccggcgccgcttaggacgcctgagcagcagagctccatggccgctccacacggcagcaatggcgagcggagcagcggccgtaactttttgcaagaaactcgagagggcgagtcgccgcgatgagctcaactgggaattcccgaatccggaatggcttggtcgctagac

SEQ ID NO: 198042 - DNA, 256 bp, Zea Mays
caaatattggagctgcatcatattatgttactggtcaaacaagatggggtgttagcaatgttggaaaatttaatgaggccccaaatggaagttatacaatagatagttccgagcagtttcagaatgcactggattcacaactgttccaaacagcaaggatgtcaccatcatcgctacggtactatggcattggacttgagaatggaaattatactgttgagcttcagtttgcagagtttgcttatccagaatcacc

SEQ ID NO: 198043 - DNA, 400 bp, Zea Mays
taagcgccaacaaatgaccgggtctcgccattcttgcacatgaacttgatggttcctcgtccctcaatccgagccaccaaattgtcaccaaatcggacagtgcccagcacttttgtgtcaagattagtgaatacagccctggatccagacatatggtttgtggctccagtgtccaagatccaggttccctcctccagtttctcctcttcttcacgctgcagaaacaccttctccctgatctctagatgagaaccagacatcttgcagcatgattgaagttctaaggaggattttaccgggaacgttcttgcgacaagaagtgtagcctcctcttcttcttggacagcatgtgcttgctccttcttgtgctttgatggacactcgcgcgcccagtgtccca

SEQ ID NO: 198044 - DNA, 243 bp, Zea Mays
gttcagcagcgttttgagtgccatttctttcacaacgacaatacactttggatgtgattgagcacgctggcatgatcaactgcaaatcgtgcagcacacccttcgacactcatgtcaaggtctcctccatagtcggtgcacctatcaatgaccccactcaggatcatagtttggttggtgcattgcacaccttcatcggcccgctatctcttatgcggtccagcaggtgtctccacatttatg

SEQ ID NO: 198045 - DNA, 845 bp, Zea Mays
ggatatgcatggacataaattattcacatttgaagggcatgaggcacctgtgtattctatatgtccgcatcacaaagagagtattcaggtgtgttatccgagtaatatgcgcatattgagatttcattctggatgcaataccaatctttgctatcgataccttttctatacctagttttacttgattcttctagtttaaatgtagggattatgacagtggagtttctactacaattatgacatacaatatagtgacatgcttatttaagtggaaaagagggaggtctgcatgtggatgacttttaagtgaacaaaagttgattttagctgtatttacggtgcctctgttttgttcgctatagcatttgtccaagatctgtccacattgtttatcaaattcctgattgattcaaatttatttaattaatagaagaatgatcttattaaaaaaaagggcagacctagtgtcagaggctcccacatgagtggagtccaaaggaagggataagcgaggtaagccttctctgcaatttgcggagaggctactttgaacacgtgacctggtgactcgatgatacagttctcaccattgcaccatctaagtttaaaatgctttggattattcacttattcacacagctctattttgttattttacaatttccagtactcagcagaatgagcaaaatcaagtctaaaacatgactttattacgtttgatgcagttcatcttctcaacttcccttgatggaaaaattaaggcctggctttatgacaatatgggatctagggtggactacgatgctcctggcaagtggtgtactactatgctatatagtgctgat

SEQ ID NO: 198046 - DNA, 930 bp, Zea Mays
cctatggcagtttctacggcgctccatcccctccgtacggtatgcactacgggggaactggagcccctggtttccaggcgcccgcaccggcgtaccaagcggcgccctggaaccccactcacggaggagcatggcatcaggacgcccttgcactctttcaacaccatgaccctcaacccgccgaacgctacttcagagtggtacgccgactccggtgcaggatcgcacatgacctcggacgctggtaaactttccaccatttccttgcccacttcattcactccatctatcattgtgggaaatggtgtcttgcttcctgtcacagccactggatcacatattttttctttcccgcatcacaatttagttctcaataatgtcctcgtgtctcctaacattattaagaatctaatttctatccgtcgttttaccaccgacaataattgctccattgagtttgatccctttggcctttctgtgaaggatttgcaaaccaggaacgtgatcgccaggtgcaatagctccggtgacctctacccgttctatgcaccctccaccagcacccctgcattcctcgctgcacccacctccctgtggcatcgtcgtctcggtcatcttgggcatcaagctttgtccaaacttattacctccagtgttatttcctgtaataaagatgatgtcaaccacatctgtcatgcgtgtcaacttggtcgtcatgttcgtttgccattcagttcatctagctctcgagcttctcacaattttgacttaatacactgtgatttatggacctccccaattgttagtgtgtcgggctataaatattatctggtaattcttgatgactgctcccactacatttggacgtttccactccgtctaaagtccgagactttttccgcccttgccaactttttcacctatattcgc

SEQ ID NO: 198047 - DNA, 441 bp, Zea Mays
tagaaatgcgtgcgtgtttgatggtgcccaacctcaagtgcaatcagtcctctctcgagtggctgcggagggccatttgtggtgcctagccgaggccgccatcctgcaagtgctcctcttaaggagtgtgcagaccccatagctggttgctacctagcatcgtgttgttttagctctctagaggagttgtgttagtgtgttgcgagtttagggaggtctcgttcctctgtgtatttggttctcttttcttccttaatgaaataatatgcagctctcctgcgttgttcgaaaaaatagcccttttgacattctcgttccaccaccaagtatctttagcttcgcattcactccctttggttgctccacgcacctcgaaggccatcttccaaatgcgtgttgtcatcttctctcacatgtggtttgtatcatcttcttccttcc

SEQ ID NO: 198048 - DNA, 337 bp, Zea Mays
cacatttttgtccccggaggcctgtaaggctatttttggcgtcccgcgacacatgttttcttcgtcgaacaacaatttcatgcctcccgcccgccaaacatgttttggctactggcatgggaaaggttgtttttagcatctattgagctacatcacacaaaacacttaaatcctaaaccccgagccccaaaccctaaaccatgaacccgtaaccgcgaacccttagactaaaacccgacccccaaaacacaaaatcacaaatcccaaactccaaaccctaaacattaaaccccaaacgctaaccctcaaatcgaaacccgaaatctcgaatcccaaa

SEQ ID NO: 198049 - DNA, 1531 bp, Zea Mays
ttccgttcactccaagcaactaagttcttccaaactactgagcttgactgggcagaagcaggcttgcaagtttgcaagcaggggtacaacatgctaaatttgttgattcacaggaaaaatcttaactatcttcatttagattacaatttcaatttgaagcctgtaaagactcttacaacaaaggaaaggaagaaatctcgttttggaaatgcattccatttgtgtcgtgagattttacgacttacaaagttggttgttgatgctaacatccagttccgtctgggaaatgttgatgccttccagttggcagatggtctgcaatacatattttctcatgttgggcagttaactggtatgtataggtacaagtaccgattgatgagacagattaggatgtgcaaagatctgaagcacttgatatattatcgtttcaacactggccctgttggtaaagggcctggttgtgggttttgggctccaatgtggagagtgtggctcttcttccttcgaggtattgtcccactattggagcgctggttgggcaatcttctggcacgtcagtttgagggccgtcattccaagggtgtggccaaaactgtaacaaagcaacgtgttgagtctcactttgatttagaacttcgtgctgcagttatgcacgacgtcctagatgctatgccagaaggcatcaaacaaaacaaggctcgaactatattacaacatcttagcgaggcatggcgatgctggaaggcaaatatcccatggaaagtccctggtctacctgtgcctattgaaaacatgattcttcgttatgtgaaatccaaggcagattggtggacaaatgttgctcactacaatcgtgagcgtatcaggcgtggtgctacagttgacaaaactgtttgtcggaaaaatctaggaaggttaactcgtctgtggctgaaggcagagcaagagaggcaacacaattacctgaaagatgggccatatgttactcctgaagaagctgttgctatttatacaacaactgttcattggctggaatcaagaaagttctccccaattcctttcccgccattgtcatacaagcatgacactaaacttcttatacttgctctagaaaggctgaaggagtcatacagcgtagcagttagattgaaccaattgcaacgagaggagcttgggttgattgaacaagcttatgataatccacatgaagcactgtcaaggataaaaaggcatctccttactcagcgtgcttttaaagaagttggtatagaattcatggacttgtacagctacttgattccggtatatgaaattgaacctcttgaaaagatcactgatgcataccttgaccagtacctgtggtacgagggggacaaacggcacctcttcccaaattgggttaagcctgctgattcagaaccaccacctcttcttgtttataaatggtgccagggtataaataatttactggatatatgggacacaagtgatggacagtgtgttgtgatgctccagacaaaatttgaga

SEQ ID NO: 198050 - DNA, 215 bp, Zea Mays
agaagttaaactgcatgatttagccacactttttcttggcacgaatagtgataccagtacgacctttgaaatatcattctttcatcaggtattcttggccaggggtaaaactgaaggcttagtggtgatccgtttcatcaaagctaaacacaacagaaagcacacacacaaaaatctatagctaacacttccacaacagtctacgtacgaacagc

SEQ ID NO: 198051 - DNA, 274 bp, Zea Mays
agaggggttttgttaatttgaaacaaactaacatgtggcggttcccatggaggaaggtctttctcaaacttccctgccaaagcatcagtcaatagaatggaatcgtcctgcttctcactagctttccatattttcaaactaggagggaagtagccattgctgttccatttccgcagctgtatgattgagaaaggaccttggattttattagaaggatccatgtacagccagatcttctcagactcgttaatggctgattgaggtgcagtttttg

SEQ ID NO: 198052 - DNA, 813 bp, Zea Mays
tgattctgaaaatggagaaatatctactgatggccaagatgaggaaaaggttactctgggagatgcattgtccatgaatcggccttctgaagctcctccaacgtctgttgaagagcttcagaatcttgcaggtggagcagatattaaggtactgaaactggatctcttgttgctatcggaacttcaaaatatgtctcatgtattgcattggttccatctaattttaagagttcttttacaggggctggaagctgttctagataaggctgttgaacttgaagacgggaaaaaagtgtcacggttcgttaagcttgttttaagttgtgcttagtaatctgggtttttgcttgtcgaaggtgatgctttggggacttagatgtgacagtaactaactacctttgcccctccccctctgttttttccagtggaattgacctggacactgtgaatataatacagcgtgatgcactattgctctttcgaactctctgcaaggttggttgcttgagtaatgttactttagtgggagctatgagaaagtagcaattatatacttcctgcgttttgtcatccttttagatgagcatgaaagaagaaagtgatgaggttgctaccaagacaaggctgctatcacttgaactgctccaggttagcttacttctttggggttgctaatgttcatttttgtttgttttgatgttatttgtagtcattctctttagggattgctagagggagtcagcaatgtgttcatcaaaaattttcacttcattgattcagtcaaagcatatctttcgtatgctcttctgcgag

SEQ ID NO: 198053 - DNA, 349 bp, Zea Mays
atgacatgttagggtttacctgcgagggggagaggaaaaggaatggcgcgcgctcggggaagggaggaggcggtgctgatatatattgaggggattggcgggactgcggtaaccctagcttttggtgggagcaccatcggagccaggcgggagaaggcccgcgttctctccattgcttgtgcggagccaggcgttggagatgcggatgattgtcattgcatccgcggacggcggagccaggatgggggaggggtatgcatccgccgggccaggccgaggagcgatccaggaaacctatcagacgtgggctgcatcccacgggcctatctcggggttaggccaactggcc

SEQ ID NO: 198054 - DNA, 580 bp, Zea Mays
ggcaaaatgagctcctcttacagtatgtggccagtttttgctatcccttataactttcctccgtgggtatgtatggagcaatcaaacatcatgttgtgtctactcatccctggtcgggaatgtccaagaaaagattttgatgtatttctagagccactagttgatgagttacaagaactttggttgggtgtttctacttttgatgcactgagtaggaaagattttgatctacatgctgctgtaatatggtgtattcatgactatcctggtttgagcactttgtctggtagagttaccaaaggatactacgcttgtgtccattgtgacaaagatccttgctccaaaagaataaggaataaaatatgctatattggtcatcgacgttggctaccacatgaccatccatggaggaaaaagaaggattatgatggacaaattgagaaccgtgacaaaccacaacaatttagtaccactgagttgatgcaacaattggaaagggtgaaggaagttaaaccagggaagcatccaaatagcaataagaggaagcgagatgcaaatggtggtcaatgttggaagagaa

SEQ ID NO: 198055 - DNA, 524 bp, Zea Mays
aggcagaggtatcaagtgaggttgctcatgtatacctgggttcgtggagagaagggtctgagcaagctgttgggcggatgcttgcatcaattgatgctgtggttaggcaagatgatgccagctttgagggtgctgaccaggatgggatttctattctggaaaggaagacttcattgcttgtggagaggtacaggcaggcctcgatgggtattgaacagcttgagcaaattttagctgaggtgaagcctggtttcgcggccacagggcacggtgaccttgctaccactttaagtgttctttcagatgaattggttggtagcaagagaaatgaggtggatttactgcagaagatgaatgcttttgctgaagagaagaaggctattgctgatgaacttgaggaagtgaaagctgctaggaatgcagtgaatgctgaggcaagcaaagcaaaggcagagtttgagcagatggagcaaaagttatcaacgactaaggagaagctcagcatggctgttacgaagggcaag

SEQ ID NO: 198056 - DNA, 367 bp, Zea Mays
ttctcacattttccgtgtatcttctgataatcaagacaatcagtgtgaacatcctagcccaaatccaaaatctgacagtaaggaacctcttgtggacaactcagtattaacatcagtggtgcctggaatgctagcgacaacttctgcctctgataaatgcaaaatggaggagtttgcgaatcagcaaaaagcacttgaagtggatgcatcgaatgcttcatttaatcagcctcacattttcgctgtatcttccgataatcaagatatggagcgtgaacgtcctagcccaactccaaggtctgaatgcaaggaatcacttacggagaactcagtattaacatccttggcgcctgaaattctagcaaga

SEQ ID NO: 198057 - DNA, 374 bp, Zea Mays
caaaatagccctccggtttctattccttcgcacggtgaagtcctcgacgacggcagcgcgcggaggagctccggcgagctaccaggccggtcaattggggaaaggactgacgcccttcttcggtcgaaaccgaattcacgccccaaccattgattcccctaagttaattgcacaaatggtgaactaatgtggtctggccacggtgagcgcgcggatgaaccaaagatccatgcgttcctgacggtcagtggacccctagtctaattggacgggtcagcaagcatcgtagacatgtgagaatgcttaaacgagggagagggagggttggactgaccggagtacggctggccgcggtgaggttgggcttcgggtgg

SEQ ID NO: 198058 - DNA, 297 bp, Zea Mays
gaggtgaccataaagaagcaatatcgtaagcttgtcctctcacttcaccctgataaaaacagttatgctggtgcagaatctgctttcaagtttgttgcagaagcatactcaacattgtctgatcgaaccaaacgatatgcatatgatgtcaaatggagggctgctcccaaagttgcaccaaagcaggctacacagccgacacaaccaaatcaggctacacaacagaaacaggatgcaaaaccaaagcatgttgctaaaccaaagcaggctgcacagccaaagcaggctacacaacca

SEQ ID NO: 198059 - DNA, 774 bp, Zea Mays
gtaacctagagggtagccaatgctgtgggagagtcattaccagagctagaagaaatggcgaagctgcccacgcgcacacccagatccgcgggggggagaatcagttccggcgagcaattcgcgcgccacgacgacaatgtagtgctccgattcgccaggtacgcatacgatgacgtagtccgaagcttttgaaccaagccctgggccccaatgacgacgacggcgcgagatggttgtggcggcggcgtgatgcgatagcagagaggatgcgagcacgggaggaaaacgcgagcgcagggaagaagaaaaagcggggcggagtagctgtgagggaggtttaaatggtcggataggtgcggtcatggtaggatatgcgcggtcgccatgccgaagttaccggcggactttgagccgagcgcgccgtggaagtagtcgaggggaggaaaggttagagctgacggcgtccggatccggagttgcaggggcgaccggcgaataaccacagcggaaaccgcgtacggcgcgggagttggctagcagcagcgaacggatctccaaccaatacgcccgagctccacggatccctcttccttcgcatacggcggcgttggcgatgaaccaaccggctgacacggaggtcccacacgtcagccgaccctgcgcacggtgagaaggggatgggccgcgcgggagctactggccagatgggccgagatcccagcagccggcccacacgcaaccccttcacttttccttttctttttcctgattttc

SEQ ID NO: 198060 - DNA, 460 bp, Zea Mays
ccgccacgccttcttcgaagatagtaattgcgatgtttccacaaccaccaagccactaaaatcaccacagaattgaactcatttccctgcggtttggggactcttctctctgcttgattccaccaatcctgaaaattgacctccctgggcattgggctaaggtgctgtaagttgattagagaaagaacttgaaaccagacctgtctaccaaacgcacaggccaccaacaaatgctgaactgtttcctctttctgatcacataacaggcaaagttcaagatgctcaagtcctcttctagcaagccagtccacagtccagcacctattgaggctcgcaagccaaatgaaaaacttacatttcggagggccccaggttttccaaacccttttagccggtttaaaggctactgaccctacgaagaacctttcatatgctgacttggaagagtagcacctggaag

SEQ ID NO: 198061 - DNA, 565 bp, Zea Mays
ctcatctttctctccctaactttgtagattggcaatgatgcttctcaatttgttggtccacttgtattgaacctgttgttagaggtacacttctcattccatgacccctacccatcattaacagtgctactgaagtgcattgattctagaacagactgtgcgattatgcatttcttagcgcacctttattatgctctttgcaccaataaactttgtttcccccccttttccagtctatgcaaaaaggtgatccatcttggagcgggtacatctatgctttctcaatctttgcaggagtggtatgggtcattttgtttcctgcatgctgtgcaccacatttgtttcttgtttcggtgcagttgaaacagcaattatagtacttacgtctcttctcattttcagtcacttggggttcttgctgaggcacagtactttcagaacgtcatgcgtgtgggtttcaggttgaggtccacattggtatgtgtttcttttatatgaagaacttttattgtccttctgtaagaggttgtacagtaaacatgcatccttgaaaattgaaatctcg

SEQ ID NO: 198062 - DNA, 331 bp, Zea Mays
agaagcgctcgataccggggatagttgaggaggaagggtatggagcgaggggagaggagttggaaggggacgtggccggggctttggagcagaggtggcctccgtgggatgggttggccgagcggtacaagctcatcggcgccacctccctcgccttcgtcatctgcaacatggacaaggtgacccatcctgtttgtctctatcacgtggacggttccgtcctgggcacttggcacgggatgacaggctggcaggcggctaattgcactgttacgattttgctctacggtattttgagctgctagaattaaaatgactatgaattcgagtt

SEQ ID NO: 198063 - DNA, 895 bp, Zea Mays
atccatccttgatgaaatgagggatatttctttgcgtactaattcattttcaaataagcaaagggatgcacagccacaaaattgctacacacgtactagggttccatctctgcggaagtcaagaagttcattaagtctggaatcaagaaaggctcaaggttctggtaatttttttgatcataccaatttggcttctattaatttggttcctggtgaacataaggaaccttctcatcataggcatgaagatgacaaagctaactcaagttctgtttctacatcagataatgtctggttgcattctggtgaaggcacttccaaccaacctgtaactttgggggctagtaacggcaacagaatgttgaatactcctgctgaagtggatagtactagtaaccgtgaagcatctgaaaatggaactacagagacagaactgaaatcaaatggcacatcagatcttcccatgaacacagcagtaaatttcaagagaaaaagaaaatcagatagaaaacctggacctcattatagagattgtacaacaccaaataaagatgaccaattatgtgctgagtacagtgaaatccttccagattctccgaattcaaagaatgaagtaagcaagtcagatggagatgagcacttgccattggtcaaaagggcaagggtccgaatgggaaggtctcagttggaggattcaccagttgatgaaattgatgtttctaataagaagccagagcttgcaacagccttggaccaatgtgataggaatggtaaacctgcaagtcccgccaatgattactcagctgatcaggtgtctgcagtcgtaagttctgctcctaatctgtcctgcaaattggacacaactatcttgtcaaaggaaggtcatcttccttgg

SEQ ID NO: 198064 - DNA, 556 bp, Zea Mays
taggagcaagtgcaagttcatggactataaaatactacaaggtctgcttgtccccgcttgttcctattgtttactcttctgtgggcatttgctgaggatgtcatcattattatgttgtcaatcatttaaacggatcattattggtacaggggttaggaacaagcacagccaaagaaggccgaaagtacttcgaagatattactgaacataaaaaagattttctctgggtagatgaccaagatggcaatcatattgaattagcattcagcaagaaacggattgctgataggaaacagtggcttacaaattttcaggtttagcacttgcatcttttcccagtttgtcatgtttttttatgctggatccacactaaacggcgcaaactgattttcagcctgggacatacattgaccaacgtgacaaacatgtcaagtatagcgatttcatcaacaaagagctgatactcttctcaatggcagacctgcagcgatcaataccttcaatggttgacggccttaaaccaggccagaggaaaattctgttttgctcattcaag

SEQ ID NO: 198065 - DNA, 392 bp, Zea Mays
ccttctcctcctctctgatcccatctcccagctcgcattcgtcccaccctgtgtgggtgtgtgtctgcgccagagaccaaacaccaacctccccccaccctcgacccatccccacctcgccgccgccgccgcacagtctccttccccgagatttgaatgcgttaggaagtgcatggggagaaaggatgccagagttgcgtagtggagtccggcagtctcggttgagggcaaagaaggttgaggatcttgtggtttaggaccctactaaaaacttggttgtggcggcacctacggtggcaggaaggcgtggtagaggaaggggtgggaggggtggagggagaggagcaggacggggaaggggaggaagaggaagaggtgttccagtgcttaac

SEQ ID NO: 198066 - DNA, 310 bp, Zea Mays
cttagtgggttaagctctaaagaacttaatgagatgctgaaggagtcagacaactttgttttgcagtccaaggcagaaggcggaggtccaaagcagacacttgtatgtacaaaatgtttgcatatgttgcaaacctgcaatgtccaattccctgacacctgttctttgttgtaggtggacatggaaaaactcgtgtcctcgcttcctcttcatctcattgctgtatgtttggagcttcggcaaggccccgatttgacatatgtgcttcgtggcatgcgctttttgcatagtttgtctgacctagcatccc

SEQ ID NO: 198067 - DNA, 337 bp, Zea Mays
gttttgggagctgttggagatgctctaaggcacccaagtgcagttgagttcctgagctattgtccaggtcttcactgtaccttttgagatcatcctgtcatcttgtacaagtcaggagctagttctgctacgttccatctttgtagccatgggtcagcccagaaccatatcttgtttccatttccatctatagagcccaaagccacatcaaagagaacttggacatttttcggcacttgaatttacagtagcccatggacacaaagggtctgtctttgtgcccacaactaacagatgcataaagcccaacccagagtttcaagtttatgtatactca

SEQ ID NO: 198068 - DNA, 449 bp, Zea Mays
gttcagtatcacaaaaacaaaagtttacaccgaaagccctagcccctattccgccacctgcgaaggcccgaccgacgccgctgggtcctcggtagctggttcgcccaccaccatcgaagtgtcttcacccgtcggcgcagtggccggcgcggggtcttcgccagccccagtcgatgcgggggtcaccaaggggccctcgccagcatcggatggcggcgccagctccacccccgatgcctcgggcagtgtgctatccagatcaccgaggtcctcgacctcttcatcatgctccatctacagcaataacacattcattcaacaaccacacaaatacacacacatacccacacatataatcacacatatgcacttttacctgatccatcgcccagtcggacctctcccggacaatctcacggtcgtgagggccccacatcctatcgtaaagc

SEQ ID NO: 198069 - DNA, 256 bp, Zea Mays
ctccttttgcgtaaaaaaacataattgaagcaaaggaattggagcatagtattaaacttcggtgccttgggatacgtaagactggcttcacccgtttgcatgtgtcatcaaactccttcaacaatgactgaatctcctcttcatgagtacccactgtttgattctgcttggtctccaacagaactagagtccagatgtcattctcctttatccacttctgtatttgcatcactgaaacatcagctacctgagttac

SEQ ID NO: 198070 - DNA, 462 bp, Zea Mays
tttgctctacgacctcatgtggtgtcatatggatcttgatactaattgatcaatgagctggaacgttgaaagacaaggcactttgccttcttttagctgctgcccctgaactttccacaggcttgctctcgctcctctgacccccctccacactcacatcatttgttgcttcatcctcctccactagaataggctggcccctattatttttcttcaaagcagcatccatctccttcatgatgactttggttctgttacactgtaccacatcaccatatcctcctgcaagatgttccttgtatctcttactcccaccagatatccttttcttacataacgagcaccacatccaatttcgagtgccaatcacatcctaatacccgtacttccaacaaggatcatcaccttttggccttcgttttggatctgtcatgggatcatattcagatgcctgagaagaac

SEQ ID NO: 198071 - DNA, 416 bp, Zea Mays
tgtagggacacaatctgcgacaaagaaggagataagcaagtagatagtaatcgcaacttgtaacgggataactctctctggtcgcgtatatgaggccgagggggaccccctaccattccatctcatcacccaccactccagctcatcctcacccacaaccctgagcttgtaatcctcgtacttcggagatcaatatcaaacccaacaggaagtagggtattacgcaattctaagcggcccaaacatgtataaatccgtgagtgatcccagcgtgcctctgcacgaaccatcgagtcgcgatcaacgacgccatcctacccaaaagcatcacgtaggtaacctcgtggtgcgtggttgggtcacaaacgccgacaacgatcgattgagagaatcacatatccaatcaaacaaatcta

SEQ ID NO: 198072 - DNA, 524 bp, Zea Mays
tgtggatctccgaggcaagtgctataagtgcctgtcgacctctcacttcgtggcggcgtgccgtagaacccctcgctgttttgggtgcctacatcttggccatcgcgtggcacagtgtcctacacacttcaagaaagagaagaagccgctcaaggagagactgggttcgcgggcgcctcgcacctcggtttggcagcgtattgccatggaagacggtggtcgggccttggctccaactcaggcgaatccaactcagttgaatccaacgaagcttccggtctggcgttgtctctcccctccagtgtcttcagaggtaccccctcctctggccatgacggttggcagtgacataccccataagagaaaaaggcgtcgcggaaaagggggtcgggaagacccgcaagtgaagcatccctcaggatcagttggagaagacgacgttcgtccggcaacggccactcacaacatggttgccaggccttcttgtgtattggatttttcctccgacatggcacgagaagagg

SEQ ID NO: 198073 - DNA, 206 bp, Zea Mays
cggtgcctctccgaaggggatgtaagcagttaccgcctgattttatccctcgccgaagtagcagattggcaagaaagaggacccctaatgacgcaaccaggcagatccaatttgaattattaagaacaatggatattggtgatgcggatgaggcgttcagcgataaagctcttgaaaaatatggcaggctgttcaactctcccctg

SEQ ID NO: 198074 - DNA, 275 bp, Zea Mays
gaggtgctagttgtgtgtcatatggccaaggacatcgtgctagtggctttggttcctacttccctagcggaccatggtttccttctcatggtgattgcttcccccttcgggaccgatgatgtttggtgttttccataacactttttaggggtaaatgccgcatcaatggtattattctaagtatcctaaccctagtgttgtgccatttgctcaccatgtgtgtttctattgatgcaggatggaagcttggaaaacacgtggctcatggattccga

SEQ ID NO: 198075 - DNA, 318 bp, Zea Mays
tgatggaccaaagttggaatctgaaaggatttagcaatgtacctggggacagtgaacggaaggatgtgataagatttttaatttcttgcggaatacccagaatggaactggtctcgtcaatgtgtgaagcacacatgtacgcaaaaggtgaaggttcacgtgttggtgtgaacattacccttcttgaaatcacgcgctgggttcagttgttccaacaactgattgttaaaggaaatcagttcctttggagcctgcatttgagctgggaacacacatatctaccatgtttgggtgaaattaatggatctggcattgtgg

SEQ ID NO: 198076 - DNA, 374 bp, Zea Mays
gtcggtgatgggggacccgagggtgcgaagagtgtccgccatcgtcttcatctgacggcagtactcgtccacagagagatcgccctgagtaagctgacggaaggcggtctcgaggtacagaatccgagtctggcggtggccgaggaactgggcctcaagagcaccccagacccggtgagcagtggcgtccggaacgcgaacgatgtcctgaagttcggccgtgagggtgccatgaatccaggagagcaccacctcgtccatcagaagccaatcctctgacgggtcagggaccgctgagaggacgtggtcggcgagggcgtaacggcgaagggtctgcaagacctgatcgtgccaccgggggtactgagtggagg

SEQ ID NO: 198077 - DNA, 378 bp, Zea Mays
aagggagatggatgataccttagctaccataaggatgaaattgaagaagcggaagaaaggcaaggatagtaatgattttgatgcagtggctgaatgtggacccgaggttccggcattggttcaacaggaaggtgaacgggctgttgttgatataggtgatggtgttgctgatgagaagagcaatttgaatgtcgtgaaactggagggtagtgatgtttctgggaattgtgcacagggtttggatgatttggggttgaaagactccttggcagtgctgtttacaagacctggtcggaagtcacggcaggtctcagaggaggcagaaggcatggaagtttcttgtccgcatgatgaggatggtcttaacaagggatctgg

SEQ ID NO: 198078 - DNA, 282 bp, Zea Mays
ccacttctgctttcgcacccatcggcgctcgcaagaaccgtcagatcaccgccgcttgcaactgtcgttttcgccgctggtgacgagatcgacgacaagctcgctgacgctgcgccatctaaagactgccgctcgccgtcgaccccggtacgctgccatgcccccctctcgcagtggtggtgcaactccgtcgccgcaccacggggcaggaagggcgttggctcttcctctactagggttccatgctccggtgggccaggccgagagaattatgatgtgggc

SEQ ID NO: 198079 - DNA, 612 bp, Zea Mays
ccacggcgggcagcagagggtggtgaaccagcccgacacaaccggtttccaacctgcccccgcgcctgccccccaccaaactcctgcgcgaccgccacctgcacctcagaatgcggctgtgcatgttcccatatccgcaccatggccgcaacctcaaggtgagtgagtgaggtgtcctgttcttctgctatcttgtattgcctctggaatggtgcaaatacgaaccgatgtgttcctttgattgcatgtgtttttctttgactcaccaggtccacaagtgtcatcttcatcagctgccagcgacaggccggctaatccgccattacctaaagctactcatgctgctccaagggctccaccaaaaagctctaacccaccccttcctcagggaggatcgaaaggtttgccacaattttcttcgatgttatatacactattacatgtttttgcatgtgcatgatgaccatctatggtggcattgcccaccttttttgctctggctaacgaaaccctattttaggtagggtgtatactgcatggttaaccaccttatttttcttgttgatttcttttcaggggaaccaccaaaggggtttaactttcagtttggta

SEQ ID NO: 198080 - DNA, 217 bp, Zea Mays
gcagctggaaggaacatccatgcaaggcatcggtgcttttgttatgaaggccaaagcaccgggagaacaagccttaataagttaatgagaaccccattagaaccaattgaactcacccaagaggaggggagtccaaatagggtttagggttagactgcacatgcagatacaacatgtgcagatggtacatggaaaccactccaatgacacttcaccc

SEQ ID NO: 198081 - DNA, 635 bp, Zea Mays
cctgatctgcttgatctttgcatcaaccctcgcagtgaaaccaatctttgtcttctgcctggccttcgaccgctccctcttccacatcgtctggtcttcaacatctttctttaggtacttgatctcttgaatcacatggtgatcaagtggattgcacgatctctggtaggatatgtgtatcaggtaggggatgttgcaggcagcagtcaccagaagcgtcgctgcccagtatatgggagctggcccaaggacttctaataggatctggtagttgtcgccagacctcaatgtcatcccataggcgaggatgaagagataccaagttgttatgctgccccatacaaagagatgttgaatccatgtgaaatggctcattgttagggcaatctgcatgttgacagcccagatgatgcaggtgaacatggtagttcccaccgcagcaatgtctgcagtctgccccccaacacggattgcctgatcatagaatatgcagagattgaggaagaatatggccagagaggagtagaggccattccccatccatccaaggatccggtaccaatcaaagaaaagattctttggcccttgctggtataatgctgggaactgcaacatgcaagccatgccatgtcaac

SEQ ID NO: 198082 - DNA, 656 bp, Zea Mays
gtgcgaccttcagaatctttatgggccttagcttatgggggtccaatggctttacttccactaaccataggcaatgtacatgtggacagccttgagcctgcacctggggacttgccatcgtctcttgctaccatttccctttctgccccagttttcaggattatttcccaagctattcaacaccctggaaataatgaagaattatgccgtacatttgcaccagagcttttatcacgtgttttacattatgtgttgcaggctcttccaaagttggaaagtggggaagaggttctgactgatgaggagcttgttgctgccattgtatctttgtgccagtctcaaagaaataatcatgaacttaaagtgcagcttttcagcagcttgctgttggacctaaatctatggagttcatgcaattatggtttacagaaggagcttctgtcgtctctcgcagacatggtatttacagagtctgcttgcatgcgagatgccaaggcgatgcaaatgcttcttgatggctgcagaaggtgttactgggtaattcaggaaccggattcaatcgataactttgcatttactggaacaaagcgatctttgggggaagtgaatgctctagtggatgaacttttggttgttattgaactactgctaggagc

SEQ ID NO: 198083 - DNA, 999 bp, Zea Mays
gtcttattgcttacagaaaagcaggcacacgaggcaacaaggaagactctcactgaagttcaggaaaaaagtgaagaacttctgaagaaaattcatgataatgataaacatattcttcagcttcagtttactatacagaggtacgttattgttcgtaggtttactcgttttaacatatgaacttatgctagattgcaaataatcaaatttccacctttttgtctaggacactaattatttgcagaacagttcccatccctcaaatacttgacatataaagtcttacttccttttacaaaaacaggcttgaggaaaccacagttgcaaatgagaatttgctgttgagggagagggagcagaatgacacaacaacaaaagcgcacaatgaaagtcaagaaaaatatgaagaattactaaagaaatttattgatgttgacaggaaaatcgaccttcttcaaggtaccatagaaaggtatgtgatctgcttttctcattggggtctagtcggtggttgcatgtcaagggcatatagttatgagattctgatgctatattccattccttcaattcaggcttggagaaaatacaacagcaaaggattctctgttgctatcagagagacatgaaaaggctgctattaagaaagcacttactgaggctgaagagaaaaatgaagagttactgatgaaagttgaagatgctaatgaaaaaataggacaccttcaaactaagataaatatgtgtgtaccttctctaatgctttgtcaatggtttatccatactcatttggaaggtgggggtggggtggcagtatgcctgtgtttggggagggggtactgtagcaatacaaaaaaattgtaccttacctaattattttacaatgttttatatatattcacacttcccatcatgtgtgcatgtgtgtcgttaagccatcatttgctgtatcgaattataaaattgttcctcgataacacaggcttgaagataatgtagccg

SEQ ID NO: 198084 - DNA, 376 bp, Zea Mays
gtggaatactgcaaaaacttctctgagtgactggtgaccattatttttgggggcactttgtgaaggctggccaaaccttccgaaccatacaactccatgtcataacactgctagacacttctctagacactatacttttctatcttcaacaacatattcactacctccctcatggaaggcctagactggcaagccacctgcgtgcatgaaaccccaaggtccagcaagctcagagccttttcttgctcatcttgagaccaacacgtcatctcctcatccatgaggcttatgatgctgcggcgatctccatgctccaggttagttctcatccatgtcacaatgtcaataccatctccgaacgatgagtccacaggcg

SEQ ID NO: 198085 - DNA, 711 bp, Zea Mays
actacgtgggagatttgttgaccacttggtatctaggagttctgcagcgacctctgcacgctccaatgaactcaccctatccacagcatgggcattgttcttaatcgatttccggccaaacatcctttcaagtatggttatccgcctcgaggttgtcctcgcaagaatcttgccctcaccgacgtcggcttccatcgtcgagctatcacacgaagtgctcttcgacttcctcagctgagcttcctggatcggcacctctcgctcatctcccgacgaggcgggggagacaatgaactccccttcctcaccattcgggtccgcgttcctgaggaagtaagcctcgccgttgctgtccaggtacatgtggaaccctgcgtcgacgccattgacggagatgtcgacaaccttctccctcgacttgagaaccccctggaacttgccgaaccgcacgtaccacggcgagctcttgaagctgccgtcctgctgctgcacaacgactatgtcgaccgcgccgccgaacgggtggaacgggccggagacggtgtacacgctgcgggagatgaggctgcccaccttccccacggcatacatcttgcacgccaccaacgaggcacggcaagggcattagcagcggcgtccaccacggctacgaaatcaaagcttttcaccaccaccacgacccagcgcctcctcctccatccacaagctaca

SEQ ID NO: 198086 - DNA, 1659 bp, Zea Mays
cgacgcgtcaacataccaaaagaaggtttgttatctattaaccttttttttgtaaagaccactttattttctactgtcatttgtatattaataaacaacaccagacacacatactgtaaactatagcatagctgcaagtagtcaatggaattacttttcattattataagtaattgcatcctcttgttaccaagttttatagtttcgtttgtctttactcagcttgctgttgagtgcatattctcttctgcctgcattcggtttgctgagtgttgtccacaagagggaataacaggtggttactttcccccttttttgcttctttaagttcattgcagagttactttttgaagtagttgactgacatcttgcactttctaatttgtgtagaaaaactttggattggcttagaaagtttcgtatttgattggctaattaatgcagacaggtaaggtttaactgcctttcctaacatgtttcttgtatggtaaaagtagcaaaaatctagtatagcagtttcagtttgtatttgtggccaattttttctagcacttcattacaaatgttaagcgaaagggcctctagctgagttggttaggcggtctcccctcgtctgtcccacacatagtcacaatgttcccgggtcaattgggttgaggaacggggtcgtgggttgaggaaaaaatatggtacaagggggctatacctctatgggacgtgaatcatgagtttggtatgtgaacccgagtctaatgcgtcgatgatcctgggtcaattccataggtcgagggctgtgttccaaaatcccaaggaccctatgtgctatgctccatcggctctagcctaataccagcttaacacaacctaacactagcccaatactagcccattatagcaatgatccatctgccctagacgcacataggagccatagagctcatgaggcagaagccccgccgccccgcctaagacctctacaacctgcaggaggagcgtcgacgcaggaagccagagcaccacttcttgctgtccatgagaggatccccgtcctcaccaccatacatgtcgccctgccgtcatctacgttgccttgccccaatccgcgtcgccttgccccaacctgcatgatcctcctctgtcacgaacgagcaccggccatcattcccatatgcactggtacaacgactccctagtgttcgggatgatttgggacgacgaccccgacccacgatttgggacgacggcctcaaatcacgaaacacgacaccaatcccatttgctgtgactatggttccacgctaaatcacagatctaagttttggtctcggtcatggtcgttctcacataggcataggctacaatgctgctatgtacggatgggacaaagtttcagggggtttctcgacctgcgtgaggtcttctcaatgcaatatcaggggctgtcttatccccagcaggtcgattttttttaaaatgttaattcaataaatgcttactgtctcgtttcaatgacatttgccgattttctgagtcctgtcattgtgtttgctttcctttttaattgcagcaccagcttatatacttatggtcttgtggaagctaatttcccctcctgccttctatattttctgcagggttgtgagccaagtagagtatccg

SEQ ID NO: 198087 - DNA, 1310 bp, Zea Mays
agtgaacagaaattctgtgtcagcaattgtcaggcatcctggttcaacagcttttgcttacgtacgatactttttgaagaaatatagagatgtggctggtgtggccaagtgggaaaaaagctttcggaccacttgtgatcagcgcctgttagctgagcttgataacgggcggtccattgatggcgaattgatttcttcttcgggggtttcagcaggcgaggagattgatgagcaggtccgccaaaagttgaatggaaggagttcaagacttgtgcagaatatgaaagaaatagtgcaacggcaagctgatgaaattcagcgcagtttgaaggaaaagaaagttctagcaactcccaggaatccacccacttttgagaaagaagatagctatcaaattgcacatgacattgtttcgggcttagtagaatgcatcaggcaaaatgggggtgcaaatccagatggagacctttcaacagttgcttctgctgtttctgcaattgttgcgaatgctgggcatgtgatagcaaaacatttggattttgcaggaggtaactatcaaggtgttaattctgtgagtaattcactaaatttcgttaggcacactttgcgtgtccatataaattctctttgcttgctgaaagaaactcttggggaccgcttcagccgtgcatttgaaatagctctggctgttgaaacttctggagctgttacagcagcttttgcttctccaaagatgcaccgcaatcagtttcaaccatctcctgaggcccatgatgcatatggaaatcatacaagtgatctcagcaactcagggaaaggttttgttgggagaactgctaaagtatctgctgctgtttctgctcttgtcgtgggggctgttgttcatggagctgttagtcttgagcggatggttgctgctttaaaaataaaagatggtttggatattctgcagctcctgagaggtttgaaatcaagttcgaatggtgtatcccgtcctactggaacttttaggattgaacattccacagatgttttggtacattggtttagggttctattggggaactgcagaactgtctatgatgggcttattgcagatattcttggagattcgtacattcttgcactctcaaggttgcagcagatgcttcctcttagtgtaatctttcctccggcctactcaatttttgccatggttctttggagacgatatatttttaaccgcgaagatccacagctttatcagtctctgtcaaacgcaataagcgatattaccagacatcaaccttttcgggagatttgcttccgca

SEQ ID NO: 198088 - DNA, 450 bp, Zea Mays
tctgtttctaaagatcctgacccaacaattgcaactattggtcggagagcactgtcccttattggtgttgaacaagtggttatgaaaaatactaggtttaacagtggcggttcacatcgaggagagacatctgcgtcaaattttggaatggcacgatcttcttcctggcgtgatatgaagtctggtaagttataaccgctttacttacgatgtgcttggatgctggaacacttagcttcattgggtgtttagggaaagacaaggattttttaatcgagttttcctgtatttttcaggaagcatcttgatgaaatttatgacccctcctgttagcccccctcagcatgattatcttccaggattacgccgagtgtgttctatggagtttggacaacatcctataaatccccccaatggcttagctgatcgccttttaagctctgctgcagg

SEQ ID NO: 198089 - DNA, 479 bp, Zea Mays
aaaacaccgggtgaagttcttttcggaactcctccacgatatgacaaccttcaagtttttggatgtacgtgttatgtaccattatcacctcgtgaacgtactaaattgactgctcaatctgttgagtgtgtttttcttggatacagtcctgaacataaaggctatcgatgttatgattcatcttctcgtcgcatgcgcatttctcgagatgtgagcttcaatgaaaatcgtcccttcttttacaactcttccactcattcttctttttattccacagagtctacctccttcatgagccttcctcccatctctgaaacttcatcagtatcaccacctactgtttctaccccagatgtccttattcccatcacaccatctccgtcttactcttccaaaccacctgtcactcagacttacattcgtcgtcctcgctctactcccacggccagtcctgatgacgatcctgttgctgatacttg

SEQ ID NO: 198090 - DNA, 718 bp, Zea Mays
ctttacaaaatgttgggcggcatatactacccaatactgctactctccctgtagtcttttttagactttgacccgtcgactgtcaaccgctggaggaatagatgcttgattccgcggcatgcatggaaagctttgtgctgatgcagcttttccttctctagctcgtcccccatatccgatcgattcgtttcagagtagtagagtttcttacattcgttcgttgtttcaatattgactcccaagtcccaatatgtatttaccggatctcctagctagctagactcttatttttcaattggagcctttcctctttttcattatgtgataatcatatatcattaggttgctttttcaaataagccagcttatatgatggtattggtcttctctctctcacacacacacaggagaacaatatgcatgctattttctgcacaactgtttagtgcattacagcgcgcacacaataatgcaacaccaaatggagtaggttcaagtgctggctagctaggacagctttgaatcatctggcactgtgctaatctacgcaatgctcacttaaagaaacctctttctctatcagtcatagtagaccgaatacagtgcagaacagaatatttttccccttttttgaaggaaaaatggacatctttttttgttattatccaacaaaacaaagaaaagataatggtttactaagagcatctccaacaacgtg

SEQ ID NO: 198091 - DNA, 287 bp, Zea Mays
cccgccaccaccgacacacgacggcaccagaccagagagagcaagcataagcaagaacagagatcggacacggcccagccaaacccccacccgaccagcgagatcaggcattgatcggttcagaccgtacgccatggaggtttgcagccctagcgatgacgtcatggaggctcagcggcggcagcgcgagccgacccaagccgggggctgctccgacgaccccagggcggtgctgacgtgcctcaccttcctggagcagaagatcgcccacctccgcggcatcatca

SEQ ID NO: 198092 - DNA, 246 bp, Zea Mays
cttccgcaatggtttcaagtgctgcatgtaaattgttttgcaagtacgatgcactaaactgctgctgatgttgctgtgtattgtcactcccaacggctacaacagcaccagtattatcagcaacgtaactctgtgcactgtgggtatctacctgataccactgctgtgtcgcctcatcatacttccaccccgggtagaggctctccaggtatttgggatcagtggagcccaactgtgcattagtgc

SEQ ID NO: 198093 - DNA, 344 bp, Zea Mays
cgggacattaaacttttttgccggctccctctcacattgacccctcagaaaatgaaaaaaaacatttgcggctcacatcactttttatgatggcaacacgttacatatcccatagaacagctcaatctgtagtctttttccccagcagttgttgacactgtaacgttctaagctttctataaaagtcaggtttacttctataaaaaaagcaacaacttaatgtgtagtaaaattttcttcaaccaatcttctaatggccttttgcgaatgtccaaaactttatacttccttaaaggctaatgctagttcaacctgtgaaaacctatccaaaatctgtactggat

SEQ ID NO: 198094 - DNA, 491 bp, Zea Mays
gaagaagatggcgatggggttgccgcgcaggcaggaaatgcgaaggtagcggcaaggggtgtggttggcggggtagacgacgtcgcgcttgggggcctcgcagcgggggcgcaacttgacgaatgcatcgggcttgtatcgcagtccggcagtgagctcccactcgaggacggatttgttgtagatgcggatgtgggagaggaggcacggttcctgcaagcagctggggagtgactactcaattcgaattcgatccccaactacaatgggagaagagggagaagaataagctctagaagcatatggaaacgggaacctggagctcaaggaggatccattccttggtgttggtggcggtggcccagtgggagcgcaggtcggcctccagcacgttccccgccttctgtgacggcgactcgcgagaggatgccttcacccggaaacctagcggtaccacgccatctccccagtccgctgacgtatccctctcc

SEQ ID NO: 198095 - DNA, 275 bp, Zea Mays
ctctgcaccagaacctgatctccccttccttcgccctcgcttatttctagatcctttcacatatcccccgctgatctgtgcatcggctggcattggtgagtggaactcacagttcttgtcggtacacaacagcaccttgtcaaacatctcccggacagtctcttcgtcacacagtgccgactgtttgctcttcctcccctccatctccatgtcctcgtcacgcgggttcttctgacccttatgagcagcaccaactaaaccctcccgcaccattt

SEQ ID NO: 198096 - DNA, 246 bp, Zea Mays
gtgatctatcaagggcatatgggtttagggaggcaaggacccagctgcagagtttatagtctctgtcggtaatggcacggtgtttatcctcttgacgccctattgtggagggagattaggaataagaggggattaggaagtaatctgatgttgcttaatctcaatcgagtcatacaagaggtaaataggcccatgcttattaaggcgtcgcttaagcggtaaggcgtcttggtcgccttgcccaag

SEQ ID NO: 198097 - DNA, 607 bp, Zea Mays
caataaatgattatgaccaggaccatcagccagtaactcatgatgatactcggtcttgtgataattcaaatttcaccaatggcttatctgccaaaaaagatcaccgggaagtcaatggaggagtaaacttagctgacaaaaatgacaggtagcctctataagatgtcttagcttaacattttttaatgtcactaagtgttttattttgcttatccatccttctggttattttttcctgctatataggagcactttgaatgcaggaccaacaagcaagccatctagttcgattcctattcgagtcccaacctttcatgccaggtttttttttatcaaactagtgtttaagtgacagcagtagtctataatcacttataaacacatttcttgaaacattttacagtctgcaggggccctggtattctgtacttgcttatgatgcttgcgtccgcctttgccttcatgcatgggctagaggctgtatggaagctcccgtttttctcgaaaatgaatgcacactcttgagaaatacattcaggtaagtcaactcttgcacataattgaagataggtcactagaatcaaactataaggatgccattacttat

SEQ ID NO: 198098 - DNA, 954 bp, Zea Mays
tgagactggaactgcgacatcatatgttgttgaggttgctgaagctgattctgctgagactgaggttgcatcaaacccattgatgtctgctgagcatgctgttgctgctgtggttgctgaattggcttttgttgctgtaacatatgcatacggacatttggcacggttccaagaagctgctgctgctgctgatttagacttgacacatttccctggtttgccaattgttgtggctggtgcaagggcatagattgctggttcatcatctgctgcgtttgatgcatattcaaaagattagttgactgaactggtagcctttgttgctgttgcatctccacagcaccactctgttgattcactaactgattttgctgtaaatttgactgatggcccattaattgttgtggctgctgttgcaaaggaatgttgggctgttgagttggttgagtttgctgcagagaagactgctggtgcatggactgtggatgttgctgctgccttaccacagacggtgtaggctgctggagtaacgattgcacaggttgttgtaccgaattcagtgcattctgttgaataccactctgtgtagctgactgcatcgccatggattgagtttgtggaatggcaatctgcccaggctgaaggccagatgacatttgcaccatgggctgctgtgaagattgcatctgtgttgactgcaacaaagtttgctgctgctgaatgtgtggttgcatacgtgaattctgctgcaatttctggttcatcaacaatttctgctgttgatacataaactgattatgtgcttgctgttgttgttgctgctgctgcctacctgccatttgtctttgtgcagcatacatatcttgtggagtaccttgtgctaaaccattgttcatggtattttgtggcatgccagacagattctgcagcgtcaatgtctggctgacactcgac

SEQ ID NO: 198099 - DNA, 481 bp, Zea Mays
atggagattggaggatacatgatctaagaagattaatgaaattggggttgtcgtgttagttgtgtaataaatctggcataagcaattgctctgtccatgagccgttcttccattttagctagaaaaatgtgtagctgtgacgtttgttccttgaatgctttattaggccactttggcatcatctcatgtaaataaatgatctgcattatggtcatatatctaacttcctctgatgctgtagatcttgcttaaaggtgctaatggtgatgagctaaaaaaggtgaagcatgttttgcaatatggagtatttgcagcctaccatttggcacttgaaacatcattccttgtggatgaaggtgcaactcttccagaactccctttgaagtcgccaattattgtagcttttccagacaaaccttccagtgctgatagatctatctcgacaatacctatcataccaatccctagtgcttcaccgcca

SEQ ID NO: 198100 - DNA, 778 bp, Zea Mays
gaactctcctgggaattgcttgtccacgcatacggcggaaaccggggcgtcgagctcacgttcccgtgcaaccatggccggactgagcgaacagacgccaccgagagcatcaccggcatgcagaggcacgaaaacagcatgcgaattgaacggcgactcacccgaatcggctggccacgggagggctgggtttcacggtgcggcggacggaattggggaaagtgtggaattagagctcgtcggtgaaccacggggcgcaatactggacgtcgagatacttaactaccatacggaactacgggcgcggtcaatttgtaggatctccaagcggtggtagggaattttggttaagcgcggtggcggccggagggaacatggacacaggagcaagggatgggtggcttttaccgtggcgcttcctccggtgatcaccggttgaggagctacggcggcaattggtgagctggtgcggctagggacgacgtggtgagaagcttggagcgtggcacaaccgcggtgaagcacggcgactccgatgacggccatacggccacgtcgccggtgaacaactccggctgggcttgggcggtggcgccacgtaaggttgttccaccccgacgttatccgttccttactgagccaaattgcgacggcggcgacacgaattgcggtggtgagtcaccgacggtgagatacacggcaccgcagatcttttgttactgtaccatggcaaagatcatcagccgacctgacagcgtgatttgcagggctatttact

SEQ ID NO: 198101 - DNA, 257 bp, Zea Mays
cccccctcacatccttctcctctatcaggcactcaatgttcaccacagcctccgcgttcgcgctcagaaccttcttcgccttctcacaggctgccctcaacctcatactggccttgacatttcctgtgacatcaatcatgtacctgtctttgaactcctcggcgaaatgctcgaacagcacctcgtcgaagtccctgcccccgaggtctgcatcgaacccgtgagacagcaccttcatccccgacatgtcgaaagag

SEQ ID NO: 198102 - DNA, 448 bp, Zea Mays
tagccgttgaaggatcaggttaccattatggtgtaaggccacattcagggtcaacctatgctgttcttactcatcgcacacagagttggcaggggcttgagcaggacataacagaaaaggtcacccttggtaccgagtactttgttgctgcatatgttagagttcatggggaagttcatgagcccattggagttcaggtcactctcaaacttgaggaggacggttcttctaccaactatctttctattgcaaggtatttcgacaataagccaccattcagtgtgttgtataatatatagtcaacactgttttatcactaaacagtttttactaggattttagcctcacaagaacgctgggaaaaggtggaaggttcgtttaatctaacaactctaccgagacgtttggtgttctaccttgaaggcccccctcctggtgtggatttgct

SEQ ID NO: 198103 - DNA, 403 bp, Zea Mays
gcagatggatccgacttcaacaaaggaatctagtccctgcttagttagtaacagggacatgggtcctggaggtcctcaggataactcatcaataacatcaaatggagaaaactttaatcaagagcatggtctgccactcggacaggactcactagattctcctgtatcaactgcctcaactatgtcccctccagctgctttgaaggattcaaggattaacgatgaagaacctggcccatctactggtagaactgttgaagagcaaatcactgggtgcttgaatcaagaagccaagtcaatacctatggccagagaaggtgaacttcccaaagagaagccttttcgatgttcttgccaggagaacatttccagagagtctcatcaaagtgttgttgccagacca

SEQ ID NO: 198104 - DNA, 281 bp, Zea Mays
aagaatgcctgcgccacagactcggccgtgtacgggtgcgccaggggaacgaaatgtgcatacttgctgaagcggtctaccaccgtgaagatgacggtcttgccgcggacacgaggcagcgcttcaacgaaatccatggcgatgtccgtccataccccttgcggcactggcaggggcaacagcaagccggccgggtgctgatggtcgggcttgttgtgttggcagactgcacagccacgaatcagatcctgcaccacacgtttcatgtgagaaaaatggaa

SEQ ID NO: 198105 - DNA, 822 bp, Zea Mays
gtcgcccaccttgaactccagatctcggtgatggccatcataaaaccgcctagcatgttcctgggcctgtaggagtctgtctctgacttccgcgagaaagcagtcctgttcgcgaaacatttcttctatagttggtgtagctgctcctccttgctggtatgggatgagtggaggggggtctctgccatagaccactttaaacggggttgtcttcagggctgagtgataagaggtattgtagcaatattcagcccaagcaatccagtcaacccaggccctcggacgatcccctgtgatgcagcgcaggtacatggcgatagtttttattgaccacttcgaattgcccatcagtctgtggatgaaaggttgtgctcatccttagtttgacgccgactagcttgaaaaggtccctccaaatgtgtcccgtgaacactgggtctcggtcactgactatagagcttgggaacccatgcagtcggacaatctcatcaaagaatgcccttgctactgtggctgctgtgtatggatgactcaatggaatgaagtgggcatatttggagaatcgatcgacgacggtaagaatgactgatttgccatatacctttggtagggcttcgatgaaatccattgagatgtctgaccaaatctgagctggtacctccaagggttgcaatagtcctactggatggagtgtttctgttttgttttgctggcaaactgcacaagaacgaactcaatctctaaccagtgccatgtccatgtgaacaaagaaatttgtcctcaacctttgcagggttttctggatgccgccgtggcctgcgg

SEQ ID NO: 198106 - DNA, 294 bp, Zea Mays
ccagaagcctccccaaagatcctcagaatttctttgaccacccgccgtgacttcgttcctgttgggcttcaaatagaccacgacatcatcggtataaagattctgatttgggacatgtcaaaaaattctgattttcctttttggcagcacatatgttcgacttggtcaattttatgtttgaccatttgaacctacatggtcctcactagatgttgaaatttgggacatgtcaccatctggataatacaatgcatttgttcattcttttcagggttaccttgaatttggacgctt

SEQ ID NO: 198107 - DNA, 396 bp, Zea Mays
tcggcaccacgcctaaatccttccaagccgataatgggacagaggttgtcaaccacaccaccacttcctccggactaccaacaacaccatccgcaccatgctcctccatgtgtccatgccacctccatactgggttgacgccctcacaacagcaacatacctcctcaataggcgcccctctatacaaaaccacatacctcaccaaatacttcacgacacactcctagattatgcctccctccgcatcttcggatgcctctgctatccgaacctcactgccacctcctccaacaaactcgcccctcgatgcactccttgtgttttcctcggatacccatcctcccacaagggctatcgctgtcttgacatgtccactcgctgcatcattatctcgtg

SEQ ID NO: 198108 - DNA, 382 bp, Zea Mays
cttgtattttcctccaaagaacccatgacggtgatgcttccaccctagaaggccatgttttcctcctaacccaatgtgtttcccaaattttccatgctttaacttgccatagtgtccattataatgatgtttaaacttgccaaaatgtcctaagtggtgattgtgagggtgatggccatgggttaagtgatgtacaccataggtagcggcggcggcggctgctgctccaccaatgagcgttgcccccatgttatatccattacctatgaacatgcaacattatggtatcaagttatatatgtatatgtcacactatacttaaacaaaagtgaatgcatgatcaagacttatatagtataatatttgataccttaatctaaca

SEQ ID NO: 198109 - DNA, 413 bp, Zea Mays
cggcgcaatccacagggggggagaggcggaaaaaaatctctctccaagaaccggtacaagaactgaagcgggattaaccggagacggcgaccacggggatcgggcgggcgggcctcattagcagcggcaaccaaccaactggcaacaatcccgcacgcatcacagaggcagaaactttggaacagtctcggctcgaccagggaggcgtcaagattggatttttgacgatgtgtggggaggccagtccggagattctcgcggacttttcctcctcggattttcgccctgcccgcctgcctgctcacatgctcgcaatcacacgcatcgctcagcttgatgagttgatgtgtgcctgctctctgcgggtgctggtgtgttgttttccctgcgctttttcgttttctccttttcct

SEQ ID NO: 198110 - DNA, 419 bp, Zea Mays
caggtgggcacggcgagggtcacaatgaagaaggggggatgatacactgtcggctctgcccgggagcggggtggttcacccacccgtgcatgtccctgatagacatgcatagggttggcgtagcgagaaggggctagggccagctagggcacctgggagattcgtaatgccgtgggcgaggtcagagaaggtgagggcaaaggcggggccaacggtgctaccggcagtctagcagaggccatctaggggctcacagtccgacctaggcggtaggatagcccggaaggaatccaggggaacacgtgtcgcgggcggcggcaacagggatgaacctgcagtgaaaaaaataaaagggtggctgaccaaagggagccacgagatcaagttcaagaagaaagtcttactcgagaagagagtcg

SEQ ID NO: 198111 - DNA, 228 bp, Zea Mays
gccgacggcgtggtgccgaagcacgtctctgcgatgttcgtgtgacggctgagcttttcagggaggcggttgtgttccagtttccgtggccgtgctatgactttgtatgcgatcgacgtcgatgacttgctttgatggctcagaataaagatgtatgagttggcgagccctgacgacggctgcgtgcttggcattgctatactcgccgttatctgttactattacgag

SEQ ID NO: 198112 - DNA, 566 bp, Zea Mays
ctctgatcttctatttccctggactgtgcgccaatttctgggaagggcaggggtctccacgcaaattatcctaagactcagactaccagcgctaggacgaagggtttattctgtaaaaaccaaagggatcataagcaaaattgccacgccgaaggggtatcgggtggcatcaaccgtccgatctatatcagacgtcccggattagactcatctcaaaccgaaacggtacacaatctattccactggatctgaaagcaacggtctagattttattatagcccgatctattatcactcctccgatctcatctcgatggctcggattcatcacggtcttagatctaatctccaccgtaggcaccaggatcaacgacccatagctattttctccagatcgaacctagctgtcaatctccaatctaacggccagcggcccttcttccctctccaccaatcctaacgctggcgcggcagcacccctgttcacccgcacggcggcgctacaccggtgatgtagtcaattcgcgcacaacctacaagtctcccaattccgaaagctcctactcg

SEQ ID NO: 198113 - DNA, 208 bp, Zea Mays
gattgtgaagagtcatgttgtgctaagcatcataacattagaagacgtgaattgaagccatcggtttaactcatatgtgatgagatggttcaaatcataaggctcaaggtatgctagctcaagtgaagaggagaaatatggtcacaattccaaagatgaaggtatcaaagctagagaaactagaagggcttgctattgagcaaacttt

SEQ ID NO: 198114 - DNA, 602 bp, Zea Mays
atttagcaagtgatgacagcgcgtcagataatgaaggtgtagacgattctgaggatgaatctctgccaaatgggggatccaaacggaagctaacaaaagaggagaggttggctcttctgctgcaaggagacaaatctgatgaggagcaaactgatgaccaggatatggagattacattcaacacggagcttgaggatcttagtaaacggatcctagagagaaagaacaatgaggagaagaccatctgggagaagcaccaagagaaaatgaaagagaaaaggaagggtaggaagaggggactaaaggacgaagatgatgataaccactacatcagcgatgatgagcctgagaatgatgatgatttctttgcagatgaacagtctgatgaagaacctaagccgagcaaaagcaagaaacacaaggcaaaggcaaaaggcgaagcaaagaggaaaggaaatgatgggaccacagatgagcatttggaacaagaagcaaccaaagatgagttggagctcttggttgctggtgaccaggatactgccaatggtgcaaagggttataacttgaagcgtaaaaagggcaagaagggcaaagaggaatct

SEQ ID NO: 198115 - DNA, 714 bp, Zea Mays
cgacggcgaggatggaggtccttaaatatgtccaaagcgaggctgccacaccaatccccatcctccactaacgaaccaatatcttacaggtactctgcatgtgtgtgaagccgtctccgcctccaccaccctcggtatggacaatcgattcctcttcatctccctctcgttgcgtcgtctcctgttgcgatgtggatcgtcgatgcgaatggaatgcggtgtgtggtgtaattctggtggtttttgtgacctacgagtcatctccttaattccaatctggtatttattagtatgggtgaattgtcatggatttgtgatactccactgttctggggaatgcatatgtttttcagattgttaatataactctgcttcctgtgagaatacaggatatgtttttcatgtcatggcccatgggctctgaaaacttatgttagactttgccccggtttctaattgcaggcagtgagtggtatgagtggttgctttcaaattgcctgatgcacaatccctgcatgaggggcctccttttgtcagtgcaaacagttttctgttttatcaatattttccatttttaactgccacgtactgttgtttacatatagagtcaatatgtttagttgtatgtgtcctgtattgagccaattagcatttcttgatttatttattgtggcagcatgtggatgagccaactgctttctactgtttaagaca

SEQ ID NO: 198116 - DNA, 470 bp, Zea Mays
ctggagatggacttccactttcaagtttctcctctctgctggggattctgctgaaggtttgtttctttagctgtcatcttttgattcgttagattctcttcggttttgtttgttgatattttacatttcagggagcgaaccaaattgatcaagatgaagtgtctccagctaaagaacctgcgctggtgtcgtcagttgcagatgacagaatgatacttcctgctaattcacctgttcctagctcagtaaatctacctatcgaagagaacagtaacagtccaacagttccattatgtatagaaacaacagaggccaaagtaaccagtgcaggtggcaatagttcgattgatattccagaatcatcagaagcttcccatgcctcaacagagccccagggaacccaagagcatgctagcacttttgccggtccatttcctgctgataatttctcagttggatttagtttggca

SEQ ID NO: 198117 - DNA, 654 bp, Zea Mays
tgcactctcttattgcagtttcaagcttttgactttcgggtgctgacccgaagtgagccattttcgcaactttttcattgcctctatgtgtacccattgactgttagcttgagccgcaaaagaaacctctttgttagagtggaactgagaaaggacgattctgacatcaggaagcctccattagaggtttgcttgctggattttttgtcatcctgttgaatgttggtgtctagtcaaacatccttatctattagagatgtgggcttccaggctgttcatcctagggagcggaatacgatgctacagaagtggggccatacacagattgctgttggaacaagaatggcttcctaccatgatgaagttaaaatcagcctacctgctcttttgacaccccaacatcatcttgtgttcacatttttccatgtagatcttcaaatgaaacttgaagcaccgaaaccagtatgtgccatgttccttattagtttggattatgcttcattgtttagtttgctcatgtctgacatgttctttatttcttcaggtgatcattggatattctgtacttccactgtcgacacatattcagtatgcatcatctactcaattatttttcagtgtactagtaacatcatatttactctttgtcacttg

SEQ ID NO: 198118 - DNA, 1086 bp, Zea Mays
ctcctcttctcgccgtccgctgcgcagcctggtgagccgtcgctctcctgactccttccgagtcccaatccccattctcatgtccaaagattcgttttttttaatttcccctggttgttttgtttagggcggcaccgccctttctctacctagtttacgcatgcatactcatatagtcagtgtcatggggagaatgttccggcttctccagcagatttgcgagattgcaagaggaggaatgtgcatatccacactgaccccctgtttgattttgctcctttgcattccataaatgttagtgctagtaaatctaacctaacggagtaagcaagcaactactctgaattggctatctcccatcacgaagaatgggtttcacaaaattgccatcagactcctcggtcacaattataaccacaaggagtcaacgattacaatggcaaatagctaattatatccatttgtggaatgtgtgtgttgtactacatctaaacctcaccatctttaatttgcccccttcccatcctgctcctgcaggtttcattagcttggactgcgggggagctcgtgatcacacggatgccattgggatccagtggacctctgatgccagcttcgtctctggcggccaggccgcgcagctgctggtccagaatggcctgcagcagacccagcagcagctgaccaccgtgcgctacttccccgcggacaacaggaagcactgctacaccatgaacgtcaggaacaggacgcgctaccttgtcagggccactttcctctacggcaacttcgataacagcaacgtctacccgaagttcgatatctccctcggagcgtctccctggtccaccatcgtcgtcgacgacgccaccacccccgtcgttgaggaagccatcatcttggctgctgctcccacgctcagtgtatgtctctccaatgccagcacgggacagcccttcatctctactctggagcttcgacagtttaacggttcgctctactacaccactgacgagacacgcttctttcttggactgtctgcgaggataaattttggcgcaggaagcaatgattcagtgaggtact

SEQ ID NO: 198119 - DNA, 346 bp, Zea Mays
atcatttaggtgcagctgctgattatgaggaccggaagcttcttaatacttctgcacagtcaaatgaacataactctgaggatgctaattcttcattaacaagcactcttccatcatctgcttctgtaattatggctgatgccatgtcgatgaatgacagaaatgtggaaaatgagcagttagaaactgacactactcgcagcagtgttgatgacgatcagcttcaacattcttcagcagctgatcaacaatcggtaaaaggatcgataggttcaagaacttctgacatttgtgctgatcgaaatttggttaggtctacagttcttgcacctagttatgtgcctag

SEQ ID NO: 198120 - DNA, 231 bp, Zea Mays
atgaactcaggagtgtagggaaacgagcaccaggggcactcgactgagttgttgaggtgggggcagtagcagggcggatgaatacaggttgtttgaagggataggagggtggacgaggtagagaacaattttgattgaaaggtcggatcaccaacctttgtcgcttttcaggcccttggttggacctgtcacctccaaagccctttgacttccctgggcctgcgtacttag

SEQ ID NO: 198121 - DNA, 281 bp, Zea Mays
tatgttgaacctttgctaagttctccaatagtaagcgatgctgcattttgtacaatgttgaggctagcacgttgcacagcccctcctctttgcaattgggcgctcgacattgctgctgcgattcgtgtgatatctgttggtgattttgaaatggttttggatcttacacctgtgatcatggaagatgatagtaagaagccatcatctggcatctttgaacaaatagtaaatgggctgactattgcgtgcaaagcgggtcctcttccagcagattcatttac

SEQ ID NO: 198122 - DNA, 1585 bp, Zea Mays
aagcgggcatgcaagagaaatcagcaatgcaggtagggcaagcgagtcgtggggctagccttgaccctactgaggagaaaatcttatttgggagtgacgaggatagcaactggggagctttgttgaggggtgacaatgacaatgtcaattctttggacaatgacaactatggtggtggctactcatctctacagagcggtagctggagtgcccttatgcaggaagctctccagtctacaaccagtgaaagtcccaaagaagagtggagtggcttgagtttccataaaactgagcaggtgatggctagcaatgcaaatttatcaggccgcaatggtagtaagtttactggattaagtggtgcaaacctagaaaatgcacgtccttcgccagcgtccagctatgctgatggaacaatgaataacccaaaccttgccagttttcagcatgtcataaggcctccatccgagcgaagggaccatatgtctcatgaatcttctaatgctcctgttaacaatcatcaatcaacttctgaagtcaacaaggggtactttcagcaaggcataaaacaaattcactctgatgcaaggcaaggacaagcgcacctagtaaatggaacctggccgcatcaaaagactgaactgctcagaagtaatttgcagtcaactggtgtacatgctacaccacctggtggacatggatttgggatgtcacaacaaattgcaactgatcacaatatcaacagagagtccagtaataatcaaaatgactggaaagctaacaatgcacttggacaagacatgtgcaatagccaaaatatctttaatagcaatgagaactcttggaagtcaactggaggtaatgccaattcagtccagagatttcagcagaggaggtctgatgtaagcgctactaatgaaagttcagatggtaaaaatattagcatgatgagctcaagcatgccaatgatgacacaggatcattaccagatggtcactagtcagagtggtgagcaaattggcatgaaccgtaatctgacacatagagctccagagacctctgagtcaccaggaaaaagcgcagaacaaagaccaggtgatttcaatcaggaatatctaaatgcaatccctaacgaaagagaaacacacatttcaaaccatggtcgacacataacaagtgattctgcccccagaaggcattctgtatctgctgggaaggaatctgaaaatttaggtcagtctagtcagcaagcaatgggatcttacatcttgcagaaccgtgctatggggagttctggaatgaacattggtctgtctccaggcaatccaatgtcaaatagtctgtttccacctcagacacgaaatagtctgcagcatcattttggcacaaactcccatgtttccaatagtatgccgtcagcaagtgaggtatgttcctatttcatctccatgactgctgtgcttgatatttctgttcattctctttgtatcattacccattcttgtgttgttctggttcatgaggcagttcccttatttgtagaaaatgatgatggcacaggaacaacttcaatcgcgacatggtctcc

SEQ ID NO: 198123 - DNA, 328 bp, Zea Mays
ctggtagttttcctgtcgaaccatttggttattatggtcagttcccacccaactctgaagttgcagcaaggcagggcccagggcatggtggatatcaggctaaaaatggagatgtgtatcatcctacgcctcctaattcctatattatgaatcagcctgttattccagtcagaccagtttatcagggtccagtgccgtatgatgggtattatggccctcgagcacatttcaataatgccaatgttagagatcctcattttgttggaggtcctggaatattaaatcaattccctaatcagaatgacaggtttcaccctggacatcctca

SEQ ID NO: 198124 - DNA, 287 bp, Zea Mays
cagaacatgcagtataccatatggtctgattacttttggtgcttaggttccttttgacatggctacagattctttttacggaacaagaagatattccttgaaaatccatccctcacatatacacaaaaatgaatctatttgatggaagcaggtaactattctttatgatcccaatgtttcccaaccctcctaagatagcagattggaatgcaacattttatgactgaggtaatttaattacaacctctccttttatcctctataataacttaaatatgtatgagatg

SEQ ID NO: 198125 - DNA, 798 bp, Zea Mays
ctctcccatcagaggcccactcattcaaaggcaactttcttgatgttgctgacacagagaaattatttgttgcgggcattcttgatgaattaaagatatgtttttcatgtggctatgaggtatttctttcttgactattttttttgtaaccttgattcagtgtttttgatgcaactcatgcttctgtagagtaaccacaaactaaaaaaaattctactagctaaggagagcagcctgtttgaatttcgggcagttggtggccaggtatcgatcttttttttgtttgattcttgcttcgtgaatcttattaatatatgtttttttccttttggaataaacaggttgaactctcaatgaaaggtggcaatttactgataggaactattttggggtcactagaaattgaagaccagtattactatccagggagtcctgtgccaaggttcttggcaaggtcttttattaatagcatgcaaactcaagaactcccgtctcttagccgaaagaacagtgcaggacctagaaacaccccattgatgaaaaatgacagtgaggaaaactttttcgaagcatcagatgattttgatgaatttgaaacacctatgcatcaaaagaggactatatcagactattttagcacccagaaatttttgcctactagcgttccttccctacagccgccaacatttaagcgcattcctgatttgataccagatactgaacttcaaactggcaaattcacattggaaggtagtggcactttcaatagttttgtgaaagctcagatagtgatttatg

SEQ ID NO: 198126 - DNA, 210 bp, Zea Mays
ctgtcagacaacctgtaggccaccccagccaggcaagcctgagcaaggaacgatcctctacagcaaccagagcaagcagtagagctgaactcatagccgttaatcacgctctggcccacaggtcatgtctcatcaaccaggcttaagtgcttgcctccttattaatcaaggatgcaacggtacgatcctatagaacagatcctgttcaag

SEQ ID NO: 198127 - DNA, 311 bp, Zea Mays
gtaatccgctgcttaaattcgttgtgtcctcagccgattgctataaattgccgccaccactcgctccgttaggtaattgcgcaaccagtggagccattcgtgccttaaatcgttccctagagcttgagaatttcttgtttcccccaaaacagttttccgccgccgtgaaagcaccctcgccgtggccagccctccacaggtctgatcatgccctctttgttctcgttttagcatctttgtatgctggtgatgctcaccaacccgcccaattgaactagacagccacccatcgccgggaacacgagcaaatg

SEQ ID NO: 198128 - DNA, 334 bp, Zea Mays
caaggctgcccaggtggggcccaaggcccaatagctaatagataagctctatctagttagttatacttatccaaagttagtagataaagatcagctctatctagatagttatacttatccaaagttagtagatagacttgagatagctctatatatagatctgtaaactctggaataaagataagcagaattccaatctattctggcttcccagagggagccagagtctcctgtgatcttctccctgcgcgcaacccagccaggatcacgacggcgccccagcgccgccaccctggtcgcaccaaatcccctccctacaatctgcgcaatctgc

SEQ ID NO: 198129 - DNA, 202 bp, Zea Mays
cttagttgcggtaaattgttgaattaagaagaaaatgtgttgcgacacagttgtctatcttcacacttttgtgaattgatttaagggtgtcactgtttttctccaattcatctatcagtctgctacacacatttgtggtctccctttattttaattgtgagtcaactatgtctatcttcacacttttgtgaattgatttaag

SEQ ID NO: 198130 - DNA, 295 bp, Zea Mays
gcataatgctttccataatcaatgtttgacttcatctcactcttgtcaactgtcttatctgtttcaccagccctgtccataagccttggcttttttcccggacgtgtatcagcactactgtccatcttgtgctgcccactatctggcagcgatttcttattggaagaaaaccctgcagatgattttccagtcaattgctcgtcaggcccgccatgcacaattttattataatccattttctctgaatcagtagttagtgattgttttgtcatgatttttgacttcttaaattctc

SEQ ID NO: 198131 - DNA, 200 bp, Zea Mays
atatagccgttttccatgcactcctactctagtctaaatctttggatatattttaacctttcgagtctccttttactgcttccctatatcaacttcggtcttcctctcgtgcaatgagcggtaccgtttttcgacgacatgtgagaagtagcatcgaagtccatgatctagcctgtctgggatggttgcaccatgttgtt

SEQ ID NO: 198132 - DNA, 648 bp, Zea Mays
ggaagaagtaaatcgccttctatacagaacaaggctagaaatgcgtgccgcattacaatcaggtggacgctctccaaagcgcttaaatagtccttcagcttcccagcaactgaagactgcttcagatggtacacagaatggtggtttgtctagaggaaagaagagagagagaagtgaacagggagttgatccagccaagcgggatcgtgatcgtctacttaaggttgatgacggtgagcctggaagctttaacttggatgatattaagtccgaaatagcaaagataacagaaaaaggtggacttccaaatgcagaagcagttgcaaaacttgtacatcttatgcaacttgatcgaactgagcagaagatagaccatagtggtcgggttatacttgctgatgttattgctgctacagatagtcccgattgcctcggcagatttgtccaatcaaggggccttcccgtgttggacagttggcttcaagaggcccacaaagggaagtctggtgatgggagtagtcctaaagaagcagataagcctattgatgaacttctcttggccctgcttcgtgcactagctaaattgcctattaatctcagtgcattacaaagttgtagcattgggaaatctgtcaatcatctgcgcag

SEQ ID NO: 198133 - DNA, 347 bp, Zea Mays
cccagacataggctgcaacaaattattcctggaagccatttgaattagggaattaaggacatccataatcaatatgaacagtaagggggagagagggtctccctgccgaagcccacgaagatgagagatagatctcccaggaattccattcaataggacttgagagcttgcagtggacaagatctgacaaataaggttgcaccactgctggccaaaccccaagtaacgcattacttctatcagaaaaggccaagaaattgtataaaaaagccttcgagatatccagcttcagaaggatgtgtggttccttgcttgtgtgaagtgttctgacaagatgttgcacaaag

SEQ ID NO: 198134 - DNA, 1309 bp, Zea Mays
cccaaatggccaaagccgccgcgatcgcgagctgcaatacacgcgcacacccaccctgcatgctcgaccgctcgagcggcgagcgccaagcagcccaagctggatcacaaccctacgcggccacgccacaccacaggccacaccgtatcgatctgcacagcaaaagcagtagcagcatgccagcatccgatattccgatcccagcaaaaacaattctcacagaaagagattattttgccccctcaccaatcctgctcccaaaactcctaatcttttaatccgcgtttgttttcctccggccgtccctggcttgcagcagtaatgaagcggaggaggaaaaaggagaaaacgaaaaggcgcagggaaaacaacgcaccagcaacagcagagagcaggcgcacatcaactcatctaatctcctcatcaagctgggcgatgcgtgtgagcaggcaggcggttagggcgaaaatctgagaagtccgggagaatctccggactgacctccccgtacccgtcaaaaatccaatcttgacgcctccctggtcgagccgagactgttccaaagtttctgtctctgtgatgcgtgattgtttgccgctgctaatgaggcccgctcgcctgatccccgtggtcgtcgtcgcccgttaatccgcttcagctctggttccggttcttggacagattttttcgcccctcttggttgtggattgcgctgtttttgtttgtctggatctgcataagggcgtgggccgattcgccaccaccacaagcagagacggctcctcttttttattgcctccacagtgggatttgctttcgcgttgttgcagtatctatctatttctgcgaatcatcttctagggctccgtttgttctcgcgcactttacccttcgctgcccccatctcccagcaccgaatccgcccccttcccggccgtcgattgagggcgtgccgctgccgattgcgccgcaaaatcgcgtcttggtaaggccgcacgctcagattcgtgagtttcgctgcggatttggttgggatttgggggattcctgatgcgttttctgtgtcccagggtttggtccatgaagaagtggggttgatttctgatttcaaggggaggtttttctcctgcgcggccgccgccagggaggctccggcctgccagccatgtctcaaatccaaagcttctcgcggaacaactgtgtgctccttgtggtgctgtgtgggaagtatgctgagaagcgagcaccagcagcgaagtctgggctggaggcgaagcggccacggccgtcttacccattcccggagctc

SEQ ID NO: 198135 - DNA, 269 bp, Zea Mays
ctgcacgatgatctctgacgcgcctttgacgtaccagcggtacctgccgtcgggtaacgataccagcaccgccatcatcttcttgaccgagttgaaaggctcgaccttgaccttggtgcagctcctgtctccagcatcacgacgtcgtgcttctagcttcagtccaaactccaagatcgccctctctgtcggggttcccagaacagcctgcccgccgtccttctctctgaccacctccgcgctggtgttctcaaacacgccctgcagga

SEQ ID NO: 198136 - DNA, 212 bp, Zea Mays
gcttatttcaatgccacctgggcaagtgatccgatggaacaacgctctattacaggttattgtatccttcttggatcctctcctattgcatggaaatccaagaagcgagcagccatttctcgctctagtactgaagctgaacttctagctcttgcaaccactactgctgaaattatttggttgcgatggctactggctgatcttggtgtatc

SEQ ID NO: 198137 - DNA, 534 bp, Zea Mays
tttcattgtaacctgtgacatcaatcggtcacgaatatccgccaagaattcatcgcgagcatgtagttgtttgtcaatatcagccacctgtgatgttcctggatggtagggcagaagagcaggaggttctcggccatataccaccttgaatggagagcatcgaagagcagtttggaaggaagtgttgtagcagaattcagcccatggaagccatttaagccactctcttggtctatcccctgccaggcaccgaagatacatggtgataattcgattgaccacttccgactgtccatcagattgggggtggaatgctaaactcatgggcaacttgactcctgccagctggaacaattctgaccagaatgtgctagtaaatattgtatctctatcactgacaatggagtaaggcaacccatggagacggacaatgttatcaaagaaggcctttgctaccgatgctgctgtgtaagggtgtcccagagcaataaagtgtgcgaacttggagaaacaatcatcaaccgtgagaatcac

SEQ ID NO: 198138 - DNA, 346 bp, Zea Mays
atttcttcttcggctcttctaatagctccctctagactgggttttactctgtcaaaaacgcacccatttctatggttccagagagtccatagcccaacggtaatcaaggaattaagcccttttttagcaatcccatagctgctcactgattttgctccaccattccatagttttaacttctcccaactgaggagcaaagccagacaggttgacctgtcccagcagctgaaatcaaaagctcctagcacaacccaccaaaatgtggtctatggtttcttgatcttggtcacacataacacatttgtcaggatggcttaaacctctcttgtgcagacggtctgctgtc

SEQ ID NO: 198139 - DNA, 308 bp, Zea Mays
cgtaattcaactactcactagccataaatcacgcacgaccactaccacatcgaccggttaatttatttggacaccgcctagcgtaccacgagtaccccgcattttgactcgacatataaacatagaggaggcgatgactacttcgtcatgtcaccacctctctatttaagcaaagaccatttccacctacaacgaccgaacattcctatcgagcacaccttatattttcctgtctcgcatacgaccatgtcatggcgtgcactcgagacacttcactcaatgtggcgcgaccactaatataaatgaac

SEQ ID NO: 198140 - DNA, 244 bp, Zea Mays
cagaggtgctcaaaagatcccctacaaccggaaacagaggtgttgctggagagtttggacatcacatcacgaccggggtgaccgagacgacgatgccaagtcatagaagaggcggcgacagcaagaacacgcggggcagaggtcggtgtagcggaagcaggcaagcgaagtgtgtagagtggcccggggctgtcacaccgagctagaagggtcctggtggcaagatccttcacagaaagaccaa

SEQ ID NO: 198141 - DNA, 417 bp, Zea Mays
gaacagccaagaatactgttttgcttagatcagccaaatgaaaagaacatgcatgatcaggttgattcttctaaaccagtttccaatggaaacacacatgggggaagcacctttagacaatctcagcaaagggaaaacgtttgtaattcattgatggcagttcctccctgccatgtagttgcaaagaagtactccaggtctgttgctactgctctgagtctgggatctgattctgatattttgcacaacggtgacaagcttccaaaaaggaattctagaaagagaggaaaacagtgcaagcgaacaatccgcaaaaggctgaatttggcatcagaaaccatttttgaagagagtacttatggtgcttctcctgcggaggtagttccgaccaatttactggttgataagttgtcagag

SEQ ID NO: 198142 - DNA, 337 bp, Zea Mays
taagtgctatcatgtttcacaaaagatccagatgcaatatcagttggacctctcccatggtaggaaaacatactttatgctttcaaacatcagagcaaagttgtgcgacagcaggactaactgtacttcagtaaaacacaatatgttgcttcctggcagattactcattttccaattacgtcagtgcaataatctaagacacaagcactgagcagaaccatcagatatgtcaaggtttacatcaaggtgcaagaagattagctcaaagagaatataggatgaagggttcactggatcaacaatactatcatgctttaatttacttactgaactgcag

SEQ ID NO: 198143 - DNA, 283 bp, Zea Mays
agctactcctcccagtcccaggctcactgtcgctcctcccaagaacccgcccaaagaatcctagaaatccaagaaagggagcaaccaaaacaggaggaggtctgcaggaggaggagcaggtcagcaggaggaggtggtgctgaaggggaagatctcacaagtgtgtgaagaccacacagtctcgcgcactcgcaaacccagtgcgcgctgcggtcttcctcttcgcccaccttcttggagcggggaggttggccatgaggaggtggtggccggctgccctgct

SEQ ID NO: 198144 - DNA, 315 bp, Zea Mays
cgaagacgaacaccatgagaagccaccaccatggatacagccaccgccactgccacctactcgtacagtcttcaatcctgcttttcctcggaacttttgccgccgcacaagctgcatccgacatcctcagcaagggcagtaaccttactaacggcgagaccctggtctccgctaacgggtcgttcacattagggttcttcactcgcggcgtgccggcaaggaggtacctgggcatctggttcacggtggccaactccagcagcgacgctgtatgctgggtggcgaaccgggacctccctctcggcgacacctccg

SEQ ID NO: 198145 - DNA, 245 bp, Zea Mays
gggggctgtacgaggagatggagccgtatgtgtccaagaacccaagaactggatatgtcaactacagggacctggatcttgggacgaacgagttggaggacaatgtgactagctacgccagggcgaggatctggggggagaagtatttcaaaggcaattttgagaggctggcagctgtgaaggccatggcggatcctaatgacttcttcaggaatgagcagagcatccctcctcttcccgctgca

SEQ ID NO: 198146 - DNA, 243 bp, Zea Mays
aagagaagcacttcatgctgaaccaacaactttccttctaagcatagaagggatgccaggtttggactggaaaaggctacgtaagctccagtgtccagatggctcctacatgtcttcgcctgctcccacagcttatgctctaatgcagactggggatgccaagtgttttgagttccttgataaactgatcgacaagtttaacggaggaggtatggatcgaagagcacataaaatgctgacaag

SEQ ID NO: 198147 - DNA, 283 bp, Zea Mays
gcaaagccatggatgtgcctacgcctcccaaccgtgccggctgcaacagtaacatcggcagccccatgcaatcttttgatgatccctttggtgttgctgccatgacgagctttgatggatactcggagctctgcagcccatcagttgctgatcacatattctccctgctgaatgatccctccgctgcgcaacagatggttgccatgtggtcatccttgggctcatctccgcgtgcttcagctgtgagagaagacatgtcgtttgacacctttcctgggcctgt

SEQ ID NO: 198148 - DNA, 670 bp, Zea Mays
gccggcagcccacgtgggaagattccacggagcatatttttggcctctttggaagacacctccgtagggatatcggcccaaccccaagccaagcttccacccacggggatattggcctggcctctagacgtcgggcggctatccctcccgagcacgccaccgcctctgctcgcaactatcccgagaacactgccgctgctgtcacctcggatctaccaactccgcctccacaggtgagccacctccgctcgcatcttgtagattgaatcagacacgagtagtttcttgtagatcgaattcagacttcgatccgtgcagcccaccggcaagacgtcgagggcgtgcgtcggctcggcgttgcggcagctgtacccctcgatgtgtgctctctacgacgtgaacctctattcctccacacctgtaccccttccccatggtcgggccacacgctggactgggagcatgcccctacgcaccttccaacaaggggatgggttaaattctatatctcttactcatgtcttgagcacaaggggctaggttaaattatggtgaaaatcaagtaggagttaggatttggagctgttttttaatttctgaaggaagaacatatgttctccaaagtgttgctgaatccttctgtctttaaatattaaaactgttatctctt

SEQ ID NO: 198149 - DNA, 543 bp, Zea Mays
aaagaatgctcgagctactgtggctgcggtgtatgggtgactcatggcaatgaagtgtgcatatttagagaaccgatcaaccactgtcaatattaccgattttccatggacctttggcagaccctcaatgaagtccattgcagtatctgcccatacttgtcgtggtacttctaaaggctgaagtaggcctgctggttgaagagcctcggttttattcttttggcagatgacacaggagcgcacccaaccaatcctttactagtgccctgtctctgtgcatgaagaagtctgatctgagcctatgtagtatcttttgtactccaccgtgtcttgcagaatgtgcgacctctagtattgctggaatgagtgtggaggaggctggaacaaacacctggttgccatgcattattagtccctcctgtgtatgccatggatcccccaagcttccttctttgatctgtgcactgagctgctgcccttcctcgctttgtgcacattcttcttctagatctttgtacagttggaaagtgggtgctgttagag

SEQ ID NO: 198150 - DNA, 394 bp, Zea Mays
gaagaacctaaacctctagaagacgcatccgctgcaacccatgtcgagtgggcaaagtggacacgccccctccatccttgcagaagccattgcccatcctgggagatcaggaagtccttgtggtgatgcttcttgaccatatctctcactagctctacagtgctcatcttcagtgagagctgcctcaggccagcccgttggtttctcgtgtgccattgtctgtacctctcagggcgttccaccaggtccacgccttcgcagctgagggcattcagcgcagaacgtccaagcacgacctgctccagcaccattcgagatttactctcccttgggattgttgcatcgaatatgtcaaacagcgccatgtaatagaacaacatctctcgaaaacgtg

SEQ ID NO: 198151 - DNA, 213 bp, Zea Mays
aagctgaagaatcaaaggatgaaaattaatgcaatttccaaaaatattgagccctccgacagaggcaacactgttgaaggtacaaaaggcttctgctgcaactcccaagaggagaaggatggcgaatgtgctggatgttgtgctggaacaacaaaagccttgagtcctgcttctacaaggaaagttgccgaagctgccaaagcgcaacccgaa

SEQ ID NO: 198152 - DNA, 959 bp, Zea Mays
cacatgtactcagaatgggaagccaagagcacaggatgtacagtatacacttttgacaaatgtaactagaaccagtccaattctagcacagtttctttcagctatatcacaactgtggatgtagatgtaactgaaaaacaggacacataagaacaggagaatactgaatatttcggccttctacttgcgagctgatgcaatctaacatgactaaaagggtaattttcttaaggaaatattcaaaacccatgggcaacacctgttcctaatctcaaacaaacgcatcaacagtttaatgttgatctaacttaggacctgactaaaacaggatacaatgtatccctgcatatataaataaatgacaagatagtaacagaaacattagatagcagttaaccctaggtcaaagcaatagaagaagtggatgtgtgctgcgcaatctgttaagttgtgcaagcttgcaattagccatctaacgcatatctaatggtgacagataattttacgtttaacccagcaaggattaaagagatagagggtgaggtgggacgggttgaaggtatgcattagatggcttaaatcatgtaactgcacgcttggagaaacagattgcacaggatacgacctcttagaagaaactaggtttaagttaatctcagcaggaaagttagctgaacagcagagcaataacagaaggaccatcccaacagcacatttcactccagaggaaaggggccttaacttctactcccttctagataacactacctctgccttcctcgatctacggactgtatttatagcctgccttgaatcaataaatatcgctaaattcttcctataaagtaaggatcgcaccgtaacagttggtagattcggcaacccggccatagccttgatcccattccgctttcagatttggcataatcaccccgcggaagaattaaaaaacaaaggtg

SEQ ID NO: 198153 - DNA, 406 bp, Zea Mays
cagaaatgaacgaatgcatagcttcagaatcaaataatatagttgcaggaactgaattaatgtaaaacgtatcgatagcgatatcagctccataagcagtagcatcagcactaacttggttgcaatgctgaatcccttgccaaatgctggagtccgttgcttgccctagacattgcttcgagtaggtgtgtcggtgatcctcttcagacaagcattggcgtagtgcccaacctcaccacacttgaagcaagtggtgactgtaccctgtcctgcaggtctcgccggggtgccagtgggggtagcctaacgagtatgtggagtctgtggagtcgcatgtggtttatactgagctggtcgttgccctcctccaggaagagctagtgcaccctggggtggaacatagcga

SEQ ID NO: 198154 - DNA, 533 bp, Zea Mays
aaggagtcacataagcgagaacaagtcaagaagatattatcagtatgttctggtgatgagaccaatataatgaaagatgatcaagtagtcagagaaaatgtttcagcttccaaaaaaggtgaagatgagacatctgatttgccagcagaaaaggatgataccatacttccagtcaccagagcttgtacaatgatcaggaccaatcaagatcatacagatgaaagtaaacagcatgggaaaatagaacaaataacaaataaggactacaatgatgctggatatgagttcttgatcaaatgggttggaaaatcaaatattcacaacagttgggtttctgaatccgaggtaaaaatattagcaaaaaggaaactagaaaactacaaagcgaagtatggaatgagtttgataaacatttgcaaggaacagtggtgccagccacagcgagttattggtcttcgtgcttctgtagatgaagtggaagaggttttaatcaaatggtgtggtcttccttatgatgaatgcacttgggaaag

SEQ ID NO: 198155 - DNA, 513 bp, Zea Mays
caagtagcaaggcaacactggttggcactggacatacaaggaacaaccctagtgtggatcagaccaatgctttctcccctgttggtcatagcgtggttagttcttctggaatacctgttcagtataataagtattctgttccagaaagggaaagtgtgtactctccagatgatagcttgtcgctgtcaactagttcggttccaccaaaggatgcttatactgtgaatagccaagcacactgccagaataagcattctgttttcattcaatctcctgggagttcatatgggcacacagacttgaaccatgatggaatacagggaggatgctctggtgaatcaaaccaccatcacagcagtagagccctatggagtcctacagtggcacatgtgagttgtggacgtggtaacgtggaatctcatcagaatcagcatgtttcctggtcagaaagtcaacatgaatctaaaaatggttcacaaggaggatttgttaaagatctgaattcaaggcagg

SEQ ID NO: 198156 - DNA, 465 bp, Zea Mays
ctgccgccgtccgtttggctcgccaccatttcttccctgcccttccctgtttcctggcctggctttataatctctcggtcgctactgattgcccgggtcactacttccttcggttttactatcccttcgtttccgctagccttctccttccagagcaaccgcgccattcgtctcctccgtctcgttcgtagtgcaacacatacagcctcgtctggtgaagtgaaagaacgacaagatctgtggtacggcggtgccggccgacatccacccactgtgctaccccttgcggttccagccagcgcagcgatcgattcccgctggccgctgccgtcggtgcctgcccggtcctccactcctcccgctactagtactagtaccagcacactccactgtccactccactgccagtgccatcccattcccatccgaggtaaacgcgtcaacgcgaccagctcacctcgtcat

SEQ ID NO: 198157 - DNA, 1139 bp, Zea Mays
cacaccagcaggacacgtccgccacgccaccagctagcgtgcgcacgtacgcagtcgattgggggaacttttttgtcgcgcatgtgggtcgcgaaaaaatacgagcaaggaaggggattctgttggagtatggaaatcagcgtttcttctataaaaatggtttatggaagcctttgcttgttttcttggagatgctcttagcttgtgttgcttggttggaaaactaaagcttgtgttgcttggttggaaaactaatactacttgatcggggttcaccatatactacaggaggcactcagacgatctcatatattaagtaattacagaatgataacatgcactggttactttgctgtttgcttcatttcagagatgcaaatgaatctcaaaatgctagcgtttttttcctcttcctttgtgccaacttctatcaaattatataagtatatatgcttcaacattattttttaatgggacgggagtcagtaagttaggtacacggtaagtactgtctccagaaatccaatcttgaccttgtttatgtactttggcaatgcgtaaaaaaaattaaatgttgtgttgtcagtaaccatgtatattctgacaaacaaagaaaaagtggcgcagctacatatatttgagatctaagagggcacaaaaaaatagttgcggaaattagagagttgttatatttcaggtgcccacctgaaatatagtatgttttcagacaacaaccttcactgttagttcatgagcatgtaaagctgagcatcttaatacaggaaaaaaataagcaaaaagatggatacagtatcttttgaagagaagatagaaatcaggcatctgaccattagtaaaaaagtggaaattaatcggtacaacctagattttctacaagtttgcaggcaaaactgggcagccacgtcattgcaatttgcaacaacccaggaaaagcctgtcacttattcatttgtcaacccatccggcatgttcatttggcaaaaggatctactattcactgaaaaaaaaacaatactcctgctgtcgacactcgacagcttgtggtactggtattacaagtttcttttattgattcacttaagactcctgttcgagtcatactgcctgcaatacagaat

SEQ ID NO: 198158 - DNA, 527 bp, Zea Mays
ttcccacaataatcttaatggttccattccaggaattttctctggccttccttatctccaaagactgtaagtttgacctaacccttttcgcactatttgtgttagtgtgtgcaacaactgttaatatcttgtatcacttgtatgattttgcataaaagatatatctctatatattgaggataacaacattaatagtggaagccttgatgcaattatttcttaatagtaacggactaatggttacaatatgcctccttatagaggactctccttttatatgaatttaatctaatacacaaacagtgtaaccacaagacaaaatcaatgtgttctcagtaccttctgcaggcccatgccatgcttacaaaaaataattcctttcagctttcactgaggatactttatttgtcaacactactggactagctatgcagtcatatcaggctgaactgagacccaaattttgtctttgctcaggtcacttgacgacaacaatttgactggttctgttccatctaatatctggc

SEQ ID NO: 198159 - DNA, 683 bp, Zea Mays
gttcgtcaccatcgcaggtactagacctgtggtacagggatcggaggtgttggatgaggtggctcgcagctttggggtatgtattgataacatgtccatccaacattcctcaccagaggattttctgcttttcctgccggatgaggacactgcctccaggattttcaatgggggcagattattcactggacctcgtttctgcttaatgttcaaaagatggtctcgtttctcgcatgcttctatgtctcgcatgtctcacttagtggatgtgcggattaggggaatccctgaacatgcatggtcttgctccactgcggaagctgttcttaacgactcatgtcatattgttgagatccattctgataccctgatgaaaaagagtctctcatcctttacagtgcgagcatggtgttttgattttaaaaagttacaaaggcagatgacgctacacattattgagagagggctgcagagcaatgacaagggctgtttatcatacaagatcagtatcagtgcaaccatggtcaatcctgaggacacggatttggggggattgcactcctcgcccccagatgacgctcatcagccagaagattttgaagatcaggatattggcaacagtatgttccctcgtcctcctcgtctgggtgccccttctgctggtcggcagtcagtccattcca

SEQ ID NO: 198160 - DNA, 295 bp, Zea Mays
cgtgaggctgacggtggcgctggtagtccgcaaggaaccggatttggacgcgctctccctcgtcgctaggtaagagacccaggtaaggaacatataagtggttgttctgattttggatattagccaatttccccctccaatctgttactgatttatatgcccttctagggatcagcagatcccacacctattacatgatttgtccttctagaatagaatccgctttctatcttctgaaccggcactgccttcttcaatatcggccaccggtcggtccacctcttcaataatcgtc

SEQ ID NO: 198161 - DNA, 452 bp, Zea Mays
gccagccagaaactgagaaaacacgagctgatgctactgcagatatgtctgaagatctctttgaaggagaaaaaggagaagatgctggtgatccatctgtcgcatacggggacagcaccacggggagctcacctaaaacaagttcaattgacaagctatacatagtattgatcaggtatagatattattccttccaaatcgtttttaaataggaagcatggaagaaatggttcttttctttttcttgttagcatttgaacgggcactgatattttttttgccctaacaattgcttaattttgtggtgtttcctagtggaaaggcaaatgaattgctcaggcatatgcgcatctagccttcgttaatctgtttgcactttatattgcagtctacatggtctggtccgtggtgagaatatggagcttggccgagattcagatacgggtggccag

SEQ ID NO: 198162 - DNA, 670 bp, Zea Mays
ggaattgacacactcaccactgtaaggcctacatcaaatgtttgttggttccctcccttgaagtagggctgatgcttgttgcattgcattactgcaggtggcgaatttgtataacttgccgaggagggagcagaataagacaacacttttgaagtgtgcaattggtcttcagctaattatttacacatgaaaactgctaccaccactttttgtaactgacacaatggccattgaatgatgcaggttgttgttccacataaaaaacagatattcggacatgctgacgcctgagcagcgagaagaggttagtaatgtctccattctgttttgttgcttatgtactgaatgctgaagccgcaaccttgactttatgtcctgttcctgtgtatcagatggacagccgcgtgaggaagttagtttttggagagaaagacaatgtcagtgacccaagtaccagttgtggcaccagtgcgataaatgtttcagctccatctgggcaggtttcaaacacaggaggactgccatttgaatcaggtgcagcaaatctatttagtagcttgccaaggttggaagtacctgccaaaaggaatagtcccttgttgaatcttcatgcagattatgatgagaacagcttaccctcgccaacccgggacaatgcaccgccttttcc

SEQ ID NO: 198163 - DNA, 400 bp, Zea Mays
aatttcaggcaattatatcaagtccaataccaaacaaccaacataagttcacataataatattgtgcaaaatgacatgtccacaaccacattaccacaataacacaagttcaactaatagcaagtcgacaactgcaaacaaagtggaatgagatgtcttatagtccacaatcacaaacatagcacaaaagcaactaaagtagaatgccatgtccacaaccacaagcacacaagagttactcaaacactcaataaccatcatccaaatcatctaaaccaacatcatccttgtcttgctcatcaccacggccaccactgttgtttgtttcttcttcatcatccatgtcaaggtcgccaagcacaaaattgtcatcgtcttcattctcatcaccctcatcaac

SEQ ID NO: 198164 - DNA, 364 bp, Zea Mays
aaacaaccaacataagttcacataataatattgtgcaaaatgacatgtccacaaccacattaccacaataacacaagttcaactaatagcaagtcgacaaccgcaaacaaagtggaatgagatgtctaatagtccacaatcacaaacatagcataaaagcaactaaagtagaatgcaatgtccacaaccacaagcacacaagtgttactcaagcactcaactcaataaccatcatccaaatcatctaaaccaacatcatccttgtcttgctcatcaccacggccaccactgttgtagtgttgtttgtttcttcttcttcatccatgtcaaggtcgtcaagcacaaaatcgtcatcgtcttcatt

SEQ ID NO: 198165 - DNA, 207 bp, Zea Mays
aatgcactgcctttcattttagcatgcttcgggctgtaaaacctttttctttatcaatgaaattggtagtttcgttcctgttccttaaaaaagtcttgttaagaggcttccttccctaattaggcttccttctctaattaggtgcagcagttgattccatcctgcctgcctatttccttttagcgtttgatctcccagattgtctcc

SEQ ID NO: 198166 - DNA, 435 bp, Zea Mays
cgcccttctggaaccctcagccctcctaatctcagccgaagttattaacctctttttttcttatataggccaaattagttcccctcccgcgattccaaggctttgctcttcgatctcagccgcgccgtgttcttcgcggcgagttcggagcgttggtgcccaatccgtcgaggttgtgagttgcttccgctgctgctactgccgccgccaccgctggtgttagtgatctgatctggtgggcggattgcggcgcggaggtggaattgttttggctctggggaaagctagctatgcggattgaggcgtcgccggattgagcatgaggggcggggctgctggcggtggcggtggtaagcgtggcgcggatgatgggatcgccggatgggcggctcgtggagttgttcggtgcggtgaagtcgtggatgccgcggcggg

SEQ ID NO: 198167 - DNA, 243 bp, Zea Mays
gtgcatgacggctagagtgtaccccgagcacgttgcagcaggcagcagcagccacctatacgtgttcaacaatgggtcagctgcagtgaaggtgtccaagctcgaggcatgggagcttgccagtgcgagtgtcaatgttgacgacgatggcggtctgatggctggtggatcgttcgcgaacatgtgccgcgctgaggagtacaattctagctaggttaaaaaactgaacgggcatggatttgt

SEQ ID NO: 198168 - DNA, 220 bp, Zea Mays
gcggttagtatcgaggtagtcttaccttggattatgcgcactggtgccctgaccacggcgcacggcggaatgccccggactacacgacgtcggcgagcaatccccatgcttcacaagccctcaataccgccatgtgaggtcgcgaacgtgttcggtgtgctctggagactctcctcgaccatcaaccaagcccagagtaaagctcctgacgagatgccca

SEQ ID NO: 198169 - DNA, 298 bp, Zea Mays
ccgaaggttgcgttgctgctatgcatggcgttgcccttatggctgctgactgtgacccaagacaggtgctagcgatggtggtggtggcaactaggcccaggaatcttgagaatggcttgccaaagtgacagaaaccataggctgttggttacccacatactccgggacataaggagaatagcacgaagcagtgtggaggacttgctttggctgactctgacgcgcttcagttttagcaatttccttctgcttctgaatggtaacatgacatgtccttgttgtgtggcccttgtcctcg

SEQ ID NO: 198170 - DNA, 272 bp, Zea Mays
ctacctccacttggcaccatcgtcttggccaccccgaccacaacgtcctttccaaactttcggccacctcggccatcccttgcccctgtggcactgacaccccactttgccatgcctgtcagcttgggcatcacactcgcttacccttctcttcttccatgtctcgagccactcgccccttcgacctcatctaccccaagcatctccggttcttccatgtcgcttaccctagatgacttcgctcaccacttgtggacctttcccctctgcca

SEQ ID NO: 198171 - DNA, 719 bp, Zea Mays
acttagtagtgatctgagagctagggtgccgtatgctgaaaataaatttggaataacgacgcataaatattagctattatatatgtttcggtgaaacactcaatatactctagaagtacgatcactttatctacacacacacacacaaagtcttatcttgcatgttttgagatgtgctagtcaactttaatcggatgaaactacattttctactgtacataaggaagcacgaagagtggtgcaagtaaccgcattcttgtgggtaggtaggtggagagatttgctcagattctaagtaacaggcgtgacaaaaccttggaaatttttcagtctagatgtggttggtaggacgtcaagggattgaacggagaataagtaagcacgcatagttggtagggtgtctattagcacccgccattctgccttctaaatatgtcctctcttttctattaaatatgactggccggaaccatagtttgtagctcagttatatcatcaaagaactgaggacagttgtgtctgctgtcgacggtacaggttcctggttttgtggcctatatatgaattagccgtttgattcatagtgcgaataattttagaatttgtttttttactgctgtcgagtttaaccctttttacggtggtggattcacccaatctcttttctgaattattgtactgcgtgaaccatcatgtctaactttactttttttatagtg

SEQ ID NO: 198172 - DNA, 448 bp, Zea Mays
cataacaggcgaaatccacaaatcgcaccgaatgagatcaaaagtatgcatagcgtgagaggagccgagaaatgggagcctaacatgacaacctagctgataggcatgacatagggacaacttaggggcctcgggtacaggagatgactgaactactagacaacttggacataacatcaagatccggatggccgaaatgacggtgccaagtaatggacgaagctgcagtagtcaaagcatgtggaatagacgaacatggcaaagtagaggacgcaggaaggcgaagagtgtataggggcatagagttctcacaccgcgcgagaagactccgagtggcgagatccttcacggacaaaccaagggtcaaactccatagaacaagttgtcgatagtgaactaacgaagacaaaaggttctaaataatgtcaggggcaacaagaacgttgcg

SEQ ID NO: 198173 - DNA, 645 bp, Zea Mays
tgccaccgaggccaagaaggttacttttggggcggaggtagggaaggccaggagactgaggtctcgggtcatatggtcgccggtcgttgccaagacaagggggaagtctgctcgagccggtactgattctgctgctgaagacggtatttctgcagatgtgggcgctgatgtcccagtgaggcggtccaggaggaattcgttcaatcctgccgaggctgaggaagcaggagaggctgttgctgttgacaggaagcccaagcgcaagaatcaggagaatgacgagggcgttgctgttatcgctcaggctagagttacgagaaggtcaaatttggagtggtctgctactgtattgcctcctgctgttgagaagaagagagggaggcagaatgcagctgagtctgatgtgcagaagtccgctctggtggaagtaacagctaggactacaaggtctcgctcaatcgtacctgttgtggtgccacccactgtggttgagaacaagaggaggaagactggagatccacaaacaactgtagagttgactatgctttcagatgtgcccagaagtgattttcctgccaccaggtctttaaggaacaaaattgtccacgttaacaacagcgtcgtggacgaaactcacactaccag

SEQ ID NO: 198174 - DNA, 1061 bp, Zea Mays
ggctggtccgccacctacgagacctacctcgccttcctttccaagttcccactcgtcgacaaggactgggaactccagctgctgccgatcaccgccgtgcgcgacgccggccctgcagcgggactcgtgcctcctcctccagctccagccaccacggtcgctgccttgtccatgcctgccactacaaggtagtactccttttctatccatcaccatatcacttgcttatttattctatttatcatatcattctgcataagatttgattagccgcatcgcatcgatgtggatgtgattgctgtgctcagtctatcacaagaaccaggatgaagagtgtttcttttatgtctgcttgtcaccacagtcagtatagtactacaattaatagtagataatttggccaataaaatctgcagacatgctaccaccggacgactagaatgtttttcttactctgtctgtcatgtcctttttattgggtttactcttttcatgatgtagactttttttttggttgaagcttgatctgaagtcctgttatgttttcgttaataatcaagtgcacttggttgaagtaggagttggctttgcttctattgtgaactccatttgctctgttccaccttgagcaatctctttacttgaggcttttgtgatgccaaactactagccatgctttctacttgcatcattttgataatataattaaacacagcagtgtattgaataaacgaatatttggtttgaactacaacttagtattttatagtaacatacatagtttaagccttagatgatcatcttgatgtaggacagtaggagtgtctacaactaaatggaacttagatttagtcttgtacaatatttccttctcttgtgaaagaagttaatgtttcatgattttcaagttatgatcattagcatcagcaggatctaacagttgaaacttgtaatttgcagcttcgcggagtcatttgttccttttggaggtcttttgtgcgatacctatgaagcaaatagtctcacaacaaatttctgccctcaggctctacgatgtcaac

SEQ ID NO: 198175 - DNA, 312 bp, Zea Mays
tgtggatgggtctcgatatcggatttcgcactgggcccctgaaaagtcaggaacggccctgctcagggtgcacaacaagacaaatacgagctaatcaggcaacgatgccacagctgccgtcgtccccctctggcttctggctgggtcctgcgcacgtcatgattccgcgaacggcgtacgccacattcctttgccacgcctgctgattctactcccgtcgatgccaccgaagttttgagccactttcttatcattatggctgatgtgattacaaggcagatgatatatactacaccgcccatggtaaatttg

SEQ ID NO: 198176 - DNA, 423 bp, Zea Mays
ctgccggtccgggtgggcgcggccgacttcatcgcactcattgacaccggttccacgcacagcttcattggggaagaggctgcccatcgcgttggtgtccacatcgaacagcgtccacgtctgacggcaactgtggcaaatggcgagcgtgtttcctgccctggggtgctccgtcacgcgccagtgctcatcgacggactccagttcaaggtggatttgttccttatgccccttgcaggctatgacgtggtgttaggaaccaactggatggcgccattgggggacatcatgtggaatttggcggctggcactatggcattccagtatgcaggcaggtctgtgtgctggcagggcctcgctcccaagacccctggtcgtctccactctgtcgaggccaggaaaccattcctcgacgcactcctg

SEQ ID NO: 198177 - DNA, 359 bp, Zea Mays
tttgccaggaacactaccccacttaaaaggatgctgacttgggagcacttgagccggcatagaaggtctgaccccggggttcgggtgaccaaaggaatttctaggggtgtagaggggatgccatgcttttccacaaacttagtggctataaatgagtgggatgctcctgaatcaaaaagcacagtagcgggagtaaattcaacaaggaactcaccgagcactactcctggagcttgttgggcctcttgagcgtcgacgtggttgactcatgctctgccctggtactgggtcctgctcagctgactgttggagggaggtgccttggaggtaggtgtcgagggaatcttggggccattcac

SEQ ID NO: 198178 - DNA, 355 bp, Zea Mays
ctgttgcaagctcctagatatatggagttgctggcaatggcaagcacattttaatcactgaaaattacaatgtaagcactacactagttactgaactggttagcatcagtagttccagaaaacttggtttctcctatgctgcttcctgaggtagacgccgagcagcttgtagtacgtccagcgccgcttcccgccggcggtctccagcagcacctcggagctggcgtggaagccgcccttgccgaacgcctcgaacacgatggggtccgtagccacgacgggctcgccgtcgccgtcgaggcggtcgaacgcgaacgtgaggttccgcgcgaggcggcgctcgaggtaggcgtcg

SEQ ID NO: 198179 - DNA, 209 bp, Zea Mays
ttcggagtcagatgaagagcagtctgaatcccattccttgacgatgtgcgcctcgaccttcttcttcttataaaacttctccttattccctttcttgtcttggtcctggtcatttacattatcgagacttaccacacttgaaagttgtaggatttccccttgatttgttcttgttggggtagtccttgcattccatcaagacagtcttg

SEQ ID NO: 198180 - DNA, 338 bp, Zea Mays
ctcacattcactgctatctgcagtacccagctgtatcttattatcatcctttacatgagaaattgccttctcaatggcagtgatttccttctggatatttgacaagatctgttttggctcattcgggttgttctcatcaagcatttctttggttttcttgatatcggtagcaatcttctgaaccctcccttccagcgcggctagtttctcatgtaatttgcttgggtacctgttcatagcagacacgggttttgctgaccctccctccccacctgcagccactttctcaaaaactcctatcctgtctgccaattttaccttttcttcctgcttcctgc

SEQ ID NO: 198181 - DNA, 540 bp, Zea Mays
caacagatctatgttgagacgttttaggaggttgatgaatgacttagagctgaaagagatccctttattgggtcgacgattcacttggtctaatgagaggacagtgatcagagaggtctgaagcattactaacgcagaagacagggacagtgatcagagaggtctgaagcattacttctgcatcctttgagttgcaacaatgtcaagaatagaatctccatttatgctgatgacatggttcttttcattaaacccgaggaagaggatttgagttgcactaaagtcattttagactgctttggtgaagcttcggggctgaaagtcaatatgcaaaagagtttggctattcctataagatgtaatgatgcagaaatgcaggtcatctctaactcccttcactgcaccattgggtcctttccttgcaaatatctagggctccccatctccaagcggaagcttagaagatcagatctgcttaactgggtggagaagattgctgataggcttgccagctggaaggctaatctccttaatttggct

SEQ ID NO: 198182 - DNA, 318 bp, Zea Mays
ccagcccagaacgactgcgctgacccagacgcaaatgaattggaacccgaacagaagacgcagggcgccccgaccgctccacatgatgttcatgatcactatcttcgtcgacaaagcccgaagggggtggcgcaggaggatccacaccagaagctgaacttccatcagaatgaagaaccaccacagaaacagggaacaccaacgtgctaggaacccagctcccatcctctccacagaccatcggctcttcagcaaggagatccaccaccgccggcagcagcacaggtgaccggcaccataccttcaatctgagaacag

SEQ ID NO: 198183 - DNA, 264 bp, Zea Mays
acatttcttggttctccaaacgccaaaacattatgtctcgttccagtgctgaagcagagtatcgtgttgtcgccaacgtcgttgctgaggcctcaaggatccgtcagttgttgtttgaactccacactcctctgggcaagacaacattggtatattgtaacaacatcagcgcagtttatatgtcttccaaccctatccagcaccaacataccaagcatattggagatgttcacgtcttacaagtccccacgaggccacgacatc

SEQ ID NO: 198184 - DNA, 349 bp, Zea Mays
ctcagatttaccccaatatcaacacgacacatcctactctaaatgaacttttgagtaggattgttcatttggaaataaactggttgcttgtatatggtacaccaccgccacggcaatgagacaatcagttgcaaactggttgcttgtatatggtacaagccatccaagtttaacattgtattgagcacaataccaaaccctaaatcctaaaccctaaacaattcaagtggatggggcatttgacatcacagccgccgaagagtagttccaaacaagaaaggaagatcaacagataagcgacaaataaatatctagaaaataaaggaatgcatagggtgtttggtcatca

SEQ ID NO: 198185 - DNA, 226 bp, Zea Mays
tgaaccttcattgcacgacataggctttgttttgcaatgcatctgagatttcaacctggtccttccagacattataaattcaggcttggcttctgtttgtgtattggggacttcagcagaaatatcttcagatgcttccggtgtcctcgctcttccagagtcagtacacaaggaagaatcatcagtgataccaaccctcagtgtttccggcaggactaaattatcg

SEQ ID NO: 198186 - DNA, 682 bp, Zea Mays
agtatttctgttgcattcaaaaacttctcacctcagcattctgtttctcttgcacgagcagtgtgctcattctttagagaccaccttaaaataaccaatgaactgttgggttcgatctctggaactatgctggttggtagtgaacctgcaaagcaatcagctcttctgaagccactttctacccttgaagggcttttgtctattgccaattttctcctgaagggaactaccattatggtctcagaactggcttttgctgatgccgagatattgaaggaattggggaaggtttatattgaagtcacatggcagatatctttactcagtgattctaaggtggatacgcaagatgcagatcaagatgatttggctgaggaagcttcaatttctgaaagggatagtgatgatgacacaaatacagcaccactttcaagatatatgaatcctgtttcagcaagggcttctatatcaccgtggagcatggagcaagattttgtatcaactgtgcgatctgtttcccacatgcaccaccatggtcgacactcattatcaaggataagtgggcgcctaaatggagtgttgaatgcaacaagtactgatttggatggtccttgttttccagcagagacatcaaggcgtcatgatgctctaaagagaatccctgatgatgttgtttctgaac

SEQ ID NO: 198187 - DNA, 678 bp, Zea Mays
cccgccaggtgggagtcccttctcccgtccatcgtgtcctccctaggcactgccgtcaacgcgggggacatcaccgccaccaactctcttctcgctgccgtggtgtcgctcttctctcgcttccgcaacgcattcgacaataatgccctccgcctcgacctcaagtactgccttgacatcttcgccgccccactccttgaggtttttctctttgcctcccgccgccttcaagccgctgccaccacggccaacccgctcgagctccgtcccgtgtttgagtgccttcgcctctgttgcgagatcttctactcgcttaactccattgaccttcctgagttcttcgaggataacatgcgccagtggatgacagagttccaagccttcctcaccacatcctacccaccgcctgttgaggcagatggtgccccggatgcgctccgtgctgctgtctgtgataacctgcagctttatatggagaagtacgaggaggagtttaggggatacctgaaggagtttgttgaggctgtgtgggggctcctcatggcgcagaccgcttcgccttcccgtgtgcagcttgccgttactgcgataaggttcttgactacagttgctgagagtgtgcaccatgctttatttgggagtcctgaggcgatgaagcagatatgtgatagtgtcgtt

SEQ ID NO: 198188 - DNA, 331 bp, Zea Mays
gattaaggagataacttcagaaggttcatccaagtaccgaataagggaattgttgtagacctacatggcaccaaacagtaaggaaatatgaagggtatgtttaccagcttccaaaataatgattctgagggaataatgaatacctcagcaactagaaggcgctcatcatctctcaacgaacaagcactgcttaacgcattaataagggtcctcgtatctcccgattttggtacactaatagtgtaaggagatggcccactggtcccatcagtactgaagactgttatggtcattgttctcattgttgttgaaggcaggggcaaagacaaat

SEQ ID NO: 198189 - DNA, 303 bp, Zea Mays
tgcctcatacggagttacattcttcagcgcctttgttggagatcgattcagaatatgcacagccgtcatcacagcctccccccaaaaccgagaaggcatctggcgttgcttgagcagggctcgtgccatggccaccacagtttgattcctgcgctcaaccacaccattctgttgcggtgaataaggagcactgaaatgccttttaataccttcattggcgcagtatgcggcgaactccgcgacggtgaattccccgccattgtcggtgcgcaggaccttcaacttgcgcccactttccacctc

SEQ ID NO: 198190 - DNA, 347 bp, Zea Mays
aaatcaaacacacggggagaaaattttatgtatgctactctcaaaggattttctgtttttgatgatcgtgaaggaaccaaagatgagttaaggcttgccattgggaaatcagcatctgttcgggacacatcatctgttgatggctatgataatcctaatgaacttgattcaggtgaacgaagaatacaaaaggatctaggccttgagccaatcccctcgatgcttattcttgatgccatcttccgaaaatcttcgtcatccgtctctgtctgtgttcagcggcccaagtttcttgtggcacttgacttcttactagcagtaatcgaattctttgtgccatctgctca

SEQ ID NO: 198191 - DNA, 884 bp, Zea Mays
atcggccagagcaactgagcgtgagagaccccccataccttctagtctagcatggctgaacctcaccacacaagcagcaacggagctgctcacggtgatgctgatgatgcgtcggagaaaatgccgcccaagaggctacagagatatgattcactgcacatggaggctggaatgttccctgctggtggatcgacgcatgcagccaaggtatatgttagttctccgactactcttatccaatcagataatgatcctccttttgccttagagccgtgtgtaactgcacagtaaaattttgaatcctcatcaatttatttcaacaaaagttcaaaactaattaaatatataattctcatacaaacgtaccgtgttgcacgaaagattctcgacccttgaactccagggtccatgaaacccctgttgccttcttagaacaaagtctaatgggagtatccatatgtggttgagtttttttttcttcttgtatgtgttctttttttcatctcgtaaagtgtttctatggttctgctgaaatcttaagtaactgctgcactgtcgtgttcgtccttgccttactgaagagactaagcatatcagctagctgcttcatcatctaagggttgtgtgcctaaaagcatattgtctgctttctttcttgctttcttttcgaggcaaatgtaatctgattcagagtatgcactttggtaatgaaggttggctgggcgaccacactgcacctagcattccagagcataggtgtggtctacggagacatggggacttctccgctctatgttttctccagcaccttcacaaacgggatcaacaacacagatgacctcctcggagtcatgtctctcattatctacactgtgattctcctt

SEQ ID NO: 198192 - DNA, 358 bp, Zea Mays
ggaggatctgcttgaaattggttaggtgtggctcccggggatcatgcatgtgaagacaaatctgttggataacatacatgatgtagggtttggtgaaattgaggtactaaagggcgtcagcaaggctctgttaggtagtggggtcgctaacagggtcgccatcatcggagacctttgcctactcgtccaccaaagtctcacaaggcttgtagagtcgaacatgcttgcgcgctccagaatatctaaggtatactgacgatgttgaagaaacatgccatccgggcaaagctcaatatcaatcaccagagtggtgaagacgagagggagggtacacattttacggacgagcttgcatcag

SEQ ID NO: 198193 - DNA, 473 bp, Zea Mays
ttgctgctgtgcttcatcttggaaacataaattttacaaaagggagagaagcagattcatccataataaaggatgacaaatctagattccatcttaatacagcaggagagctcttaatgtatgactagtatttcccgtcctccacttctcttcacaactttgatgttatagtacaaatctataatccatgttacacttgaatgtcgattacaggtgtgattgtgagaagttggagaatgccttgataaagagggaaattaatacaccagaaggagtgattaccacaacagttggtccgaattctgctactattagccgggatggtttagcaaagcagatatactctcgattgtttgactggtaatagatttagcaatgtattccttactaattatgtaattgttttctaagtacatacacgtatactatcgcaggcttgtaaacagaataaatgcatcgataggacaagaccc

SEQ ID NO: 198194 - DNA, 324 bp, Zea Mays
cggaatcagagtccatgctcgagcgatgccgcgaggtcggcggcgacgcgctaatcatagatccgtcagtgatgataacgccgaacgtggagacggaattcgatggggagaagccggagccggcgaaggtttgacctgtaactctgcagcggatgatctcataataaggtaacactggcattttggtaaccatagacgaataagaatgagggaaatttcagaacatgttccggtgatactaattagctagaggaaaatttgacacggaaagttccttattctgtagaatgtgcctttgtggtgagtaaagatgtccatttcata

SEQ ID NO: 198195 - DNA, 518 bp, Zea Mays
aaaaattccatatgcaagttacagaagtgagaaaacaggtatgtgtaattttcgatattctatttttctgtctttcttcactacttgtccagtatttgtattacaacactaggccaatacggcccactactaatacgaccatcatagggtccaaacacacaaatggattacaaatgaatcacatcttcccgcttccatagaactaagtcggtttgtcacgtccctgacataattgcaacaaaatagcaccctcaatatacaatatgtgtcatgtgtactagaacaaaatgttggtgaaaaagggctctatatttcaaacggaaacggtatcgcaaacaaccaagtgatggaacgtgagtgtctttttcagacaacaagaaatgcttgtaacagtagtgtatgctcacagtaaaatttgtatcctcgtgttccttggctcaaagtttgttcctctcaacctgcactgctgttccacataaggtgcctattcccagctgtagaaacgtcgtatcccctca

SEQ ID NO: 198196 - DNA, 335 bp, Zea Mays
ctttcaggtgttggagcgtgttgggcaggtggcttgcccccttcagcgtctagaagccactcatctccatggcgtgttccacatggggttgctgaagccgttctacgtgaaccctcgaacgattttgcctagtgctgcctgtttagaatggtcggttgtcgcttgctctagagcgagtattgtgttatgccatggcacctgacatgtgctcgtacattggcagggcctgaccaccgatgacgctacttgggagcagctaaacaacttcaagaacctctacctagacgtttagctcaagaacgatttgtttaaagaggcgaggagagatgttatga

SEQ ID NO: 198197 - DNA, 616 bp, Zea Mays
ggtactatgcttccaaatgcaccaagctcctaagacaatcagtgagttcactcgtgtgtttttgatggtatatctcctccagttaactcgatcatgagtatactaagggatgaacacagcctgtggttcatggcaggagctaaaaagctccaaggcctaggtctaggaagggcaacctaatctgttgggttgtaaccgggtcatgtggtttatgtcctgtagctagtgttcaccaggttcatcctgacaccctggagctaaaggatgtggctgtttaccggtgttctgcttggtgtttagactcgtccttggtgcctgcttcaagggagctttggatcgtcgaacctccctttgccgttgatggggtgtcttctggcaggagaacgttgatgtatccaatccgcatcacattctcgtctgccccgcggagggatggatccgatcctaagcttcatgctattacttcgggcggtgatggttctggtcatgtgcagcagggatcccctcctttttgaagacccccccccattcgagtaggagaaggggagaacatggtcattcgggacgtctctcagttcatgaacgtttgggcccaagagatgagaacatgcagcag

SEQ ID NO: 198198 - DNA, 961 bp, Zea Mays
ctaccgccttcctccaaaagaaatacaggacattgttgatgcaccaccacttcctgtcttgtcattctctccaaacaaagataaaattctgtttctgaagcgtcgagcactgccaccactatcagacattgcaaagcctgaggagaagcttgctggtctaaggattgatggaaattctaatactaggagccgaatgtaagtagcgcttaagatttggccaaattttaggcacttcccccctttttcctttcattcatgacaagtttatagctacattgcatagcatgtcactactcactaccatatatctgatagatctaatttgtaggtctttctacactggaataagtatccataagctgttagacgatgggactttgggcccagagaaagaggtgcatggatatccagtaggtgcaaggattaattttgtcacctggtaatttttctctatttcccattaagtattttttcgctatttcttttcattttttactttgctttccaccatttcaaaagtaatattctgtttctattgtggattgcataacgatattatgccctgaactgggtgaataggtcacaagacggccgtcatatatccttcagtattcgagtcgatgaggtgatcggttgtctttaagacagacagcagacagtttttatgtatttttttaataattgttaagatttttgattttttacaataggaagacagcaaaagtggaaagctgagagtgtggattgctgatgtggagtctggagaagcaaggccactttttaaatcgcctgaaatatacctaaatgctatttttgacaggtgaagatgaatctctatgcatggtatattttctagttattgcttgtaactaacattgtttctgccgttgttgcagctttgtatgggttaatgattgtacactgctagtctgcactattcctgcgacacgtggagatccac

SEQ ID NO: 198199 - DNA, 736 bp, Zea Mays
cggtgatcctgtccgtggttgaccgcttcagcaagtactgccacttcattccactcgtgcacctgtacacggcagagacggtggcccaggcattcttcaccgacattgtgcgcctccacggcgttccgcagtccatcgtctccgaccgcgaccccgtgttcacctcgacgttctggcaggagctcatgaggcttatgggtactaagtttcacatgacgtccgcttttcatccccagtcggacggccagacggaagccgccaaccgagtcatagtgatgtacctgcgctgcttcactggagattgcccccgccaatggctgcgctggttgccgtgggctgagtacacctacaacaccgcgtaccagacttcgcttcgggacacaccgtttcgggtggtgtatggccgagagccaccttccatccgctcttatgagctgggggagacgagggtggcagccgtcgcccgggacatggaggctcgggaggccttcctggaggaggtctggtaccgcctagagcaggcccaggcgacccagaagctttactacgatcggcaccaccgtcaagtctcctaccagccgggggattgggccctccttcgtcttcggcagcgggcagcttcttcaatgcccaggaccaccgcgagcaagctcaagcctagctttgtggggccctaccgcgtcgtcgagctcatcaacaacgtcgccgttcgcctggccttgccgccgggggcatg

SEQ ID NO: 198200 - DNA, 708 bp, Zea Mays
attctcacggccattgccaaaaggcacaaacctatatgtgactgggtactgcagcaggtttatcgcagcagcaaacacatcgatgcagaaacctcccaccgttccagtttgattgtctactgatataaactgacggtagcttaccctgtcgggaactccaatcctcagctcattcccgttgttagggaacacccatccccggggcctcgttacagtctcgcctggccagatggcagcgtggagctcctggtttgcactgacattgaatggtttcttgtacagagtctcaggggacacaacggacagcccagagtagttggaccaatagccaatcgtcctcaaaccagaccctactacgtttacaatgtcatatgcaggctggataaggttaccatctgagtccaactttacagggccagtcgcacccatgaaactcacgttgcggattctttctagcaacagcgtcccctcgtcgaagacgctcagtgcgtccagattcagagctcctcctacaaccgcacgcagtctggggtctggagagaaggaaatgtttccgccactgttgaaaaacgcatccaacccatgggcaagcatccagacagtgtcataagcatagaggccataggtattgggcaagctgccgccgtcctcctcctcctcctccttcgccacttcactccatcgcgaaaccaacgccttcttcctact

SEQ ID NO: 198201 - DNA, 477 bp, Zea Mays
cgggtttgaggacaaaggtgatgcatatgaagattttcaagagggagatatggatcaggttgctggatctgctgaagaggaaggttatgttacttcaggaagtggtattgctaatgaaagcgaatatgaagaagcagaagatgatatatttgtaggagacatggaatcaaatgtaagaacatgtggtagttttgacaaagatccatatcagcgccaagaatcacaaggatcatggggaccccaagatttggataatagaatggacaaaatcagtgatacaatatctcatggaaaggaaagggagactaaagaatccttgctggagaatgttgaaaagacagcggcagaagaagtactaaaccatgactgcagggaagggcagaaatccatggaaaccgttgactacatatggcccaaatatgtatgtgcagaatttaatgtaagtagtgacaaagatggtaatgtgtttgattctgc

SEQ ID NO: 198202 - DNA, 269 bp, Zea Mays
tttcaggttactgagggaatcatctgttcaacttctgcagataacggttgcgacgtggatgagttgaactccaaacgactctgaggggtggacagagctcaaaaatggttttatgaagcttcaacatgaaacctctgatgccgaggtgctggtctcggcagcatcaaggaacctgtcgtcctcttcatcagcatttgtttcagcaaaccagtcccctttcttcacgccacggtcactgtctgcccgtgtcccagagcacactgaccctg

SEQ ID NO: 198203 - DNA, 1191 bp, Zea Mays
gtttgtggtatggtgttggcattccacccaaatctgatatatttggtggtggtggaagtggttgggaatcttggagatctattctagagaaggattcaaatgggatttggattgaatttccacttgtgaagaaatcagttgctgtgctgcaggcacttcttttagatgaatctggacttggtggtggtcttggtattggagggggatctggccctggtatgggggttatgactgccctctatcagttgctagatagcgatcaaccatttctttgcatgctcagaatggttcttgtttcgatgagggaggacgacaatggtgaaggcgatgcttttacgaaagatgttagcataaaggatgtggtatcagaaggaatgggccaccaggctggaagtgtgatgccatttgatggcaacagttattcatctccaagaaaacctcgatctgctcttctttggaggtaactgcatcatttagcaaaggcagattcactgctcatcttggtttttttaccggaacactgcccatcttgttgctgaattaacacaatatagcctgtgctaatgctgaagtgctgatggtttcttaaaaaaagaagtcccaatgaccttggttaggagttggagcatttcttacaatttacttccaccgtcccagaaaacttgatggtttagctcttggacactaggtgtatatatcagcttgagattatggcctgcatgcctcctagcattcttttaagtagcgccctactcaattagcgtggatcaccttcaataaatagggggtacattcattgagcatcaagtatcttgagatggagggagtagtaaataatcagaacttcaacagtagcaagttgctttcatatatattctgttgaagtataagtgaactggccacatctccccctctccttaggattttgggtgcaactgttggtgcaaatttttaataagaattgtttgctcgctccaatcccatgtttccagatgagggtgagggagagtgttcggcctttctccatcatatttggtttttgggtgcaactagtcagcgcatgcagctaaatatattctatggtttggctttttagtcgatcatgggtggccattttgttaattcctaaattttgtgaccatacagtgtgcttggccccatccttaatatgccaataacagagtctaagag

SEQ ID NO: 198204 - DNA, 897 bp, Zea Mays
ccaatcgacaccaagaatctggtcatacgctgcaatatccaggacctgaaaatccgaaaggaactcacagttctgcacagaccaagtgacccccaagagctgacgagaacacaaaagtcttcctccatctgccacttgcaccatcattgggcattgcatctctgaaacaccagatagcctagctgccactcttgaactcacaaacgaatgagaactacctgaatcaacaagaatgagtactggctggccttgaatagtaccttgcaacttcatggtgtaaacagcaggactgccttgtattgcagcaactgaaactgccaagcacaactgaccatcaacaggagattcgacatccatagtaacagacaactgctcctcatccaattgacaaagatcccacacttcttgcagcgcatgtaactgcactgtcggagggcactggtggtccttggacactttttcagcacacttctggcataagccgcgagcacgacggtaggcccgaagcgctacgagcttatcatcgattacacgaggacgaaacggatcgcctcgttgggcttcttcggttctgccacccatcggatccatcttcggtggtagtggcagcggcaagggcccccacaccggcgccttgggcaccaccgagaacgacgatcgaacaccttccaggcgcttcagcggccccgacacctcctcctgcaacgatgccaaaacacaagcagtatcgaaggaagacgaacattgcacaaacacggccgcacgaatgtcggcgcgtaagccatcaacaaaacgctgaacaaagtagaggggatccatcggtcgaccatacgccaccaagttatcacgcagctgcgagaagcgctccacatactcagcaaccgatgaggtttgccg

SEQ ID NO: 198205 - DNA, 543 bp, Zea Mays
tggggggggggcgtcaaacaccactctgtttctgaacttccagatcatccaggctctcagaatcaaagtgaatttacccccttcttggtcatgtctgacacaatatcagcaatacgtttccaccactgcaggaagtttgtgtcatcctggagaggggcaagattgtggagcccaaatttccgaagagtgatgtaccaatataatctggaaaagcaacaagaaaccaaaagatggttgatggtttcaggctcttggtcacaaagagggcatcttggaggatgattcagtcctcttttttccagtctgtctgcagtccagcacgtattatgagccaccagccaaaggaagaaccgacacttaggaggtgcccaagatttccagaccattttgtaatgctcaaaaccaatagagtcagtgaaaaaacccttataagccgagcttgtagaatactgcccattagaagcaattgaaaagatatgcttatcctcagaattaggttgcagcacaacatcaattatggcattccagagatgtaggtaatct

SEQ ID NO: 198206 - DNA, 476 bp, Zea Mays
ctcgatgcttccttttcttgcatacatactaacaagtgcactgctcacacagagtgcatcatggcatctgtgcttgatagaaatagcatggaactgcctacccaggtcaactccagctgccggactagcacaagcatcaatagcactagagattgtaaactcatttggcttcaagccatgcatggtcatcttgatgaatgcatttgtggcaccattgcaatcaccagcttgcgcatagcaagtcaacattgcagaccatgaaacaacatctttctggtcaatcattttgaatatagaaagagcttcttcagtgctgcaaagcttagagtaagagaccataagtgcagttccaacagttggtgtacactcatagtttgtcttgatcacctgggcatgaatttggggaggaaagctggcctctgacactgtcagaattgtcgagtaggttaaatcattcggagcaacaccatcttctc

SEQ ID NO: 198207 - DNA, 620 bp, Zea Mays
cttctcaaaagactcggccctccgaggttgccacccacgaaccgcctctgccgccacctctgtgagccatctcggccatcctgctgccacgtgctccccctggacgccattgggcatgtccttggtcctcagtttggcctccccctctgctctaacgccaccgctcctcggctcttgttccgccacaccattgacttgtacatccgctggaggcctcttccggttcccagtcgttgcagaaacctccctttctgcatcaactacaccaaccgccaaagtggctgcctcctctaacaatgccggcacagcctcgaccaccaatgctggaggcttccggatcaacctcgccgtgctggcgtcattcccagcgcggcgtccggcgcttgaggacgtggctgccacagccaccccttcctcatactcctcttctaactcctcatgcctcttgctggaactggaactaaccaggcgcttcagcgagttgctcgagggccgccggcgcggcttgccgtccccacggtcgtccccgccgtggaattgtctggaactgacacagcccataggacgacagggcgatcccggcgagggacctcactccacggagcccagacgaagatttc

SEQ ID NO: 198208 - DNA, 416 bp, Zea Mays
aaagattgacgcagagcatagaaagaaacatgttggggactcattaggaaatacaaatgatattgtcttccatcaatctaatgtgactgaatgtgaacaaatagaaccaacatctgtggggcatgaccttttcatcagagaccaaatggataaccataatcatggatcgtcccaatataatgaaactatctctgaaactgtgaccagtgacagttctcatcaaccaggatcaactacatatcaaaaccctaaacttgaaactactgagggtactgggatatcagtactattagtccctaagtcaaacagcaataaatggcctattgtagaagggagggccctggctgctacaaatatgttgtgttcagaaccctattatgcaagagatggtgtcagtatgatgaagcgtagctttg

SEQ ID NO: 198209 - DNA, 396 bp, Zea Mays
ttaaaaatggatacttattgagacttgataaccatatttagctagcttagcaggagggagcatgctaactcataatgccttgtaattactgaatactgatgaaccagcggagccatacctcattgacatcctcaagtagctctgacaaacaaattaggggacatgacaaataaattaggggacactacctctgcgtatctgcacaagggcccaagagaggtggggcccgaccataggaacggggctctcagctcccacaccatgcaccagtgaatgcgagcagctggtctggccttccagtaatctgatctgcatgcagtgtgatccaggattcacgtggataaggatgaaatcaagagagcgctagctaggatcacacgccaatagcacaaggaa

SEQ ID NO: 198210 - DNA, 417 bp, Zea Mays
ttcaagaaccccctaagccataccaaagcaacaacatggatacaaaagtgggtggccatgctatttatccagaagagttgacattatattatctggatccccaaggaggtgtgcagggtccatttctgggtgctgacataatctcttggtatgaagatggatacttcggtttggagttacctgtacgtctgtctcagttttcagatgatgttccttttcgcccacttgttgaagtcatgccccaccttgtgcaaaagccgcaatcgcgtatacctgtaccttgtgatggaaattctgaatctcttgaatcatctcaaagtaaatttgaatccagtgtccgttctgcttcctctgtgaggggtgaccaattgtctaactgggatactgaaagcaatgctgttgatcctaaaagaggtg

SEQ ID NO: 198211 - DNA, 277 bp, Zea Mays
tccccacgccgtccttttccaatttcttgccgccgtcgcagcccgtgatccccacctcgtcctattccaattccttgccgccgtcgcagcaagtgacagagtccatccaataatgtttgggctctatgggcaagaaataaaagaaggaaccgatcaagtccggatggatctgcgaaccagctttagtgtacgggggtaggagaggagggcaacgactccgggagaaaattcggggtggcgtgctccagtggaagctgactagaggtgtgctcggcgg

SEQ ID NO: 198212 - DNA, 213 bp, Zea Mays
gacgagttggaagtttattaccaaaaaaagtagcaacacacatctagggctatatctgcacgactacactgtgcaacaacattatgtgcttccggtgatcatggtgatgtgtgacactcagaactgcactagactttatttagggagaatgcaccaagctgctatacccgacgggtacccggtatccgcccgatacccgatgggtacgtgcac

SEQ ID NO: 198213 - DNA, 228 bp, Zea Mays
gattggggtagtgtattgtagcatgtctccatattcactaattctcggtgatggactcttacctatctgctccagctccttacttgcgctaaaactgaacatgtaccctgaatttgggaattgaggcagcaccagctaatacaaattgttgcttaattatggagatgatcactgattgatcacaataaaccaaacagatctggtcctacgttcttgtcctgccagaac

SEQ ID NO: 198214 - DNA, 445 bp, Zea Mays
gagcactcgggtttgagtaacactttcaaacatcaaaacccatccggccaccatatgtaacccaaaagttccaagcttcatcggaactgctaaatgtcataccaatttgtggaattcaaaaaggaattgcagcaactatgcggttgtaaataatgcattcagaacacgaccaactggatgttctcatcatttaaagtagaacttcaaccatgcagaaacgaataactaagtaggagtagagcacaaaccttgcaggtgattcctcgagcagctgctgggtgttgtccatcgcaacatcaatagcttgttgggcacctgccggcgtgcttggtgctcttgtggagattgtacaggatctcgggtagactgcacagcgccaactttcttcaccacggacatttttttagtaccagcacagacaccttgctgcctccacaatcaacga

SEQ ID NO: 198215 - DNA, 294 bp, Zea Mays
aagtttggcaagtgacaacttatgctatgctagtacaagctattaccggccatgtgcatggaaagtgtcggttagatatgccaaaatatgaacatgacacttaaaatgataaccagggagccatttgcactagaggtcgctaaagtttggctgcacttcatcctatttgtctctcacgcctatgtgctgatatgctgtgctaagctggcatgataggactctttggcttcttcaaagcattgatgccaattgcaataagcgtttctggctccaagttgactattcactctatct

SEQ ID NO: 198216 - DNA, 297 bp, Zea Mays
cttcttgctttaaccacactgaaactgaagactggaggaggtgtatttctctctcttcctttgctgctcctctctctcggcggcaccttgtgaaatctctttcttttggtgaagaactaagtctatctccagcagccttactagtgcaaaacgtcatatgcacgatctgctggccacaccctaatgtcgaaattattctttccttagcactgctcttcaccaaaagaattagatggaaggatttggcgagactgaagagcactgttggaagggagtgagaaagatcacatctgatgg

SEQ ID NO: 198217 - DNA, 762 bp, Zea Mays
ggaaaaggtgtcagacttaaggcgcaagggaaatgtccacaaatagtgggaatagtcatcaagaatggccagatagtatttatgaccagacacactagtgattggtgaagtccaaagatcacaatgtattaattgaaaatttcgagtggcatgtgatgaagaagaatggaaaggtagacgaacgtgacgtcctagctggcaggcatgacataagggggtatttttattcggggtacaagggatggcagaagactgagctagctgagtgaggactgtagatcctggatgtccaagtcgttgatgccacaatgaagaggtggtagcatgaagggaagatgttgtgctcttgagtgggtagagtgggccggagctatcacaccgaaggatcacgcgccgagtgggaagatccttcacagagcagccaagagggtcaaattccacagaatagttattgtcagtggtgaattggcgaacagaaattaaatctttaatgagagacggtgaaagaaggacaatgttaagacaaaaattgtaaggaagttgagtggtgccagtggaagtgacaggaagaaggttgccattgccaacaacaatgttagagggtagatgattggaagaggagaggtgggaaagtataccagcgtcggaattcatgtggctggaggcacctgtgtcgaagaaccactcttgctgttggggatgttgaagagtggtggtttgaaaattggtggcaagttgttggagatcccaaccaggaggggg

SEQ ID NO: 198218 - DNA, 900 bp, Zea Mays
ctgaggaacagaggtacaagagggcactatcacgtgaagaggtaaaccagtagataacaatttcaagtttaacatgaattgaagcatgtcaccttttatatctcagcatccagatatgaaaatccactgtgataaaacttcaaaatgtaaaggaaatgttggcgcctctttctgtatggaaggtccctgtttttttacacagtagttctttttatgatgttcaaaattaagtcattgttaggttaaattcgctgctattaattagtggttatggtgtgatattggcttgcgtccgtaggcttctttacttggcaacatattggcattaatttgatatgtttctctggttatgctaacatattcatatatcaggttgaggtgcatgatgtgggcaaggagatggagctggatcttattaaacaatatagtcaggttgactgttgatctacactgttcattgtcgctttgcatatcttctgacattaaatcttcaggttgaacggatatttgctgatagggtcagcaaagctgatggagatgatctggttcctgaatatttagtcaaatggcaaggacttccttatgcagaatctacctggtaattttcatggcatggtatccagttttatggttatgattattgttttgcacatgaatgagctttgatcatatacacaatatctctacctctgttgattcagagtatgattatatgtgatgatctttcatacattttatattctatctggtggatgttaattttttattgtaggaaataggaatatgcctttactgtttaattagtatgcattagtctgactgaccttgctgttggtgcgttgtttcagggaaaaagatacagatatcgattttgctcaagatgcaattgatgaatataag

SEQ ID NO: 198219 - DNA, 426 bp, Zea Mays
tgaccattctggatgaccgtgacttgagcgtgaaggtgggagacgacgtccatggcgcggttgtcggcgtcccgatgtgggtcggcccgctgccgtgtagcggccatatccagttcgagtccgacaaggacctccttttcccaggatagtgcggcggacttctcctgtcgacgcgcatcggcgacgacctgctatagtgctgtggtggccaaagtagcggcgagggcatccttctgcagcaggcacgcaacttcctcctcagcagtcgccaggcttgaggtggtgtcgtcggccatggttagggggtggggctgagacagtggctggctgtgatggataggtaagcggaagtgaaacctaggtcttgtgataccatgatagaggatatactgccatatgttttgtgtgtcattgattgaggagaac

SEQ ID NO: 198220 - DNA, 352 bp, Zea Mays
ttacctctgttgcttcctgctattgaggatgggatcttcagtgataattggcgtatccgacaaagttccgttgaacttcttggggatctcttatttaaggtcgatatctcatttgtttagaactgatctcaggtattaggttcacttcatttattgcatcatatggtaacaattctatctttaggtcgctggaacttctgggaaggcaatccttgaaggtggaagtgatgatgaaggtgctagtacagaggctcaggggcgtgctattattgaagtacttggaagggagaaacgcaatgaagttcttgccgccatttatatggttcgttctgatgtcagcttgactgtccgg

SEQ ID NO: 198221 - DNA, 441 bp, Zea Mays
tcgctttggagggcacaaactagaggaactgggtagagacccaagcgaagaagtgggtgagggtgtgaaaggtgtcgggcttgagctacagaggaaaaatctagagaaaacgagagaaatcatgaaaacgagagaaatcatccaggatgaccagatagtattggtaaccggagatgcttggaacaaggggtgtccaaaggtcacagtggatgaggtcgaaggggagcttgggacatagaagagaagggtaagcgagtatgacgcccgagctgatagagatgacaaagcgaggtggagttaccgtatgggcaaggaatggccgatagtcgagagaggacgtcgtggtcgaggtggccaagacaacggtgccaagtggaggtaggggtagtggaggcaagggcgtagggttggacaaaatgggcagaggaaggtggggtaggg

SEQ ID NO: 198222 - DNA, 306 bp, Zea Mays
gttttctaattttcagaagggctctttagcaaaaagacaacgacgaagaggtataaatagatttcagccgttggatcctagttcaagcgctcagatcagatcttacttaaaacgaaccggatttcttcaggagcccttggatctgtatccaacggtccatagcctatctgcgggttggatgggagggactgatccatccgtcggtccccagatcaacggttctgattcactgcaaccacacgacgccccagcttctaatcccaaacgtccagcagggatccaacggcccaggtaccttctcctacc

SEQ ID NO: 198223 - DNA, 312 bp, Zea Mays
ctgatgtagcgcaggtatgacccttagaccacttctcagcacagcggtcacacagcccttttgcacgcctatacgctctgagagccttgaacttgtcatcagtggagggaacatgtgtgttggatggtttgctcagtccttgcggctcttggcttgtcgtgcccgaatgagacgaaacagccatagaagggcctcggtatcccggtttggaccagaaaccaggatcacgcttctggaactcgcgacgatgccccggctccgtcacttcctcctgcaaaagggccaaacaacaagcagtatccaggtcgccag

SEQ ID NO: 198224 - DNA, 567 bp, Zea Mays
accacctgtacactcaggcatggtcagttgtcgacttcaaagctccaaatatctatatcccaagaaggtcaatagcagagacacaggtcagcagtggaacatgcggtttcaacagttacagcaaggtggatgtcataaacaaccagactacctgcgtgtgcgtcccacagtacacatttaaaggtggaagtaaaggctgcacgcctgacttccagcaaccaagttgtgacttggatgaagcaggtgccacgaagcagtttcagttagtaacaatgagcaatgtggattggcctcaatgtgactatgaacagcatgacaacatacctaacaaccagtgccagcagctctgcctgacggattgtttatgtgctgtcgctgtgtttcgtgatagtgacaatacatgttggaagaagaagttgcctttaacaaataatgttgtaggggatagtgtgcagaggacagtttacatcaaggtaccaaaaaacaacagtcaacaacctgagcttcttgattccaacagatggaagaaagataagaagcactggatccttggaagttcattgtttc

SEQ ID NO: 198225 - DNA, 347 bp, Zea Mays
ccctcctctaaaatcaccctcccgtgtccatcgattagaggagtactgcgggtgtagaggggatttcagttgctggaaggattgagcgaatggggattgctaggtagggttagtagcagttagggaaatgttatgtttttgcatagcctggttcactcgagttgaaatggacctgctcttttgtgcacgttttcacttgtgttgaactttggctgattgtattaactataaaagaattgataagattgagtaagtcaacaatacatgtacgagttgtggatcattcttcggtagcattgggtagagttagtagcagttagacatgtttctatgtaagtagatgtcca

SEQ ID NO: 198226 - DNA, 206 bp, Zea Mays
cttgaacaggatctgttctataggatcgtaccgttgcatccttgatttgataaggaggcaagcacttaaacctggttgatgaaccatgacctgtgggccagagcgtgattaacggccaggatttggctctgatgcctgttccggtgctgtagaggatcgttcctagtctaacctggctggggtggctcatgggttgtctgacaggt

SEQ ID NO: 198227 - DNA, 251 bp, Zea Mays
cgaggacgacgaatgtaggttttggtaactggtagttttgaagcgaaatgtgaagtgggtgttgaggtagaaggatttgtaatggtaatgagaacatcatgtgaggatgtggtagatgatggtgtagtggaagatgaagaccaggtgaaagagcatagatgggaggaagacacatgaaagagtttgagtatgtagaaaaagaagatgaatgtgtgagagagttataaaagaaaggtcggttttcattaaaa

SEQ ID NO: 198228 - DNA, 275 bp, Zea Mays
tatggaagggggcgtggtggccgtgccaggggtagaggtcgtggtggccctcgtgttaatgttgcggtcactgaagacactccctcaatcaccctgactggggaacaagctaaacggtgggaagaatggcataaggaaaaagaatctgagtgtccaaccagcactcctcttggttctgtggcaactacatccacccaacacttcggtaactttgccaactacgcccattcgggcgcaggtactcaggctcaagcctttgcatcttcatgtagaag

SEQ ID NO: 198229 - DNA, 309 bp, Zea Mays
tttcggaattcagaacatgaactgaacatcactcactactcactacataacatatgatgtagaattgtagagttgcagacttattagtatataaatgccaagtaggcaagtacagaactacagacttactattgacctaaagcagcagaacctcatccaattgaaaagcagcatcactagcatcccctccacctagggatgaaaacggttggtaaacactaaaaccattaccgttttcatattttttatcggaaacaaaattgagaacggtaactgcggaaacggaaacgatatcggtatttcggaaac

SEQ ID NO: 198230 - DNA, 213 bp, Zea Mays
cttcgtacaattcctgaagcattaccctttttcattactccaaaagcagtagatgaaaattcagtgctgttacagcaactaccacactgggctccatgttctgttacacaggcattggagtttcttactcctccttataaaggacatccacgtgttatggcctatgtccttcgtgtcttggagacttacccccctgagactgttacctttttt

SEQ ID NO: 198231 - DNA, 367 bp, Zea Mays
cgcaagcgcacttcgcggccgcgacgagccaacgagctaatcgaaggtaacaacctgctcttcctaaaatggattttctgaggcttttgcgtgtgtttgtgattcgtttcaaacggagggggaatcacacgtgattgattctggttgatttcgcttgctgagctgcttgctttcgcctcactcctcgctgcggtgggtgctgcttgcatctatgcttctgcctccttcctcgccgcggagcaacaacaataaatgtagggccacgagtaggaggttggcgaagaggaggaagaggataagcaggaaggcgagatcgaggaggacgagcatgaagggtaacgcaacgacatcggtggggatgacatca

SEQ ID NO: 198232 - DNA, 480 bp, Zea Mays
ggcatttttcaaccaggttgcagtgctgcatcaagctagcctgattttgcttgcgaatgctaaaaagaattctatttatgccgtgcatgttgagtatggcccagatcctgcctctactcgattagactatatagctgatttcacagttgcaatgcctattttaagcctaactggaacacacgaaagccaacctgatggtgaacaagttgttcaagtctattgtgttcaaactatggccattcagcaatatggtctagagttatcactctgttcgcctcctacagctgatagtactgggtttggtagagatcctgctatttcccgtgtttatgaggcagctctggaaatggcaggaacagagccatctataggaactagttgcacagactcttactctgtcactgctttgagtaaacaaccaaatgttgaccagtctgcaggtaatgcagttgcattttcttatttaactctttcagttaa

SEQ ID NO: 198233 - DNA, 363 bp, Zea Mays
catctctactgtttcttgtgcatcgtggcaggtggtgtatgccttgattaagcaattgactgcatacgagagtacgtgagaagtggcacatgtttttctcaagtgatcaatgagcggtaagatttcagggccaccactaccagttcccaagagaatctcacgaaacaaggataccagcatcttcccctggaatgaatgggacaaaatttgtatgatctctgagtaggttgagaagtcatggtgaaaaccaaggctatgtgtatctttaaagtaggtgaatgcaactgcaggtttcctccttaaacagcggagtgtctgcacaacactgtcagagctcaaagaccggtgccatttctggatagg

SEQ ID NO: 198234 - DNA, 644 bp, Zea Mays
ccacctttatagcttaggtgcctaaccatattacagattttctaggggataagataactctcccgggaggataagcctccttaattattgcctaacatttagccttcttaacaaactaaatctggtgcctagtataatgccggcccacaaaagaatctacaacacttcccccctccccaacaaacagctcgtccgcgagcgccacatgtggatattggcgtttaaatgcctcaacttccgtccgcgagcgccacatgtgaatattggcgtttaaatgcctcaacttcttcccatgacgtatctgcttctgagcgccctacccattttaccagcagctcccagactcctctattcagccttgctcggaggaccttctcaggagatggaataatccgcccatgtaacaagggtggtaaggggaccagctgtgttggcagggtgccttcgaacttcttcaagagagcaacatggaaaacgtcatgaatgcgtgcatttggtggtagttgcagcttgtaggacacctcccctatcttttgtgtgatctgatatggaccataaaattttggtcccaacttggagggagaagtcgtagtgacccctacagccgttcgctattgtagccgtagccagacccaatctcccac

SEQ ID NO: 198235 - DNA, 654 bp, Zea Mays
aagggaaggccatggaatggtggagaagggtgagcgaacaggtgcaaggcatggcagaaaagggactcaattccttaataatccttggtttctggaccatctggaaccatagggaccgttgcgtcttcgacaagatcaccccaagtgtaaatgttgccattagaagggctgaggaagagagggagctgtgggagatggcaggggccaagagcctctctctcctaacaggtccaattcctgggttgtgaaggggtagttctcttggtgttgtaatggacgtttttctgtattttcgtttttggccaccgtaaggtggctgttttttcttgatgatgtgcacctctcctgcgcgtttgagaaaaaaacaacacaaaaaacagaacaagactaagggtctagatgtctaaggacccaaccacattcaaaaacctagcgagatccaaggatccaaggcccttagcaccagccataactcaacaaactgattcatcaagaaagcttctctgaatcttctcagcgaaggggaatccccatcgaagaccaccttattacgataataaagccaaatacaccacgccctaagatgatgacactgttaagctcctttcttgtgcttttgggcacatgacactccacctgtttccaccactatgt

SEQ ID NO: 198236 - DNA, 394 bp, Zea Mays
gtgggatgtcatattcgaacaactcgagtccaatggccagccaaaaccggttagaagcatatggtctttggcttttgatgacttgccacactacctcaagtcatgtttcctatacttggcgtccgtttcagaaaatgttattctttacccagatcgtttggtgcgtctgtggattgctgaaggttttgttatgcccaagaaagcagaaacactggaggacgttgggtttgactatctaaaagaactggtcgcgagagggttagtccaggtcgtgcagaaggatgctggtggatccatcaagctggtagccatccacaatctgctccatgcttttgtggagtctgaagcacaggactctagtttccttgaaatccaccatcatgctaatgttgta

SEQ ID NO: 198237 - DNA, 876 bp, Zea Mays
ctggaagtagtggatacagatacccatgatctgcagtcatccagaaatactgagagcacaattctgccatcattcggtgatgatcctatgaaggattcctctggtgctctgaataatggtctagggaggagcacttcatctcaagtaaccgaactgacacatcttcatagatcccacccgcctgctgactacaatccattctccttgcattcccatgattcaccatctgtatctggtaacagtgagcattctgttccgacagctttgacacttggtaataatatctatttcagtagtgcagagagtgagggacagcctgaggaaaaccataacctattggatgtaaacttaggatttgatgtgacaacgacagaatttggtaatgttgtcaaaagaaaaggtgaatctggcaatgacttaatgaatgcaggcagtcagaattggttgactttaccacttactgtcagctgcttggataatgcttctgctgttagtaatgggaggataggtttagagcagattgtggatgaaggtgtccctgttatctgtcaggatcatgatattatgctggatattgaccagcggggcagtattgatgttttgtctggccaggatcacaacctcaaactatgtggtatcagtattcctcaagcagtccttttggcaacagaagagagaaataaggatgttgatgatgagatcgttcgcccaggttcttctattaattctgtaaatgttttagataaatatagttattgcacagtgggtaaacctatagataatcttagtagacccattctcttatcttcacaatctgctgatgtaccaggtcgagacttagcttctcagatatctgttgattctgatcacacttac

SEQ ID NO: 198238 - DNA, 2607 bp, Zea Mays
cggggcggtgacgctcgcaatccctcgcttgctgctgcattttcgaatactgagatggccatggagatgtccccgcggcagtcgcctccgcggacgccgcgtagggcggcgaagccgcgactgttcatcaaggagatggtcctccgcaacttcaagtcctacgcaggggagcagcgcatcggtcctttccacaaggtctcccccccctctcactcactcactcactcactcacacacgcccactcgtgggtgctaacaatttgtttagatttagaaatcctacgaacgaagttcgcattattgtaattcatttacatcagcatgtgcctatcgaaacttaatctacttgtgcactatgtcatagcttcaattttgctattctgccccactctcaatttatgtcattgttcccgataaagaaacggcaagatggatgtttatttgtggttgctagtggcggtcaagacttgatccgagaaatcgcagtggaatttctgtagctattattggggcttacatgtgagtgtaggtgtggctttaattccaaaccctagggtacagttcacactgtagagttgtcattctaacaactttgttttactggtacaatagttaacagatatcactttcgactgtgatacataaacatacaacacaaatagaatttgtacttgcagaagagaggtcttccattcagttctatatattttgttatgattatgcttgcatatctaaggaagtatcgatgttacggccaaactcatggtttagctttcacttgagcaacttcaccacatttaggaaaacaatcccctctccataaaagctgtcatataggggaatgatgtgaaaaaaatgctccagaagatcccctttctcaaccccccttccctatgttttttctcaatccctcaaatagaggggagcaagcagcttttttcctcaaccccctttccttcttcaaatctggtgtggagttgctctcccattttattaaagctatgctcctgcctcctagagtaactgatccttcatctctgcagaaagtattacaatttatataataaaagtataactggatctaagcatagattggagcatgtttgggagagcttcttagggctttggctccttgctatagtatctaaaagagccagagccagagttggtgaagacttttttctggcttcactgacttctagttcattttgtaaagagagagaaaatggccccctgatacagtgcacattttccctagtagccggagacatttcgtgagaagccctcctaaacgagtcattagaaaaacataccaggatttctgaggacacactcttctcaatctaatttgagaaaaacatagttataatcaaacacaaacaaataatagtccttcaggatacagatattacacactaaggtcgtgtaatagtgctcatgtttaacagatggaaataattccattttaccccaaatgtattatgtaccgattgaacaacgattaaagacaaaacaatagaaacataatttgttatcttgactgcagagcttctcggctgttgttggtccaaatggcagtggaaagagtaatgtcattgacgcaatgctttttgtgtttgggaagcgtgcaaagcaggttggtattgttgcttaatgttgattttttagtgattatcactatattcatttagttcatttcaccgggagattttatgttatttgttctatgtcaacaaatcattcgatttgtttatagcctatccaatggtagattctagcatgtcactctaagttccacaataatttaaaagcctgagagtaatatcctgccatttaagtttgtaaacatataaattatcatcctaagtattatgtgaaaggattattctagaacctagcacattgatgcttcaattgtattaatcctcttggtttagataataatcgtattaatcctatggttgccaagtagtctgtgttttgaagttgatactttagagttcctgtctgctaaatgtactgtgcatactagtttctcgttactgttacctgttttccctttgaactttacatggacaatgcaattttcacaaattcattcgtacaagtgatcagattcattttttccttaccaatatctctgcttttaaagaaagtaaaaataacgtttgagatacaaaccccactggattaccatttcacaaggaacatatacggaaataaaattgatccaatacattgttagtcgctatcattacttaggataattttgtatttctcttgttcttccatcaactgcagatgcgcctaaacaaggtctccgagctcatacacaattcttccaatcatcagaacctagacagtgctggtgtttctgttcattttcaagaaattattgacatggtattgtttgaagcttgggttgagttttcgacatttcttatttgtactgccaataatcattttacttttttctgtgcctgtaagcaggatgatgggaactacagtgctgttgagggtagtgactttgtcatctcaagggttgctttccgtgacaacacttctaaatactacataaatgagcgtggaagcaattttactgaagta

SEQ ID NO: 198239 - DNA, 794 bp, Zea Mays
ggatcaaatttgttgtacgcagtcgaagtgcttgtgactgaggttagtgaaattgctacaatatgacaaaaagtctattttttcatgcagtatattgtctgttatgcaacgttaattaaagcatgctattaatagtatgaaggagcaagagacatctgttttctgagttctgacacaattaatatccaagtgtattggggctgtcgggtggttcatgaataaaaaattgcttagctatggtcttgcttgctgatattatattttgtattaaatatgaaacacaatttaccaaatgtttaaactttaaactaacaagcatctcttgtcatgtttacagacaaatgataggcaacctctgttggactctggtattttgtgctgccttatatatatcctcaattctctattgagccccaatgagaactccacagataccttgcctgttcaccaagaaggatccagaaatgagaaaaacaaaaatttggatcctatgcaatcacgacggcttgaggtaatctcagtcttctggttctcatagaaacagggccctatttgcaagattactgttgaaatacacaaaatcgtaaattgtttaacattgagttgctgctttgtctgtattattacatgtttttttcctttgtgtcatatatgtatatggtgactatttcttcccttcattttctcctggtcaacttggtttttgatttttattcttttttctgtctatggagattgagggaagtgtaatacatattatgaaagcactggcgagccatcaatctgctgcacca

SEQ ID NO: 198240 - DNA, 339 bp, Zea Mays
agaatatggtggtagacgaatatgcgatgtacagtcaagcaacgattgaagtgcaactcatgcgtcatgtgattaaaaagtagaacatatatgcgttgtatggccgtgattgaattgtagtgcgaaggataggttttactattttaaacggttagtcggcagactcgatcagtaaagctaaggttgattatgcgattaagaggaggtgacgacatgccgtagtagttgtcgctttctctatgttttcgagtcggataaataccataggcaattaattgttgatacccaaagattgttagaaacaggtagtcgtgctgtacctattgcgtcaaaggaaat

SEQ ID NO: 198241 - DNA, 306 bp, Zea Mays
tgattactcacactttctcaaaacttttcatctacaatttaagtttgacaccttctccaccttggctaacttttctaattttctccttaagtttgtaactagcttggtcgcaccataaaaaacgtccaatgcgacaatggtcacgagtccgacaacgcctctgcacggtcctttctcctcacccatggtgccctgttgcacatgtcgtgtccctacacattcccccataacgacaaggttgggcgtatgattttttcgaacaacgcaggagaactgtgtgtcatttcattaagaaacgaaagtaca

SEQ ID NO: 198242 - DNA, 1584 bp, Zea Mays
gccggcagcccacgtgggaagattccacggagcatatttttggcctctttggaagacacctccgtagggatatcggcccaaccccaagccaagcttccacccacggggatattggcctggcctctagacgtcgggcggctatccctcccgagcacgccaccgcctctgctcgcaactatcccgagaacactgccgctgctgtcacctcggatctaccaactccgcctccacaggtgagccacctccgctcgcatcttgtagattgaatcagacacgagtagtttcttgtagatcgaattcagacttcgatccgtgcagcccaccggcaagacgtcgagggcgtgcgtcggctcggcgttgcggcagctgtacccctcgatgtgtgctctctacgacgtgaacctctattcctccacacctgtaccccttccccatggtcgggccacacgctggactgggagcatgcccctacgcaccttccaacaaggggatgggttaaattctatatctcttactcatgtcttgagcacaaggggctaggttaaattatggtgaaaatcaagtaggagttaggatttggagctgttttttaatttctgaaggaagaacatatgttctccaaagtgttgctgaatccttctgtctttaaatattaaaactgttatctcttcaaatttcaagtaggagttggaattactcggctgtatgtatatatgttgaggcctcagtgctgctagaatatacctggtaggggttttggaccaagggttgaatcctagatgaattagggttactgttagtcgtcatgacagattttttgttgaaaaaagtttaacaggtgaactaaacttagactctaattaatctctttattaatctgaaaaataggcaagatcacatttttcctcgtcatgctagactagacctacctacaacagctataccagttgtagttgtcagctcgtggaagcacaatagctaaaaccagatactaacacaagtttttgtcatcttgaactgcaatagttttctgtatcttgaactgcaattgtcagctcatggaagcacaatagctaaaaccagatcctaacacaagttttcctcatcttgaactgcaatagttttctgtatcaagtttttttatctgttaaatgttagtatatcacaatgtgatcaaaacaataaaattcttcatatcctttagttcgtattgtactgatcactatttagagcaagttctgaaaatgtcaaataatattgcttccagctgttttcggtctcttgttcaattaggtgctattagtcatgtatcttgccttcgaaactgtatccttagcttatgttctgtatattctctgtttctttctttcaagaaaaatgtgtaatgaaaagtagtattatgttttaaaatataatggctttcagtgacatgtatattcgttacttgtttttgagttttgacacactagaatctctctaatgttgtgtattgattatttctcttgatatattgattacacctactgctaccaccagacacctaccaactgttttggagcttgctggtaaggatcattgcgaaac

SEQ ID NO: 198243 - DNA, 547 bp, Zea Mays
gtgacattgttatccttcgggtagctgaccccgaagccagcgccaaagatgtatgctgtgtcgtcgtcccaggaccggtacccacccgtgtccttggagggcgaaatcgcctggcctcccacgttgagccggtacatagtctgcaccgcagtgccagcatcgattgggaacggctggaggttgccatcgccggtgaccatgttgggagtggagatgtcgaagaggtctggggacgacacgacctcgatgccgttgacgaacgcgtaggcgttcgggtggcctttctccggggtgaaggtgaggtcgagcgtcgcggatgagacgttgacggagaactcccggatgaggtacgagtaggtgatcgcggcagccgtctggtaggcgctgaagttggagagaagggtgagcttgccccccgggacggcgacggagacggagaagaggccgtcggcggcgtcgtggttgctgtagttggccgggtagaagtgaagcctgaggaacttgcggcccgggccaagcgggaaggagtaggtgaagggcgaggccg

SEQ ID NO: 198244 - DNA, 298 bp, Zea Mays
gaggaaaatgagtttatctatactgtgactcatacagtcctggtaacacggttaacaaacggacataacgtgcaaactgtatctttttactatttaccttaaccatgtgagttcttttatttggttctggacatctttttattctagcttgctgtaatctactggattgcagcatgaacaccttcatgggtcttagcttatcttttcactgccaattgtggtctgtgagatgtgtactattaaatctcgaatatactatgttgcaggcttctgtattccgtaggctccaatctgtact

SEQ ID NO: 198245 - DNA, 203 bp, Zea Mays
tgtttcgcttctgtttacgacacctgaaccagtttttggtaccggtgggggagcactgtcccaatggctggccgccgttcgccgtcggcggatcccggtctcggtcactgcgaagctcccgaaatgagatccggtggcgctttagagccctcgtccgttccaatacgcagtcggatgctgggttacgctcgcctctaaatcta

SEQ ID NO: 198246 - DNA, 954 bp, Zea Mays
ccgaaaccctagcctcggcggtgatggcagcggcggcagtgaggctggttaaggagcgcgagaggaagaatcaggtggtgccaccggcatctccgttaatggaggagcccgtgtggaaggaggaaaagcagcgtaagaaaaggaaacacgtgggcgccgcactggtggttccatcgccgccgactcctgatgcggcccaaaacttgcggatggaagccaagatgatggctgagggggcgacggtgaggaagaagcagaggcggctgaaggcggggcaggagcaatccggcgagccaccattttcaattgatgtccatccacaaggaggggaagaagctactgatgatggtggcgttggcgtcatggtcactcagtgtgtcaagaggagcaaaagcaagaactcccgggttttgaagacgcagcagacactgccccaaggttttttccctcccatggccaatcccaattccattgatcaggaccccaattattcctcaccttttggtgcattctttgcccaattcgcctacaaacctgctaatatcgctgatcgcccagcgaggctgcctcctcgaggccacccatcatctgggtcttctctactcactggaaaagagacctccaaggctgcctggacagcaacctcaaacaccaagcaaccatgcccagcctcagaatcaacctcagattcacaagaagaggcaaggatcgaagggaaagaaaagcctgagaagaagatgacaagggagatggcagtgagggagtctacccgacatttggcaatactggaatccatgtctgcttcctcagtcccagtcgctcccgaaaccccaacctcggcggcgatgacagcagcgacagtgatgcaggataaggagtgcaagagggagaatcaggaggcactgccggcagctccattaattgaggaccctgtgccgaaggtagaaaagaggc

SEQ ID NO: 198247 - DNA, 393 bp, Zea Mays
tgtcactggagtgcccaaaagctgccacgcttcagcatgcacttgctcatgtgcattttttcttctgtcctacttgcaggataaggattcatgcgaaatgccacctgaacttggaatgtcttctagaactgttgctggtgctgttgtaaataggaggcctcgccgcctgtttgggagatcatcagagaggaagaacccactcaaccttcagtttgtatgcactttttttcccttgaactttcttagtttcactgagacaatgtgcgcaaactctgctctgtctaatgctttgcttgctacgtttatccaggagcgtcaagtagctcgcctcgaggcaaggcagcagcaacagaggtactcagatgttctattctaattccacctgttccacat

SEQ ID NO: 198248 - DNA, 503 bp, Zea Mays
ttgttgcaaagtcattttcatcagttagctagtggttagcgattggatttgctttgtttcctagctcactcctcagtagccgcggtgattgtttgggggccacggccttttttgatctcctcgtggtggcagactggcaggtgaggtaaagaagacccgtaggtttaagaataaaaattgggctggagcctggaggtcaccacacctatttgcaacgtgttccaagcgtgtcactactggtatcaccaaagctctcgtgagggcatagatagttgaactacgtttagaagatgatctacagaatagcttaatgacttttgacatggatagtatagctaccatgtgatgatgtgaatggggttttcttcacgttagagatgtccgacacgtttgtgatctttgcattcttcaactcatgcattcatgtccaaatgctacctcgtatgtcgttgtcactgccagcataggctacgacctgtcaccttaattaggtctctctagtt

SEQ ID NO: 198249 - DNA, 1738 bp, Zea Mays
gcagcagccacatgcgcaggcttcttccccagacgcagggaccaaggtccaagcttcatcatcgtccgtccatggcaacatcatgtaaaccctaacacacatggatatatagctggattcggatcttgctctattttcttgcgaatatatagatatatagatggatcggaattgaaggtttgctttttttttttttgcttgcttttgactcctttcttctgatttctgaagcatatggtggattatatatactgtggcgtcaatctcttctctggttttcatcagatttttaattttccacggtggatttaatttaactgttcaacatagaatttgctcgatcggaaattttgtctttacataaacttattttttttattggtagcatttccagtatatcattttagtaactgaccaaactaaaatgatgattgataccagcctaatttataattttgcgtgtattgatttgtgcaagtgcagcagaaaggagccagctggaggcggcggatacgacgacatggccgagttcgatcaagcgctcttcctctatcttaacagcagccaggatcaagcatcagttattcaagatcaacctcgtaagccacacacttaactcccttagcttatgcatgcatatacatgcacgggctgtatatataaggggataaactttattgcatagtataggttagatcatattgcctccattttttatttatttgacgctaattagtccaattttgtactgaccggcgacaaataaaaacaaacaaacggagtaagggagtacatggcagattaattaattaattaaactcaaacatgccattctgtgatgcatctaccctgattggacatggctcaaaacaagaatgagagcaaattaaagatgcgatacaatggcgtgaggatcagacctctcaatcgtctttccttcttttttgtatgcaaagcttgttctctctgagtccgacaaaagccaattttcagagaaggaaaaaaaagaatctctgctagttcaaggagagtgacatgtaacaaacacttgctcgagtatgtgctcatttcattccagataggtcattttctttctgctgaaataacgcagttgggcagagatgtgatttctcatagtctagatagctctttcccttcaccacgtatccacttccaacaaccatatacacacgcatatatacgtgcatacattattcccattctccgcccttatatgtgacaatctaataactagttcaatggactaattagcttagagcttgtttgatagcaactaaaattagtactagcggattcaacctgcaaactattagctaggaattgctaataactgtttaggattgttaatagtttataaatatgtacctttgatttattatccaaccacctattagcagattaattgaaacaatcttcatttaaaatcatctatagctaaaaaaatagcagctaccaactcttaaaaactatattagattgtattttaagaatatattacatctgttcttcaatatttgtcgtctgttaggtaatttttgaactaagaaaccgcgacaaataaaaaagaatggatcggtcatttgttagcatcgctatgccatctctcgtacatgtacacttattagcttctagtttaatcgcagaactttgtgcagaaactctcaacatcttcccttctgaaccaatgcatgtcgtcgagcctgctgcaccaaaggta

SEQ ID NO: 198250 - DNA, 528 bp, Zea Mays
gtggatcacatgtagagaaactgaattcagggcctgttactaaagattatggaactactggctatgtgcatggaactgataaggttgctccaaatcctcaggatctgttgcatataaagtcttctgaagcttttatcacgcaaagatcaatgggcaatggagaatctggtgtatatcagaatgataatttgcacaagtcatcagtgctacatactgggctgattgatactgatccaagtgtgaacttgcacgacaatggtggcctctctgtgtcttcgtctcaaaatccagttgtggactgtgtttctaggagagaggatccccttcgtgattggggcaatatcgcctgcagtgaaggaataattggatgtgaccataccaccaccgataatgaacacataaagctagcacacaggctgcacgataatgttcaaatgaatgtacctgtcatagttgaggacgtgactgataatgtgccttcaggcattccatcatcgagaccagttgttcctcaggttgtaatggcag

SEQ ID NO: 198251 - DNA, 736 bp, Zea Mays
cggatcatgtatgttctggcatatcatcatttattatttagtctcgttttgcatttcattagtcagtggatgcttcaggagtacggtgtataattaaaccatcatttttaaataatttatggtttggtgcatgtgagtattaccattgttgttaaggtgttcttaaagcgtcgcttaggcgataaggcgtgcagcagcggcaaggcgtcgctctcgccttagaacagagactaaggcatccgccttgaccagtacagcgtcgtcatggcgccttgaagcttgctaaggcgtcactttggagacgccttgaaggtctgcagcgttgctgacttgcccgttagtctcctggcggatctgcaccggcagtggtgttggtctcctggcggctctgcaccggcccctcccctccgtgagctctccaggcaagatagagggaggagggaagaggagagggggcacatacccatagcagatttggctgcagcgagctgagtgctggcggcggcagtgagatgagtgttggcggctagggagggaaggagaaaagaggctggaggtgtggcagtttgggagtgtgggctatgtggctgaagggtaacctaattttgatgggctatgtgggctgttgggctgcctgagctaattggactcctatttgctactataatagtattatgagactatattcctatatagcgaaagggcctctagcctagtggttaaggacttctgagta

SEQ ID NO: 198252 - DNA, 379 bp, Zea Mays
gtaaaatgctttatccacgggtatccagtggatacccgaagtatcaatatacctctttaaatgtgctacatccactaaaaatgtgctacattcactagaaaaactcactcgcatgtgttgttgattaatgaatattaatttgtgttgtgttaacagtcaactgtaatgtaatcgagactaatgagtcattgacaatgttataactgtcaactatcatgaactcattaagcttttattctctgtactcaaatttaaatttattagatgtgataattatgagtcgagatattgtatcgacgtgtagccaaatatagtcattctcgtgttgcattggtgcttagatgtaaactaaaatattttatgcatttattataacact

SEQ ID NO: 198253 - DNA, 597 bp, Zea Mays
cgaggttctggagaagacctatgcgggttcgtggatttcgatgaagtgttttgtgttcttccccaccctggatttttgggtgctttatcgattgagcatttccgggggtttttggtttgctgcagtggagcagtacccgtcggaagctatgcggctggagctgtcggcgaagatagggctgtcggacaggcagctgcaaatgtggttctgccaccgccgcctcaaggaccgcaagccaccgtccaagcggcaacggcgggaggaagagtccgcgctagtaccagtgatgcctccaccgccagtgttaccagcacctgtgatgcctctggcaagcagtgaccttgtggtgggtgctcctgggccgtatgatgagccgctgcacccacttcactcgcgaaggggtgctgggcgtgggcggtcctcagcagtccccaggatttccatgccggatattgggaggaggtattacgagccaccaccaattatgatagcgccgcctatcccgtcgatgcagctcacgcaatatgagctccgtgtgattaattctgtggagtcacagctcggggaaccattgagggaggatggtccagcgcttgg

SEQ ID NO: 198254 - DNA, 373 bp, Zea Mays
gtgcttactccgattattcaaggactgttcaggcaaggacatggtatgaagttttagtatcacctcagaaatcttaaccttcatggtcaataataatgctctacgatgtgtaaaagttgtattgaagggcaagccacctgagctctgtggaatgcacgccaatcctaactgcataaacctgtatgagtacttcccaattccataaaactgctgacaaattttttgtgacatgatcaagttgcttttacgtcatagtgcatcagtcgatgtaaacacagttgacaatactgtcattgagaacctacttccgctctatgttgcagttaaaaaatacttgcatgcataagtatctggatgacaatctttctttgag

SEQ ID NO: 198255 - DNA, 700 bp, Zea Mays
gtttccttggaaaccagtccagcagtctgttcagtagccccagcaagcagttccaggctggatccgcccaacaaacaattcttgtgcatgcacggattagatgctgtccccaaagcagactccacagagctgtgcatcttcaaggatggttctccagcttcccgttgacctccttccatacgtcgagaaggcagttgtgggcccaaacgagaatggactgagcgtcgcccaccagcactgtgctttgaacgtctcggtggcgacccagggaaggaggaatcaccgtcaccatcaggggggtcactatcgctcagcggagtgggaataacaatagctttttccgaggcatcgacaggggtgaccatcaggctgatcttgtaggataaacaacgcttttctcctgccgcaggccctggctccgaaatgatgagagtcatgtcacgatgtagattcctcggatccagacaccacaccttcaacatgaaggacgataggtcagtcttcaatgctgttgctgggtgcagctcggaaatgatgcacgaatctcgcagcagaaattctgctgtagatcgagaccatgcatgggccggaatgcccctgatctccacattaatcaaggtcgggagcgatgtcgcagccgcatttgcacaacgcgtccacctcttaaacacaaggtcaaactgtggtcctctgaaaatac

SEQ ID NO: 198256 - DNA, 542 bp, Zea Mays
gttgaactggctgcggaaatgctggtacaagtcaaaaaatgttatccttgctgatgagatgggtcttggaaagacagtgtcagcttgtgcttttctatcatccctatattgtgaatttaagattaatttgccatgtcttgtcttggttcctctttctacaatgcccaattggatggctgaattttcatcttgggctcctcatttaaatgttgtggagtatcatggttctgcaaggtcaagatctatcattcgccagtatgagtggcatgcgggcgatgcaagccagattggcaaaacaaagagatcgtacaaattcaatgttttgcttaccacttatgaaatggtgcttgttgatgctgcatatcttcgttctgtctcatgggaagttcttatagttgatgagggacatcgcctgaagaattctagcagcaaactctttagtttacttaattcattctcatttcagcacagagttttgttgactggaactcccttacagaacaacattggtgaaatgtataacttattgaacttcttacagc

SEQ ID NO: 198257 - DNA, 296 bp, Zea Mays
tatatatgctatcaaagatttggaaataaggatgaagttccagcatattgacatacaagaaaagcaaggtcatgttacgctctatcgttcccacaagatgtgatgtgtaagctccgacacctttaccgtcccacttaaaagcacttagatcagtgattggagcttgctcggcaacatggtaccatgtcgtttgcgcattcacgttgtttgtgtctgaaaaatacttgcttgagaataatgtgatctctctggctgcgaacgcctctgcaatacacccctcaacccttgccttattc

SEQ ID NO: 198258 - DNA, 211 bp, Zea Mays
cgagtatttcgtccagccctaccggcaagcgcacagcaacaggccgtgccgcttcgatggatcgtggtacactacacctgcggtacagcgggtggttgttggggaggaagggcgaggtggaggagcttgtgaagaagacgagcgtcaagttgtggagaggcggaggtcagcgcccttcgtgctccgtaacgaccgccttaacgtccagggc

SEQ ID NO: 198259 - DNA, 976 bp, Zea Mays
tgatgtcacaaatggagggaggctgcccagtagattataatacaataactgatcttttccttcaggtatgctttatattcataaataattggtttgttgtctattaacgtcccttggcttttcaagtcttccttattggttgcatgccttcacttacatacttctgttaacagagaaatatgatacgggaggcaacagcctttctgttggatgttctgaagccaaacttgccagagcatgcttttcttcaaaccaaggttatcatctttcctctttgaacatgaattggttgtgcttggatgtgtacattatttgtttctcaggagcatttctgtatgaattgtaggttttggagataaacttagtgacttacccaaatgttgctgatgccattcttgctaatggtatgttcagtcattacgaccgccctcgtattgctcagctatgtgaaaaggccggtttgtacttgcgagccctccaggtcagtgcatttgcattggtgcagctgatatccccgcttcactttcctgtttaactaaaatattatattttgtgatgcagcattactcagagttgcctgatatcaagcgtgccattgtaaatactcatgccattgagccacaggtttgtagacttcagtaattttcagatatcttcttctattgttttgcccattgacaactttctcggacaggcacttgttgagttctttggcaccttgtcaagagagtgggctttggagtgcatgaaagacctcctactggttaatctgaggggaaatcttcagattgtggtgcaggtattcctgtccagcttcctatgaccccctccccatctcaaccaacacactggcatttcttttcttccttattgcttctaattactgtgaaatcttgggtgcatctgcaggctgcaaaagaatactgtgagcagctaggggttgacgcgtgcatcaaattatttgagcaattcaaat

SEQ ID NO: 198260 - DNA, 224 bp, Zea Mays
aatttgctttccaggaaacccattgagcatgacttgtgtggtggaggaagcaaggagaccacaaacaatgtctctccagatctgtccaaacccaagctgctgcatgacttcaattaaaaaaggccaggagactgagtcaaaggccttggtgatatccagtttgaggagcagccgtgacattttctgttgatgaaacagccttgatgtctgctgcactaacataa

SEQ ID NO: 198261 - DNA, 422 bp, Zea Mays
ccacacgccacctacatgctcaatcgccttcttactaaggcgattagcccacctacactccactttgctctctttggcaccacttgtacgacatcttcgtgtctttgggtatgtgctatcccaacctttccgccactgctccccataagcttgtccttcgatcctctcgctgttatccttggttacttccttgatcttaccactcatcgcctcttgatctcctgtcacattgtttttgccgaggtggaattccccttctcgtcgccctcgaccaccactgtcgccagccacctcgttttccccttgcaggttcacctagtcttctcccccctacaacaccagtgcccccccataacccctgtgcacccaaacttcccaggctgtcctaccacccctagtcgacccacgtgcctcctttctgg

SEQ ID NO: 198262 - DNA, 1117 bp, Zea Mays
gcgggaggctggacttaaggccaacgccaaggtgctatcctccctcacctcccctgatcgcgctaaagaaatcgatgctcaggccgccaaagcgaaggctgaagaggagcacgctgcaaagcttgtcagactgtggtatggataaaaattgttttttagattgttaggtttccgtaccctttgtctggtgctgaaatttcttagggactttattctaatctgtttactggcttactgctctaattacgtatttttataactgccaaaaaaacgaacagattgcaagttgttcctagatagtattcaatgcagtattagttggtattcaatgcagtaataagaaattattaattcagtcttgattgatttgtttgtatggttctgtgatgtacaaaaatcggaaataatcatataatctgaaaaaagatatcatggacatcatcgacgtgtttggttcacggaatgacaccgtgaggagttatccgatcctgcatccgaacctcgatgagttgtttggtttgatgaagggaactaacctgtccgtcatacgtttgcaccctccactagtatattcacggcatctacttattcctcgagaaatagtcggtcgaacacataccggacacactgatgccagacggggtcactccccaaaccaaacagcccgcatatgaacggaggacaggaggaggtaatagtactagtatcacacagatagaatagcgggcctggtgcagtagtgatagtgtagtagtaagagttgtctcactgagtcatcggatagcgggtttaaagcagcccctcttgcatttgcaggagacggcttgcctcttcccttgatcccacttgtgtccgagcctccggcactggttctgcccggcccagtactttaatcaatcaatcgatgaggcacatgaggtgcaggatagggcttgtcctaaacctgaaagaatattgagagtttgtttgtttaaatatatcttggaacaacatgtgaccaagattggcctcgaagttgcattgaattcactaggaactcacaaagttgtttcattggatgaccgctgaatacggtgatttcgcagggaagctgcaaaagcgttgtctcaaaggcaca

SEQ ID NO: 198263 - DNA, 217 bp, Zea Mays
caggtggcctcggacttgaccactcctctcctctggcctcgacagcgaacggcggtcgcggtcgcggcggcaaggaggaggcaagcaggcagcagcggagtggaggaggggggagaggggcgccgagagggacgggtgcgcgtgtgcgtggatggatggactgcgctgcgcgcggtgggtgtgtgtgtggtgtgggtgggtggggggtggctacatg

SEQ ID NO: 198264 - DNA, 580 bp, Zea Mays
taacatgtttatcacggtttgagcatttacatctgcttggagaaggggttcccactgatgcatcctttctgacagttcctctgattgagtcagaagaaaaaactaagaagtctacttctgttctatcttctaagaagactagtgctcttcagaatcctgctgtgatggctgctgttagagggggtacttacgatagcacagtggcaaaaggcagtgtgtcagcactggtcactcctgaacagatcaataatttcctatcaagcattaatttgttggatcagattggcattgttgagttaaatcatatctttgcccatagccaaagattaaacagtgatgctattgttgcttttgtgaaggctctttgcaaggtctcaatgactgagctgcagtctccaacagatcctcgtatcttctgccttactaaaatagtagagattgcgtaagaagattcctaaatttaatttaaaaaatctgatatttactgatggcaacagcagccacaacttgatgtttctttggctattctcattccgaactttgtttgtgcaggcattacaatatgaatcgcatacgtctg

SEQ ID NO: 198265 - DNA, 767 bp, Zea Mays
ctccgggcgagatggctgagcgccgcaaacaaggcttgtgttacaactgtgacgaacaatatgttcgtggtcatcggtgctcgcgtctgttctatctagaggtcacagattttgaggaagatacaggaatcaaggatgaatccaatccagaggatccagcacccatcatttcactcgacgccttaacatgcatccgctcagagggcaccatgcaactgcaagtcgacattcggggatactccctcacagctcttcttgacacgggctctacccacaattttgtcagcctcaaaactgcagatgggttgcggctagcctacagttccaaccaaggtttccaggccacagtagcaaatggcgacaagattcactgccggcagattgccaacagtattggtatgtccattgtcggtgaagagttcttgatggacgcatacgccattcttctggattcctttgacattatattgggtatcacatttctgcgcactttgggacccatcctttgggatcttgaagatctgtatatggcattctggaagagaggacagcgtattctctggaaaggactaggttcgcagcgctgggacatttccatgagacctacagtccggtcactcaaagcagagcccaaacctatgatggaatgtctgctacagcagcttcgcgaagtgtttgagacacctacgggccttcccccagttaggtgttgtgatcactggattcagctcctcccagggacagcaccagtagcagtacggccttac

SEQ ID NO: 198266 - DNA, 357 bp, Zea Mays
tgcagacttatccaaaaaatgtaaggctcaaggcatcaattgcccaaattaaacttgatgaatactaccacgccggaaacaatatttcagatgattcaaaccttggtaatcacttcttgaacaataacttgcggcaaggagttcaagcttccctccctcagtgcctgtttgctgttggagatcattcggtggaaacctatgaattttgtggcaatagttcaactgaattgactagagttgaattgctaaaaacttttggcgagtgcacattctgttatgatgtcagtaccaaagatcaagatggcaatttagtgagctcaacttccatgtcgatctatttggctcctttgcttttat

SEQ ID NO: 198267 - DNA, 387 bp, Zea Mays
ggccgcgtatgccaccaaccacgcacgcacgctacagccgaaccaaaccgccaagttgccaaatcccgtcggctttttttagcgtctcgcgggtcacggcaagagggtgcagcgagcggatacctctctctccgtctagccgcacggaaccggtggctgcgggctcacgaccgcgttgtggctccgcccttttctccgccgctaccttcgcgactcacgcccggggatcggtgtcttagattttggctgctcacttccccacgcttatccccggcggcggctcggcgaggaggggatcggtgttgtgggttggtgggagcggagtgccgcctctgtcgcggcctcgcgggatgccctgcctgccgagcgtcgctcgccttccttgac

SEQ ID NO: 198268 - DNA, 234 bp, Zea Mays
cggtaacatctcaaggatgaacagcagcgacgataatgtggtggttgagaagaccgttgtgatgctcgaagatgaggcggtcattctacattctggaagaaatgcagcaaaggaaacttgtagtgatgacaggacagagaagcccagcccagaatcggagtacatagctatcagggctccgctgtctccagttattcttccggaggctgagagatctgatgacctggggagctc

SEQ ID NO: 198269 - DNA, 387 bp, Zea Mays
cttgaccaagggtttccttcagaaggaagtcattccattgtgagatttttgtttcttgcaaacacaccacagatgccccagaggaagaaataagattacgcacactggcacgtcttgcagcaccattcaacccacgcacattccagcataaaatcttgcagtctgatctattcatttgaaaataaaataccagttgcgctgccatacaaataagggagaggaggggcgtgccgggctggggagccccatataaggcaggccatcccaaatccaaagccagaaacacaaaggacacaaacactcgctactggcaataatagaccaccaaacactaagccatgaacacaaacttccttggagacacatcataggggaaactactaccac

SEQ ID NO: 198270 - DNA, 631 bp, Zea Mays
gaataataacacggcaaagtacctttgagattatcttcatccattcatgacagtcactgcaaacctgcaaattctttgaaaccattatttctgtccctggaccagtcttcaggacactataagccactgctagcttctcactatggaaggtaaggttttcttctctttcctcttcggagacatcttttgttactagttcagtcaatggagcataaccttcaaccttagctcttctgcataatccatgcagcactacgtatatatcctcggtgtcaggatgagatctatcaccagctttaaattcatgggtgcttccccctaactcaacccaactcaagcctttggtcttcctaactttcttttgtttcctctgtttccatacttcctctgaatcattccatctatttgctgatgaatagatgtttgaaagaagggtataatccccactgccatggcatgccatatgctcaatagtggcctcacctagttttgtgtggcgatatctgcgacaggcgctaagtaatgccctccatatcacaacatcaggctttacattcatcgacattaccaactcgtatgcttcatccagcaacccagctcgcgacaacgtatccaccaaggcaccgtagtg

SEQ ID NO: 198271 - DNA, 340 bp, Zea Mays
gatcattaaaggattcagggattcggatgataaagccacaacatgattcacaaggaaagagatcaccagatccatgcgaaaggagaggtaggcaaacaggatcggctaggatgatcaatagaaatgttataatgtttcgggacaggatctatggaaagaaacatggccttgatagggtttgcgcaactagacaccaaacaacaattttttttgacataaccatgtgcacaagggagtttcggtttggctagcggtaaagcaatgggggtctacaagttgtgtaggtgcaacttcagggtaaaacacacaagggttagaaaacactaacactagcataaat

SEQ ID NO: 198272 - DNA, 351 bp, Zea Mays
agtcctgctgctcccacggagccacgaattgccccggctccagtggctcctcctaaaggtaactcatcttcctccgattctgctgttgtccctggagtcagatatgatcttccagtcctaatggctgcactgcaaactttatgttattgtagagtatagtgcacctcctccagttgaggttgcacccactgatcccaccgatgaggttcctccaccagtagctccaccacaagctgcagttggaaatcccactccaattcttcctgggacacctgcattgctaccttatgttcaggctcctgctccatctgtcgttctcaagcctaatccaccagtcgtggtgtcacctcc

SEQ ID NO: 198273 - DNA, 695 bp, Zea Mays
aaacttacagcttctgtaactgaaattttacattccaaacgagaaactttcagtttaggtgcattgaatcgacttggctggaacaatgtaagaccaaccactaccaagacattggcccaggaaaagctcaaagattcagatcatgaaagcgggcttaaggataccaaaatggttgatcagaacaggatttctgcaaccgcttttgagggggatctgaaagacattaatatgacaaatgatgataaacctggagaaagcatcgaatcgtcacagggaaagccttctcaaacttctgaacctgttggaacagcgacagaaattggaactgaacagccttataaatcagataaagctaattatggaaccaatgatagcagtgaagggcagcatataacagaacaggacaatgaaatgactccaaagcaagtttctgatgatcagtcagtggccaactgtaatgggccttctaaagaaagggagcaatcagcagatgctacaacagaccagaatctacaatctaacacaacaacagaaaaggaaggtgacacaagtcgcacaggtgaagataagactgctcataatgtgaatgatcaaagcacacaagtctctaaaacagaagaatcaaaaccttcccccattactgtgacccaggcattagatgcattaactgggtttgatgactcgactcaaatggc

SEQ ID NO: 198274 - DNA, 201 bp, Zea Mays
gaggggagtggctccgaaggctccaaggagttccttcccactgggagcttggaagcagaggtagaagagaagggtgattcggaagcggttgctgatgcgaccaagcaaactgcaggtgggaatgtgggtgcggaactgggagaggataaacaggcagaagtgggaggtgaagagaatgctgaggctataaagctggtggag

SEQ ID NO: 198275 - DNA, 325 bp, Zea Mays
gcagtatctgcaacagtttctttaggaattgtaacagtgtcggcttctacatcattcatcgacacatgatccttatttggcaatgatgctttgctaggtgaacttcctgattctagagatctgccttcttccgattctgtcttcaactcctgtatttcctcttggttcaatttggtagggtggagagacaaatcatcagcattccctgaactgattttatcttcgtcttctgaaacatcattaggtttgctcagtatcatagaaatatcatctagtacaacatcctggacatgctccactggatgatgtactttctcggtgtaat

SEQ ID NO: 198276 - DNA, 209 bp, Zea Mays
caagtttgtggacaaatataggacctacaactaataaaaattgcttacctttgttgtgtctgtttattctcgtatttaaatcaattactcatataaatgctttgtaatctttatctgattgtgataaacctatgccccattcatactttttatcctttgggttgcacctttatgcatatttgacatttgtttagttaaaaccttagctc

SEQ ID NO: 198277 - DNA, 463 bp, Zea Mays
cgggtctccaggactccggcatggctgccgtcgctgcgtcgaagattcgcgcctccgcgctcacgaatctctccccgccgcgagattgggcaatgctgctagctcggcgcgccgtgtgctctctgctctgctcgccctcgtatggttgttccttacctcctagctcatgcataccagcagcgcctcactcacctgccagggcccaataatcgcacacacaatcacattcagcagcagcggattcatctcagcgcttcgcagctagaaaagaagacagcagtagaatccgggaaggaaacataagaacagggagcccagggcaacagcaaatctgaatctacaatctccctagcaaccgatgggaaacacagggcatccatctcccacccgcgcaagaacataaaaaaagagcgctgcgctgtgcaggtgggaggtagagttcggatgcgaacttgcgaagaac

SEQ ID NO: 198278 - DNA, 349 bp, Zea Mays
gtagggagagattactatggtgtatttcctctcaggggaaaactattgaatgtcagagaggcaaaccacaagcagataatggacaacgctgaaattcagaacataaagcaaatccttggtttgcagcatggaaagcagtatgatagcaccaaaggtttgagatacggccatctcatgataatgacagatcaggtttggcatatagctccaattctatatcaaccaatcaaactcaagttttgtctgctcatgctttgacaaacaaacttcaggatcacgatggttcccacatcaaagggttgctgatcaatttcattcactcattctggccatcacttcttaaagttcc

SEQ ID NO: 198279 - DNA, 659 bp, Zea Mays
ttttaattgggggtacagaacaagaactgcggagctgcccttgtaagtccaatcgcgttgtctatgttagagaggacatactggagctagaggctctatcaagaaaatttgagcaggatgtcagctcgtataaggaaggaagttgcattagcccatgtaaggaggttgagatctctgatactactgatgaacaacttccaaatcttgggattactctggatttcgttaatagtaaagctggtagctcaggctttatgactgttgatggaggaaacagttcttctgcagtatcaattttgacatcttctgtgcatcatgaggcatataagcatacagaagcaagggtgggtttgctaaccctctattgagacatttttccaaccgctattgtcagttaatttaattcttgtttcttaggtccatgcaacacaatctaatcacatttattccattgcgaagcaggcaataaatacatcaatgaccaaaggaacttacactatggatgagagttcatccggcatagatggtgcttgtaatgaacacggttcatgtaatgcttcagccatggaatgcagtgataattcggattcggagtgtgaaatcttccgagtcaagcgcaggtccacctcatttgacaaacctacttctgaagctaagac

SEQ ID NO: 198280 - DNA, 681 bp, Zea Mays
ctcgacacgagctggcgttggagaggacgttcccagagagggaaccgtcactgctggagtacgtggtgacgaagagctcgctgtagacagagtcgtggctggattgcgtggtggcgaagagctcgttgtagccggagctggaaagcgtggcgctggagtcggtggagacttgggggctggggtaggcgtactcggagaagggtcgcctactccccgagctccctcaaattggacgtactcgatggtgaagtcgtcgtacgtcggagtcgtgccgtcgtccactgccttgtcccaggcccatcctcgcccttcgtcgaacactacgtcgcgcgccgtgtgcacacacattgttcttgggtcaaggatgttgtaggccttcgagccctctgcatagacaatgaatacccctgggtgctcctgtcgttgagcttgccgatgtggccaagctccttggtgaacacgaggcagccgaagacctgtaggtgagagaccgccggcttgcgcccatgccaagcctcatacagtgtcatcccgttgagtgccttggtgggcgagcggttgaggatgtagaccgctgtcaccacctcctctccccggaagacaaccgacattcccctttgcttgaggagagcccgagccatccccacaaccgtctggttgcgtcgctcggcgacgtcgttc

SEQ ID NO: 198281 - DNA, 752 bp, Zea Mays
ttgggttttcgacgaggccggcctctttcgggtttgttgcttgcttgtggtgcatctctctggctcttctaggggggtgatctgtagtggtgaagtcggagctgctttgttttggatgcggcaaagctcgacaacgatgacacaccaagttcaccttttggaaggttcaccgtaggaagtcggagctgctcgctttacttgtggtaagctcggcaatgctgtcatgctgatgtgcggttgagtccgtcaagtgtgttaagtacttggctgatgggatgctcatagtgggaagtcagagctgcttactgctgcttgtggtaagctcggcaactatgacgtgtggtgggttctgtcggtgtaaataggtagcctagggtttgttatcttactatcgtgataggtttttggctttttgctgatttttctatctaataaatcatgcgtctgcacaatttaaccgggtcaattttgttcgaaaggcacttgtgctattgcggtcagggaaaaaaaagaaagaaaaggagaggtgaactcggcgcatccccacatgcgattgcgatgcgtattgggctggaaattagtaggaagtttcagacgtacaagccacccctcactagtcgctactcaactcagtgctgcttgctaccagccaccgagctggacggagcgcagagaaggacgaacgaatcagatacgacgcggccaccgctttctctctgccagaacaagaataagcgcggacggccgtcgtg

SEQ ID NO: 198282 - DNA, 402 bp, Zea Mays
tcaatgagcatataacaacaccattcacaaaacattaaggacaacaaattgaatatcatgctacttacggaacagcaccagtacacatttccacaagcgtgcaaccaaaactccatgcatctgactctggtgatataccgtttgcactatcccaaaacatattcagtgacttcttcagtggtccccatgcctcaggagctgtataattggggctaagcagtgtagcatcaatgccagcactggagtcatcaggtactctcctactagtaaggttcttcagaattgctgaaagaccgtaatccgaaacgaatgcatgtccatgtgcatccaaaagaatgtttgacggctttatgctcatacaaacaatacccgctgcatggagttctgctattccacgagcaa

SEQ ID NO: 198283 - DNA, 271 bp, Zea Mays
ctgaagcagaagtgactggaaggaaggatcagccttcacgatcatttggaagggtatctggtggtgttaatcctaaaccaaaagcctcatccaattcccgagctaatgctaaaggctcatctgttagggatgcgattgcctctacagaaactgagttccgtgacgttagtttgcagcggaatcgtctaccacggaagtcagaagatgtagggaaaaaggttacagctggttctgattcagattgctctggtcgtcagggaaaaaatttgag

SEQ ID NO: 198284 - DNA, 323 bp, Zea Mays
cagagtggagggatacgaggatggtgggcgtttggcgcgggcgtggaggaggcaaggagcgcgggatgtgtggggccgtggtcgacgatggcgcgaatgggggtgtcgatatagatggccaaatgggtcgtgtctagcgggtcgggccgaggcgtgggctccatttaatagtgatgtggcctggcccgacattattaaaatggggcgcgtgccggccccatcccgagatgtctgccatgcttgggccactgtctcaggccgcagcgtcggaccgtcttgacatgattattttttattattcttttgaaaactcagtctacaca

SEQ ID NO: 198285 - DNA, 261 bp, Zea Mays
ttcaatttggagccttattgcaagctgaactatggggaataccagcaaattttgtaactaccattcctaattggagttgatggtgctggatgtaaattagctattgtctactgaatatttggaacaaaagcatgaaacttcacatagaataagccacgtaagttgatttatgtggtgtttgcccactctgctatactcttaaatcatgtttgccttccattgcattccaccattctgcgtttgaaatgtatttacactctt

SEQ ID NO: 198286 - DNA, 453 bp, Zea Mays
catcgacgccttcggcggcgcgctcagcatccacgacgtcgtcaaccgggtgtccatggtctctctcgatttcgtctacctcgccatcgcctccgccgtcgcttccttcgtccgtaagtccaccttcagtggtaacataacactcccactagagtcagacaccgagcacacgcacgcagactaaggctgctcagctgttttccgtccgaccagaggtgacctgctggatgatcaccggcgagcgccaggcggcgcggatacggaacctgtacctcaagacgatcctgaggcaagagatcgccttcttcgacaagtacaccagcaccggcgaggtggtgggcaggatgtcgggcgacaccgtgctgatccaggacgccatgggcgagaaggtcggcaagttcatccagctggtggtgaccttcttcggcggcttcatcgtcgccttcgcgcagg

SEQ ID NO: 198287 - DNA, 369 bp, Zea Mays
ggaagagtaagaaggagatggtgtggaagtggaaggtggtgtgatgggaataagaacatctggagtagaaacattaggtggtgatactgatgaagtttcagaaatgggaggaaggctcatgaatgaggtagactgtggaattaaaagaagaatgggtggaagagttgtaaaagaagggtcggttttcattaaagctcacatctcgagaaatacgcatgcgacgagaagatgaatcataacaccgatagcctttatgttcaaggctgtatccaagaaaaacacactcaacagattgagcagtcaatttagtacgttcacgaggtgataatagtacataacacgtacatccaaaaactcgaaggtggtcat

SEQ ID NO: 198288 - DNA, 500 bp, Zea Mays
ggttgtatctatttttgcagtttatgcatggacaaagtatctcgctaccttgtggaaggtcccggtaagcaaatgctaaaaactcctcaacaccatttttgtatgcagtgtccaatcttgattctttcatccaacttcgatccatcaatctttatattatgacctattaaagttgaataaaacccgtaagcatttatccaaaccagtttaatttatctgtccaaatccttactagcaatctgtcaacaactccaatcgaaacacaaatttactagagggatagagaaggcagtcagcagcacctcagcggtcactggtcagctggttagccgctcagagccttggacagtcagatctcagcaagcgacgctcgggcctcagcaagcctcagctgttggtgggcctaaaccgtgacaacacctaatcctgttccgcagtacctgtgccgcggttcgcccaacagacaaggatacgctcaattgcgcaaggatacactccat

SEQ ID NO: 198289 - DNA, 316 bp, Zea Mays
ttccggtatttagcatggaggtggaaaaaggcagtgttggcatccccttcagccaaccatgagatcctggagcgactccgagccatagaacgctgcagcgatgagagggccacaatgcgaccatccagctgatccaccaaccacatttctaacaccgacaagggtctgaaatcttgagcagactgcaacttatgcatgatctcccttgccatcccaagttgagaggtaatatgtcccgtccttttttgagaccagctctgaagatgcttgaccgtggcactgaattttttggagagggtgacaaaagggcaagggg

SEQ ID NO: 198290 - DNA, 664 bp, Zea Mays
gagcctgtcaggccaccgagattcctaagataccgtttggattgttaaagatgggcctttcttatgcaattttcccttaatctgcttgatctttgcatcaacccgcgcagtgaaaccaatctttgttttctgcctggccttggaccgctccctcttccacattgtctggtcttcgacatctttctttagatacttgatctcttgaatcacatggtgatcaagtggattgcacgatctctggtaggatatgtgtatcaggtaggggatgttgcaagcagcagtcaccagaagcgtccctgcccagtatatgggagctggcccaaggacttctaacaggatctggtagttgtcgccggacctcaatgtcatcccgtaggcgaggatgaagatataccaagttgttatgctgccccatacaaagagatgttgaatccatgtgaaatggctcattgttagggcaatctgtatgttgacagcccagatgatgcaggtgaacatggtagttcccaccgcagccatgtccgcagtctgccctccagcacggattgcctggtcgtagaatatgcagagattgaggaagaatatagctagagaggagaagaggccgttccccatccatccaaggatccggtaccaatcaaagaaaaggttctttggcccttgc

SEQ ID NO: 198291 - DNA, 794 bp, Zea Mays
ctggtacaaacacccggttgccatgcattactagtccctcctgtgtatgccatggatcccctaagcttccttctttgatctgtgcactgagctgctgcccttcctcactgtgtgcacattcttcttctagatctttgtacagttggaaagtgggtgctgtcagagcataaactgattcattggttgtatcacggcgcgataatgcatccgccactgtgttaagtcttcctgctctatattctaccttgaagtcaaatccaaacagtttactaatccattgatgttgtggtactgttgacaatcgttggtccaacatatatttgaggctaaaatggtcagtacacaccacaaactatctaccccataagtacggacgccaatggcgtactgcttgtaccaatccaatgagctctctttcataggttgctagctttatatggcgtgctgcaaagggccggctgaagaaggctataggtccctggtcttggtgtaggacagcaccaaatcccgaccctgacgcgtcgcagtccactatgaatggacactcgaaatctgggagctgcagtactggcgctgaggagagtgcctgtttgagtgtttggaatgctgagtctgcgtcggttgaccacttgaagccttctttcttgaggagctttgttaatggagcagcgattactccaaaatccttgatgaatttccggtaatagcctgctagtcccaaaaatcctcgcagacctcgtggtgattttgggattggccatgatgttactgcctcaatcttgctactgtccatg

SEQ ID NO: 198292 - DNA, 248 bp, Zea Mays
cccatccacgatcgccgcctccggggctggcgaaagccagtaccatccgagtgccgccgcccctcactgcctccgatccccgctgccgccgcaatccgcagactcagctggccaccatatccctcctcccctcgcacacctcttcctcgccgctcgtcgtcccttcccctccgacgccgaccagaaccgaaattcaacaactccctgggccctggcttccttcacccttttcccttctctctcctcgc

SEQ ID NO: 198293 - DNA, 397 bp, Zea Mays
ggacgtgaagaacgcctttcttcacggccacctcgaggagaccgtctactgccaacagccgccaggattcgtcgaccctggcgctccagatcacgtctgccatctacagaagtccttgtatggcctgaagcaggctccgcgggcatggtaccagcgcttcgccaccttcgtccggcacctcggcttcgtcgcctccatctccgacacgtctctttttgttctacgagaggggacaagtctcgcctacctactattgtacgtcgacgacatcatcctcaccgcctcatcgtcggccctcctacaacgcattatgactcggttgagctccgagtttgccatgacggatcttggcgccctccaccacttcctcggcatcgctgtcacgcgctcctccgat

SEQ ID NO: 198294 - DNA, 537 bp, Zea Mays
gtgggcagaggcctcagaagatatcccgttcagcaaggaagtcaaatttagtccctataatcactactgatagtgcactggtaccaggttcgctggacagtcctgtcaatgaagattgtgcaggtttaccgaggcgtgcatctgtaaatagccttcaacaaacaaaacgaggagatcatgggctctcaactggacctgaaggcaatgagcctgtagttgctgagaaaaagctaagggacaagggcaaaagggctggtgaactggatgatgggcatggctctggttttcagaagattgctatgcttgggcatccttccaaaaggaataagttgcctgctgatgaggatattggagatgctttaaggagacaagcaagagttgtcccgggttttactctgaccaggcctgggactcctgtatccattgacaagcttgaaaatgctccgattacaaaacaaagaagtgtgaggacagtctcagagagaactgagaggtaacttgtttccttagctgaaaagcagttttatgtggctaaat

SEQ ID NO: 198295 - DNA, 499 bp, Zea Mays
gagcaggaggtacgaacgagatcagtggcacatcccttggctttggaagcaactgccattcctgcccttgtcgtcgccgccaaagagcctgcagaagccaaagacggcgacgcgcgatgacggtgggtcgagcgaggacagccgagtggatgcactccaccacccgtgccacgtggcgttgaggagtcgcattcatcttcttcacagagaagacgaggtcccgcgaggaggatacacaacacacggggaggatgagccagctcatggcctcgtcgatgtcggccgtctctcatgagtccggcatggcggatgtggcatcctcggctgcaggctccgagggcaaccatgagccgaggcactgagaccttgaggaggaagcgtagctaggtttggttgagcagggtgtggggtgtggacgacgaagccgggcaggcgtgtgcctcgacgatgtgtgcgcagagtgggccccgcccctatggacatcgcccctaggggttga

SEQ ID NO: 198296 - DNA, 576 bp, Zea Mays
ggagatcaagatcgtgagcgtcgtggacgacggcggcgtcctcgacacgccatcgtcgtccccggcgggcgcgcgcagcctgacgaaggtcccggcggccggagccgccgccctctgcgagcccctgctgccggctgctggcggcgccgccgccgtcagggtgaagctggtgatcagcaagcaggagctcaggaagatgctcgacaaggagggcgtgtcgctggacgacatggtgtcgtctctcgttcgcaaggaagcgagcggtggtgaccgggaacaggagctctgctgcggtgggtggcggcctgcgctggagagcataccggaaggtagcgatctctagcacgtacttcctgctgggcatcgttcgtcgtcgttcaggtgtcttgtggaagtcacaggatcagtgtcagtggtcgtgcctacactgcatgcaagaagctagttacgctgcgcatgatactttttttgggggaataagcgtataattaagcaaaacatgcgtgctctgggtatagcatatatacacacatgtagagtagactattatatacatacccatacacatacacagag

SEQ ID NO: 198297 - DNA, 400 bp, Zea Mays
agcaaaaggcatggaataattacttaatcgcagattaccgatgatgtagtgcatctcactggtgacgaagtggccgcacaaagggtcacaagaagcaagaccacaacagatcccggaaggatgggatcagtgtggctatgggcatttctcttctttcttcagccaaaagcacgaccaggagaaaggggtcatccatggttgatttgattacacggagagagcacgaccaacagctgcagggggagggtctactctcctgctgccctgctgcacagaacggtaggacgcagagtagcaggtggccatggcgagtgggggagaagcatggctgtcggcaagggggcacttcaccggaggaacgcatgggcaggggcggttcctggctggacgccatggccac

SEQ ID NO: 198298 - DNA, 1702 bp, Zea Mays
ccccaatcacaaaccctaggccgacaggcgcaacgacgcgacggtgcaacaagcggacaacggcgaccgcgcggccaccgcttagtgtgcgaactctgcagcgcgccagcggaagcagaggaggcgtgcagcatctggcgtcccggcctcccggggtcgagttcgagcgccgcgcgcacacgtccgccagatggtgtgtagtagcggtggttgggaatatctaatcacccaaatcctggtctgacactgttccactgatagaatcagtatgtccgacgctgagccacctcctgcaatggaggaggccacgctgacaacgccggatgttgtgctaggcgagggatacaaagatatcgagggtcagaaggatggccgaacttgttatggtgaaggtggcgatgttatagtggctgatgagttcgcgggtattgttgaagaccccaaccaacccgatgtttttaaggctaaagagccagaggagggtgttgatgtaggggggcaaactaatgtcattagtgctgctgtgcatgttctcacagaggtggatgctgctgtgtcatcctccacactggtggatgatcccatggaggttggcatgcaaaccaaagaggttagtgctgctgcggatgatctcatagaggtgggtgctgccctggtaccatctgcacaggatcacacagcagtggctgcttgcctggttaatgatgactgcaatatagttatcactggtggtgtgcataggtcggatgaccaaactgttcaggagtttgggggtgactcccttgacgctgatgaggttgctcccttggtaaatgatgtacaagatgacagtgcaaggattgatatggatgttgcagctaatgatcatgtgcatgctcaggatcaggaaagctcacagttggatgtggctacagctctgttaaatgaggtggaaacagagattgccgaagctggagaccatgttgtacaggactgcacaaatatggatatgcagatccaaactggagatgacaaacatgttggcactattgcggacactgccacagatgaggagggcaagcacatgggtgaagataccatgggcagagatggtagtgagaaacatgatggggcagtcggtgttgatgtgtctgatgagagggtagaaatgggtaggggtggactgtctggagatgataacgagcaaaaggaagttgcaacagctgatgaagatcgtgtggaagaggaagacatgcaggtggatgccgtaagcattactggagacatggttgaggaaggcagaattgctgttgaatacattgcaggcgaagctgtaaatggcaaggatggtattgatgtccctgaagaaaagactcctcagatagacaaggctggtaatgatatccctgaagaagagggtctccaaatggggggagctggcttgattggcaataaaaatgggccgaaagaggctgtgatagctgattaccatggagtggaagaaaataccatactgatggaggcagctaccacgactaacaatgatgatgatgatgacaacaaaattgttggtgaagatgttgcagaagctgtcaatgacataactggtgatggtgtccctgaacaagaggctgcacatatggatgacgatgatgacgatgagccacctcctttagtggcaaagaaaggtggagggcgtcgtaagaggggccgtccatcttcc

SEQ ID NO: 198299 - DNA, 407 bp, Zea Mays
cggcctcccttcctctcgcttcgcttacacttctcccctccccccaacccaaacccaacacaattcccccgtgttgcctacacgcactggccacgaccaaaccctaggcgccgccgcctccggggccctcaggtacgcctctcgcttacccgccgccgggatttcgccgctgcgccgccgtccgtggctttgaacgactgacagcttcgcactagggttcgttgcgatttcgttgttaggagtgatttatgttttacttttctgtttgtgtgcgtgattggatcagggctgtcatacggggaaggaggaggatatcggtgaggagagaaggggatttatgtcccagcgaggtgacaggggcgaggggcacgccaggagacccggccggtccagcagcttcggcggcc

SEQ ID NO: 198300 - DNA, 302 bp, Zea Mays
ggaatctatgaaaccctgaaagagtgtgctgtaataagcaaatctgctggaggaattggtgtctcagttcataatatccgtgctactgggagttatattcgaggaacaaatggatcatcaaatggaattgttcctatgttacgtgtctttaatgatactgctcgctatgttgatcagggtggtggcaaaagaaagggtatgtttcttcattatcgtcgcttttagttccttcatcttcagaaattctaacgagcttctaaaaacttaggtgcatttgctgtatacttggagccttggcatgc

SEQ ID NO: 198301 - DNA, 441 bp, Zea Mays
attgcattgcacgcctcgcccggcgcctgctcccttgcattttccattgacctcccccccgccccctctcgtccgtctcctcctccccaaagcttcgaattttcccgagccggagccacaccttctttctccccgcgtcccacgattcgccgtcggaaagaggcaaggcaacggaaaccgagccgtcctgcgtgagctggggcggggtcccccgtctgggtgccttccgtgccactctcctgcaacgcggggcgcattgtcttgctgcccccttgagaagggaagattcccgccatctattaatcctcctctcgtatgccgttttctgcctggggaggacacaaacgcagcgccgcgggaaagccgggcgccgcatggatcgaggcatccggtgttcctgtctcaagacccagttttggcgtcttggcgtagcgggacgga

SEQ ID NO: 198302 - DNA, 266 bp, Zea Mays
cagatttgccccaatatcaacacgacacatcctactctaaatgaacttttgaataggattgttcatttggaaataaactggttgcttgtatatggtacaccaccgccacggcaatgaggcaatcagttgcaaactggttgcttgtatatggtacaagccatccaagtttaacagtgtattgagcacaatatcaaaccctaaatcctaaaccctaaacaattcaagacgctaaaaagtaatagctcaatggggatgggacatttgac

SEQ ID NO: 198303 - DNA, 287 bp, Zea Mays
taacatgaatacattgtttggcacttactttcattaattgcgtaacttttcccttgctgtcaggctctggaccgccatgcttgcgtctgccgcgggacgtccacgccgccatcgcccgtgagcagctccgacagcctcatcgtcgcgttgcacctgcacttgtgtcgcaggctcgggttaccgtcggtgctcacgccgaggaaggcatgatccatgcggagcagcccaaggcgcgatgccacctccgctgtcacgcatgatgagctgcttcgcctctggcaccgcct

SEQ ID NO: 198304 - DNA, 261 bp, Zea Mays
cggctaactagagcaacggcatagcccgctaaataacatacacgttggcttgtctattactatcactatctaaggcacaacatacaccacaacatttttataaacatacatattcacatatatattcacacatcgaccaaatcatacgaaccgtaaaccactaatctctaactcgaaaccatcatgcgcttacttcccaattcatgaacacataacgtgtattgacccgactcaagatatagaggaagcgatgactacttt

SEQ ID NO: 198305 - DNA, 411 bp, Zea Mays
ccttgatctatcggggtggagcctgtgctgccacagctggggactgcttgcccgcccatcgtgggcaagtttgcatgcccaccaggggccggtgtctccttcgatgcagcgctccctagctcctcctggcatgtgccgccaccgccaccgccatggatgacaaggtgctcgataacaaacatcctatgaacaccttccccttgtgcctagactttcccatgtcgccttcgcggcaaagacgatgttgtgtgacacaggtactcatccttcgcacggatcatatagccggtaggccttgctcccagcctcatagcctaggaacatcggcgtgctcctttcctctagcttggagaggtggggcaaccgaacatccacaagaacgacatgtccatcttcctctcgtaccaaacc

SEQ ID NO: 198306 - DNA, 271 bp, Zea Mays
ctgatttgatgggtccgttacttcctgcagttgctgatatatgttctgattttgatccagtgtccactgttgagccatcattattgaaactattccgaaacctttggttctacgttgtattgtttgggctagctccacccatacagaataatgaggcacctacaaaaccggtttccacttcattaggtacagcagaaagcagcagtgctatagcccttcaagctgtagctggaccatacatgtggaacagccaatggtctgtagcagtgca

SEQ ID NO: 198307 - DNA, 386 bp, Zea Mays
gaggagcgtgcggccgaacgaggggaacggggacgagtgggcgtgcgtcgacggggaggagccctggaggtccgtggccggcatggtgtcggtctcggcgtcggcggacgaatcgaagcgcggatcttggacagggaatggccgacagcgttgtggtggggtcggtggggctttggctcagtgggtccgtgggcgcatggcggcccagctcagctcaactcgagcaggcgtttttccggtgagattgcgtggggggatggcggtggtggatgagtgaatggtgatggggaatggggagggtggcgtggtgaagctatgtatatatgtgtggggatggcgcgattacgaccggcattactttttttattggttttggaaggtttggg

SEQ ID NO: 198308 - DNA, 407 bp, Zea Mays
agcaaggacatagagaattgacaagaaaaatcacgcaagggaggagagagagaaggggggagcatagcataggcatagcaagagcaaagctgaaaaagaggagcaccactcgtggggggttaaaaccccgagaacaaacttgggagtagcagcggccagccggaagcgagcggagaccgaggggagagggggtgaagaagcaacgagacgcagcgagcaagcgaaagcataccagagcaccaagcatagggacgcgcgcgcttctccagttctccctccctgccctgcaaggcggctgcaactgttccagctagcccctctcccagcctctgcgtcgtagacgtggtagtagcagccgcagcagcagaagcggcggcgagcatgctcttggcacccctccccggcgc

SEQ ID NO: 198309 - DNA, 339 bp, Zea Mays
cctcctcaggcacagtaccagtgatgttattgttagcaagatctagcaccttaagtgagctaatcttcccaatggccggtgagatactaccactgagacccttgttggcaaaagtcagcccagtaatgttaccttggatgcaagtaacacccggaaacatacatggatcattccccctccaatcctcagcaagtgcctttgggtacatgaacccagccgcaacctcaagcagcaggctcacaaggggattgcacggcttcccggcttcctgcacacagaaccgctctgtatctgcttcgatatcagcatgaagtccattgggaatctgaggcatcggac

SEQ ID NO: 198310 - DNA, 293 bp, Zea Mays
cccagttacttgctcgtcgcccttttgtatctctggtggatgcccttgtcgatgttcgcaacgagactcatcttcgtacaggtggtttattgtcttcttcggtttcgttttggctacttggtctctgtcttcaccttcccagacatcattcgtcacccttgtgtgaatctggtggatgctcttgctgatgttagcaatgagactcgtctttgttcagctagtttattgtcttcttcgatttcattttggatgctcggtcttcatcttcgccttcctagtatattgctcccccg

SEQ ID NO: 198311 - DNA, 533 bp, Zea Mays
cgaatgcgatcgcggttagtggcggcggtgatgatgcagtcagcgttgtgttggctgacgcgcagggtcgggtgcaggtgatgcccgttgccgagggcgcggctgtcgaagtggacccacccaggcgtctcatcgtgagctcggtggccagcgtcgcgtcggcggagttggcggacgagagggtggaagccgtggcgttgtctcatgatgggaagaacgtggcgttggtgctgaagactagatgtttgttgaaatgtgtcactgagggggttgtgctcggtgaggtatctctgctgggtacttctctttgcaaggacaaaaacacagtagacaaggtatgcactgctggagcttttttcctcagcagtgatgaatgggatgctcatgtttcagacgatggcgttgtggttaggaatttggtgttgtggagtaacaatggtgctgtcacaatgtacaggattgctcttggtagctcatactttgactctgagatagtgtgtgaaattcctagcaacttatctatgcaaggagag

SEQ ID NO: 198312 - DNA, 356 bp, Zea Mays
catgtgcactttgggggagggggtcgaattcactaccaagaggtggaccatccttgcggaaaattttgctcaggatataatccttgggaaacagaacttgtgatagaattttactttcctctcctgccgtgctcataccccaggtgtccgactctgaacgtgaaatgtcatagatgggagcttggttacaaaacgaagaactgctgctgcatctaggtccactggaacgtgcactaaattgcctttccatctgagacccaatggctcccatctccatcctcctctcttttctccttcgctctttgaaccatatacggacctgactgtaagtcaaaccaacacaggttgcatactca

SEQ ID NO: 198313 - DNA, 895 bp, Zea Mays
caggattaaaaaataaaaagagaacatgaagtcatggagggggcaatagagttaaatatgtgtagcagtaccggcagttgcagcaacttatataacttcgaaatctctggcttgagttgaacgtgtagacctttttgtgtggcatgaagattgcttcgctctacataatgaactgtgttagcaaaatgcagtatccacatataaactaaaacacatcaattcagttacagatgtaatacctagttcctgccatgtatcttcaactgatatttgatgagaactaggtggggtattgtttcctggcaatatggtgtccttgtttttgccaggtgagtctattgcagatgaatccatgatttcaccaattcttctacgctttactctggcttcatcagtttcttcagtagttattttcaactgtttgtctgtgtttttcaattgttgttccatgttatttatctttctacggcttctttgtactggctcagatatatactgccactgaggagacctcccattaagtaaacttaaccagtaggcccagaactttggcaggtcaccatcaactgatggaattccctccctctcacccgctacaacaatagccctagaatagaaagatccacacagataagcttgtgatatggctgtattgcctgattcagttctgagttcaaccttgctgagtaattttgtcaaaaactccaaatctacattatccatgaaaagctcatcaccagagacatttgagtagctatgttgctgcaactcctcaagtctattgaagagaaatgatgcgccccaactgagcagacaatggctcaggctaggggttatattcacaatattactatccaaaatatggtcatgctttgcaagaataagagctttttcc

SEQ ID NO: 198314 - DNA, 868 bp, Zea Mays
aaaatcttgagaatgaggtgatacgactgaaagaggagctttctgtccagctagaaaacaattccaccttggacaagcagtttgaagaagccaggagcaatctgcatgctgaaatttcagagctacgtgcagataagaacacatctctattgaaattacagacgtctcaggattctgtcaggaatcttgagattgtggttgaaaagcaaactgagaacatttcaactctacagcaagctaatgatgagttacagaagaacatctacactttgacggagcaatcacaacgagacaaggcggagatgcaggatgagttgaaggcaatacaagaagataaggatgcagtgctaacacaactgaagcagtcagagacttcagtacaaaatctagaggatgagttgacacgactgaaagaggagctttccgtccagctagaaaacaattccaccttggacaagcagtttgcagaagccaggagcaatctgcatgctgaaatttcagacctacatacagagaaggacacatctctacgggaattacagacgtctcaggcttgtgtcaggaatcttgagattgtggttgaaaagcaaactgagaacatttcaactctacagcaagctaatgatgaattacagaagaatgtctatactttgactgagcaatcacagcaagccaaggtggagatgcaggatgagttgaagtcaatacaagaagagaaggatgcagcgctaacacaactgaagctgtcagagacttcagtacaaaatcttgagaatgaggtgacacgactgaaatgggagttctccgtccagctagaaaacaattccaccttggacaagcagttggaggaggcaatgttgaaagtgtc

SEQ ID NO: 198315 - DNA, 269 bp, Zea Mays
cgcggggcagagtcgacggggctgcacatgacgcaggcggagaaggatccacacatggcgtggaagaggtcggtgagaccgagagtgggggaggagagggtataacgacgagatcggaatcgaggagtgtatcgaggtcgggaggtggggaagatccaacaaggggaaaacatcctcattgaagacatgacgagagatgattatacgatgggtgaggagatcaaggcatcggtaccccttgtggtcaggggagtaaccgtgaaaaagac

SEQ ID NO: 198316 - DNA, 829 bp, Zea Mays
attaagttaagaccactgactagttctcctttcatttctaagtaagccttagcttgttcacatatcttcacaaatgcttcctgcaaccagagcagatagtgaagtgatcaaataaggagatactgcaagaagtactatcgtgacgatggtagagacagacctgaacttccatagtagcatgaccatacatcttatcaagtatagttacacaaacttcaggaagaccttgcttgcgagctatgtgagcgagcttattcacattccaagccttgtctcggtagccaagatgatgaagttgaggatttgtttgaccaaagtccttgaatgcatctattactgaattgtacatctcattcctccattggagcagatcataccaaacagtcatatgatcccattcattgggtgtacgaagtctccaagtttcaagaatatccttgagatcagcaaatgagttattttggttggaattggtaccagagcttgctgaagctggtttgttaccatttgcgatgtcaagcagtattttggatgattcttttacttcaaccaactgctgaaactgctgcagcagaggcattcgtggctgtacagacatttcaggcaactgccaccactgttctagtgcgagctcaacacctttggtgatgaggttctctgcttcactaacaccattagtacctttgtcatggagagtaaaaaatgcttgaatcaggcgtaactttggtgtctcttctacctgagctttggaaattacattatccttcatatatgcccagtcaggaaccttccaaagacagtctaaaagaatttcatgattctccacccc

SEQ ID NO: 198317 - DNA, 332 bp, Zea Mays
catgaaattctcacgaaagtcccattgagcctggcctaagaagaaaacaaacagccagatgaggactcggacttatgtggtttaggcatatatctacatcctcaatcaatggagctaggctcagttcatactgcccttcataactatccctttaaatatgtttactcattgtcattggcctacccgattataagtaacatgcaggggacaatatatcttcttgtcagtgtctcaagtattacatcatcattaacaacaacaacaaaaccttttagtcccaagcaagtcagggtagtctagtgtttcaagtattacatgctctaaataatatc

SEQ ID NO: 198318 - DNA, 1157 bp, Zea Mays
attatctcttcctcctccagaccatcttgcgtacagatccacaggtgattgattgtttaaacataatcggtcatttgtaagacacatattcgattgtggcttcattaaccttatgagtccttttctcactgtctataataccagggagctgtgaactttgctcttatgatgtcacaaatggagggaggctgcccagtagattataatacaataactgatcttttccttcaggtatgcttatattcataatcataggtaactgtcttgttgtctatttacattccttggttttatgagtccttatggatttttgctttatgcatctgttaacagagaaatatgatacgggaggcaacagcttttctgttggatgttctgaaaccaaacttgccagagcatgcttttcttcaaaccaaggttttcatcttcaccgtttgaacacgaatggttgcgcttggatgtgtacattatccttttctcagcagtttctgtctatgaattgtaggttttggagataaacttagtgacttacccgaatgttgctgatgccattcttgctaatggtatgttcagtcattatgatcgccctcgtattgctcagctgtgtgaaaaggctgggttgtacttgcgagccctccaggtcagtaccttcacattggtgcagctgatatctctgcttcgtattcctgtttaactaaccttacattttgtaatgcagcattactcagagttgcctgatatcaagcgtgccattgtaaatacccatgtcattgaaccacaggtttgtcgacttcagttattttcagatatctttttttttatgttttgcccattaacaacttccttggacaggcacttgttgagttctttggcacattgtcaagagagtgggctttggaatgcatgaaagaccttctactggttaatctgaggggaaatcttcagattgttgtgcaggtattcctgttcagtttcttatgccccctccccctctgtaccaacccattggcatttcttttcttccttcttggttctaattattgtgaaatcttgggggacatctgcaggccgcgaaagaatactctgagcagctaggggttgatgcttgcatcaaattatttgagcaattcaaatcttatgagggcctttactttttc

SEQ ID NO: 198319 - DNA, 531 bp, Zea Mays
ttgaaggaccatgaaggcttcactatcgtggaaagtcgccgcgtgcagaagatgagaagacgtctcgagtgccaaccaatcaggcaatcaggcacgttccggaagctctgaaggcagaggagttggctcgtgccattgtgatcaatgtaacagtggataatcagtcagatgttgaatgggccattttggccaattttgcccggcgtctcgagatagaagaagtgatgtccctgcaagctttcttctcggcctgccatgtgtggaaatggcagatagggcttacgacaagggcatgattgttgacatttcaccctccctcagagctcatgtcatgagatggagtagacttttgaattcctctgcagcagccttgcaatatcaagttgaagttgaattaagaggtatcccaattcatgcctgggatctggcatctatggaaactcttctgaatgaatggtgttggatcactgagatccatccagtctctgcccatcagcgtgaggtattcagggtgatcgcctggtgctccag

SEQ ID NO: 198320 - DNA, 229 bp, Zea Mays
cttagatccaatggccgttggcgcgtaccggttcacttcacctgagatctaatctgggccgatcagtggcgatcggacggttagatctctccgatacccctttgatcacccatttgacacataagccctcaggaaatttggaaaacaacccgtcgtccaatgcgtgggaaacctgtgtctgggctattttgcgccagagtccctgcccttttacaaatttgaggcccag

SEQ ID NO: 198321 - DNA, 1022 bp, Zea Mays
ggcttggataagcgccgatgaacctccatgaggaaggcatcgctgtcacgtaggatggagcccaccacctccatttgagtagcctctgccatgtgtggtaaaaaaggggacatgggatggccaacaccgcctggaaggggatggcgcggagcgtcgtgtgggatgaggtattgcagcaatattctacccacggaagctagtcgacccatgcacgtagtcggttccttgtggcatagcggaggtacatgactatcatcttgttgatgacctctaattggccatgtggtcgcttgggatatagaagtcctcgcgcaggtactgaagggtcttttaggtcccttcgtggttagtggaatgggacagtgcagccacctggtggtccaaatcgtgctatgtcgacatgaagatgcgcttgacgtggaggacatcgtcggtggttaccagatcggggcaagaggtgccttgggggccagcatgtgagatgtcaataggtgccttaggggtcgatgcttgagggtgtctcgggggctaatgtttcgggtgcctcgagggctggggcaagaggtgccctaggggtcggcgcacgaggtgccttgggggccaacgtgcggggtgccctgggacctaaggtgctctactgcattggggtcgcgaaaaaaaggtggcccatgaactagttcgtgaggtgctctgaggtccgacacacgagcgctatttggctgagccgagtgacaaatgagggcgttgaaacgcgcctggtagttctgtactatggtggtgaaagagagttgtgccaattcgaagaggcaattagtacggatggtcgggtcgaagcgtagtttgcagagctctgtgaagcgctcctaggaaggcatgccctcatcctgttcaagggtgtagtaccacgttcgcggtccgtcgtgtaggtggtataatgcgagccaaacacgatcagatgtgagcgtgtgttgcccttaaaaaaactgctcacaatgagtcatcataggaggtgaaatcgtgct

SEQ ID NO: 198322 - DNA, 209 bp, Zea Mays
gtgggatcctctttgactcttgggagcgcatttggaagtcctgggcacctggtaattgtcgcttcttcatgtggttggttgcccatgacagatgttggactgccaactggcacctgcttgctcgaagagggttgcaacatcatcctagattcctagattttttttttgtgactaggagtttgagtccattgatcatctgctcgtagcct

SEQ ID NO: 198323 - DNA, 456 bp, Zea Mays
ccgtgcgcaagcttgttgccgagtgagttcatccactttcgccattcggcttcgtttctagcttaaattacccatagtttcacttccgatgtattcggcttgtgatggagtcattgaacataatgactactagtatagctccctgtatcgcaaatgagtttgctcgttcaacgtgctgactgcaggcggaattaggtcaaacctatacgtgagcacgattaaaaatgctctgttacagtagtatttatttgctcatgttttcttttttactctgcaaaaattctcatggcgtaggatcatcggtgagcttgggtcaaaacacatgaggtatctacctgatatgatcccttgtttgctgcaccttctgaatgatgagacgcctgcagtcgtcaggcaagctgttaagacaggaaccaacttgtttgccaaagtactccaaaagctagctatccaggt

SEQ ID NO: 198324 - DNA, 448 bp, Zea Mays
ccaacttctaatcgcagctggtaaaatcagatcctacggtcagcaagactcatccccaacctccagccgagctggacgacggcgcccacgcgagaccacggcggagccacgccggtgaagtattgccccgacaacccaatgccccagacaaaaatccagggagtgcaacgcggtgtgcatggcatggagattacaatggatgtctacataccgtgattcgggcagcgcagagctcacgcatcggtacacggcggcatggctgatctccgttgagaaattcgccggttgctggttactcccccagccgtagatgcccccaatcgtggcggaaggtgggtccgccgtgaagcggcgatagcggcgcggagttcccagcgccacaccccattgccccgcacggaaaagacacggacgccaacccagtgcggccgcgaatgtccacggtcga

SEQ ID NO: 198325 - DNA, 217 bp, Zea Mays
acaggatacaattgcaggagtgtcgttgctgatggatgcaattataccagtatgtggatcttcaccatcaacgtcaaggacagtaaactcaggtccaaaatcacagaagacactaccgaaaaggccacagacttgagctttgataaaagagattggaggctggtggctgtgacaatagtcgtcaaattcataagccttctccaaacttatatcagtg

SEQ ID NO: 198326 - DNA, 475 bp, Zea Mays
aagaagtagtgcgggagccgacacatcaaacacgaaggtgagcctcatgagtgagctatccagacacaggaagtcgtatcagaggtggatgatcaacggtaggtagccgctccaagttgacaacaaagacctgatcagctggacgaagaccttgtggggacggatggtgtagcaaagatagcgcaccacagtcatcgacgctcagagaacggtgatgtagatgcaatgaggaagcaggcatacgggcgacggtgttgtggcctaccaaggcgatgcaatagcagctctattgctcggctcaaatgcgtagcgtacttagagtagtgtgtgaggtcgctagacgatggacgattcaacttcaaccccaatccacgatagggcaaaccaaaaagacacaacagcaaaggatggggtgtacctagcaaggaagcacctagtcggtggtagtccgacacgatctggtggagcccccgac

SEQ ID NO: 198327 - DNA, 301 bp, Zea Mays
cagatacaagtggatacttatcaactgctgaggcatctgttttctcatcattgccattggactccccttttgctttccttaaagattgtgatgcttttaaaatggcagatctgatttcctgctgggaaagatatccagagctacctagaatagctgttgcttcttcttcctcagcttcatcaagttgttccattagttcctccagataggaaagttgtttttctagttccactatcttctgagatctctttgcagcagccatgtctcgcaaacgctgaccagccttttccttcaaagctgc

SEQ ID NO: 198328 - DNA, 348 bp, Zea Mays
gaagtgatgatgaggaccaagatcctttagtgaaaattcctgttggagagcagtaatagtgcgccgtagaaggggcatggacgaagcagttaacacaatgtcatccacgtaaacgagaaggtaaatcacatctgtacccttgtggtagacgaataatgaagtgtcagtcttggcctcaacaaatccaatttgaatcaagtgggaagcgaatctactgtaccaggcacgaggggcctgtttgaggccataaagtgaccgattgagacggcacacataatcaggatgagtggaatcttcaaaaccggtgggctgaacacagtaaacagtctctgacaaggtcccctgaag

SEQ ID NO: 198329 - DNA, 465 bp, Zea Mays
aatgctcggtgtttctcagccggccctctgcaaggcaaatttggccgttatcattgctgcctcccggatgtccaggaaaagggctctctaggcattatgagcgacagaacacagcgcagtcggcgaaagaatcgcgtcacctgtggttctgctgtgtgaacacatgtatttattttccccaaactttccccctttattattctcgaaaaaatactactactaaccatgtctctgtgctcgagaagcacatggtgttgcattggagacggcatgtgcttacatgccccgatgttggagtctttggatagtttcatcagtctatgggcacagtgcagctagcgtcgcagaaaagactctattgtcgtatcctttgaatgcacaagcataaacatgaacctatcaccgcttagaaactgaatctagatctagatttatcatagagcagttctactgatgaatctaaaa

SEQ ID NO: 198330 - DNA, 852 bp, Zea Mays
ccggaactttggaggtgctgggcagcaaggtgggttagtcgcccttattgcacgccgaagtcggttgcatcctggaactcgctatttggcccgtggactgaacgcatgttcaggcacaggcaatgaggtagagtgcgagcaactcgtttgggttccacggaagggcggacagcgcatcccttttagctcgtatatctggcgccgtggaactattccaatatggtggggcgcagaaataaaaaacgcggtgtcagtggaggctgaaatttacgttgccaacgatccttacaacggaagcttacagtactaccaacggttgggtaaaagatatgggaataaatcatctgaagcgaacgtgtccaggcaaaaaagttctggaagggttcccattatttgtgttaacttgctaagatacggcgaaggaaaaacagagtcagttcttgttgatcatttcaaagaatctatacggtacatgaactctactggaaagctgggaagcacgtggattcagttaataaattatgactggcatgccactgtgaagttaaaagggcagcagcagacagttgagggcctatggaggcatcttaaaccacctacaatggtcattggcttcagtgaagggaattactatgatgcaagacagcagcttaatgaatgtaaaggatcagttatctgcaatgacgatgtaaatggtgggttttgcatggaatctattcaaaatggggtgatacgattcaactgtgcagactctcttgatcgaaccaatgctgctagttactttggtgcacttcaagtttttgttgaacagtgtagtcgattgagcatctcgcttgacatagatgcaatgtt

SEQ ID NO: 198331 - DNA, 1086 bp, Zea Mays
cttggtgggtttggttttgctctttcagttgatcaagccacaggtggtttgacttcatcacagctattccattattcggttagtaagtattctacatttagtttgtcattttggtggctttaatttgcagattcttttaccatattttgagaacattgactaatctgtattgtcccttcgaagttttctgtagcagaaaatattccaccaaacttatatcgttcagttaattttctaaattgtcacgtagttctgcatgatacatattttttttgtgcatggagtctcatctagtcatgaactgatcttttcatatcaacttcaaaagtatatcactactgtcgtgtggcgattgcatgtagcacattgctactgctgagatttgtaacggcatataaaatgtgcaccacaaacctatgttagtcattattagacctctctatagctaagttattaatgtacagctaggcatatttagcgcttcattatacccattgctcagtacttgacatcttctgtgatttgtgactttatgatctgttttgtgaaccctgcttgtttctgtgttccaatgctctgaactgttgccaatttatctgcttggtttctttctaggactatgatgtcgaggatacagctttgcctcttcaaccgtcgttgaactatactgcaccagaattggttcgaagtggagattctaaagttggctctgcttgtgacatgtttagctttggatgtctagcttaccatctggttgctcgtagaccacttctggactgccataacaatgttaaaatggtatgttttaaacatctgattgatggcatttacccaatatagatttgtccttttagcatcaatcaatggcctcaactgtaattttactttctcgcttcagttttgcatgtagatcatcttgtttgggttgtatccacatcctacagcacctgttctgatgttttcccctatttttgcagtacatgaatgccttgacatatttaacaagtgaagccttttctaatattccttctgatttggtatcggatttgcaaaggatgatatcgatggatgcagtatcgcgtccta

SEQ ID NO: 198332 - DNA, 327 bp, Zea Mays
tgataacaaacttgacatcaatttggagttcctacttcataatccttggtgagtaaataagagccaagctatattgaactgcaacgaaggtttacgtggaatggacataaaaaacgaaggaggagctacaacctaatccgcgcaaggcgtaccgaataattatcatcaagtcacggaatactccaaatcggaggaggcgaagtgcgtgcatgaagcaccagcgcacagccttcgattatcatcacgtcctgcttgcatatgcccctagccaacactagagtagcagattattctccagacgcaaccacagaccctgtccacgacgga

SEQ ID NO: 198333 - DNA, 333 bp, Zea Mays
aagggcttatcccctggtttatctctgtgtttgttggagtctgtttcagttatcccttaagtttagcagataagttgttaggccacctgagttataaaggagaccttagtttgtattaggatttttatccaagaagttgatgtcggctggcacaactcttgggtcatcctggcgagtcccccatctcgccctggtgcccacagccgcagtgtccatcaccggagtccctacaaaccgcgttcttcttcccaatctaacctgctagtgcattcatcctggtgcactccccctagacctagcccaatccacataacccccccaccatcaacaacc

SEQ ID NO: 198334 - DNA, 551 bp, Zea Mays
agataacgatctaaacgaatcatcgagagttggcaagccaaatattaaggaaaattgttggttcccctaaaatctccacttactgatgccaactgaaatcatgagaattccgcgacgtttctccacagaaattagtcaactactaaagtccacccaaccaactcgaccccatccaggccccagtgacttgagtgcctcagtttcgcgcaagccaattttagcgaagccgcagcggattcaaagaaggcatagcttgcaagtacagggcagcagtataggagcgagaaaattcagcagctagactgctagttgctagagacaggaatccgaacctgggccagcagccgctccagggttgggcgcgtccatcgccgcggccatatcctccaagccagacgcccgaaaaatggctagcgacacaagcagcagcaggtgggcagtcctggcgatccgctggtggctggtgcacaagtgcagtactatccgcgctgcgggcggctgagttccatggatctgccccgacgacgcccgcaggaacgcgcacaaccagg

SEQ ID NO: 198335 - DNA, 271 bp, Zea Mays
tggaaaaattttcttgaaagggtgcattgtgagagtgaagatcaactccacgagactgagcattctgaagagcagcttcgcctttgggcatcataccggggacaaactttgacaagaactggtacaatctttggcttctgtcatagctgctactatattttcttctctcaatgaaactactttgtatatagtacatgtttgataaattcattaatttaataattgtttattgttgtgctttttacagtaagagggatgatgtactacagac

SEQ ID NO: 198336 - DNA, 302 bp, Zea Mays
ggaaaagaaaatggcaaaaccccatttaatccccgcatctatctgcaatcaaccgagtgcgggggctaggccgaagcgggatggagcacgaggataggagggagcgccgcggaggtgggaggctaggcctgggcgggagggagcacgacgataggagtgtcaaggcaggagggagcatggcaagctggccggcgacacgtcgtcatgcgggcagggcggaggcaggaggcagtgcacaagcgtgggagttgtagaggcgcggctcaagagaagagctggtcaggctgagcggcacggcaccg

SEQ ID NO: 198337 - DNA, 410 bp, Zea Mays
gagtcctgattcttgtctttatgatggtatagattcacaggtaattgacattgaaaattagtatccttttagttttgttcattttaatgatacatttgaataaagcatcagaaatctgtttgtcttgcattaatatctcttgcgcagttgagctgtacacctctccctgtatattcattgtttagctgcttttttcagatgagtattcgtatgtccgcactggaattctactgtaacagacccacacttgttgctctaattgagtttggatttgatcttagcacggttaattctgtgccgaaatgtagtcttgatgtggcacctgcaattgaaactgtgaaacccacagggaaggaagaaggtgctcctactattgtaaaaggattgttaggttatgggaaacgtcgaac

SEQ ID NO: 198338 - DNA, 327 bp, Zea Mays
ctaaagctactctcgctccatcaaaccaaccctcccaccatcaccaaagatatatactattactacatagttaacaaactttatctgcctcctgtcctgctaatctatatatcccctctccactactgctaccttctctcgcgcgtctctgctcaaagaataatgtcagcgtagcctagctagctcatagggattcctctttcatccctcctgagatcgacgatctcaccaattaagaacacacacgcacacagcagctacgtacgtacctagctagctagcatgatggaccatcagctgttcgacgaccccttcgggagcagcatc

SEQ ID NO: 198339 - DNA, 205 bp, Zea Mays
tgactttgaagcagcctctcatttgtcgggggaaggcttgcctcggtttatttcttctccagaaccactcatgtgggagcctccggtactaggtctgccttttttttgtgccaagccaaattaggaaactgttcagattactactgagcaagggaaccctttctactttggcttgccacactatagtaagaaatgaagaatgggc

SEQ ID NO: 198340 - DNA, 684 bp, Zea Mays
caatttctttggcatctcctttcgcagtttctgtcctcgaaaattctgcttcttgtctcgctctctggtcgcaaatttgctctgaaatcttgttctattttcttggtttagtttttctcgagcactcttcgcgttttgaaagatctgaagcccctggtcgccgttttgcggatcctggcttcggttttctgaagagatgcgatatcatacctctggacctctggacatgcgggttcgttctatacatcctcgcattttctcgaaggtccaacaatctgcttcaaatacaccagtgaatcataagaattgttcttggcagtttgcattttttttgttttttctattttttgctatgtgaatctatttgaatgaatcatatgcatcttgaatccgtgacgacgaatcgatggctcgatgatgattattcttgctttaaccacaccgaactaaaggctattggaagggtgctttcttccttcctccatttgcgccaggctcctctttcttggtgtttcctcatgaaaccttgctttcttgttgaagaatgcagttcctgttttcttccgcgagagtgcgaggtagaaggattcggtaagatttggtagcgtagcaaggggggaaagctggaggcctcgtccgctggttcttggcttgtagaaaaacctggcctttctctgagagcct

SEQ ID NO: 198341 - DNA, 345 bp, Zea Mays
acataatgcacacagaaatggagcttttggaccatctgtggtatcctcagtttctcatcagaatggatccattgtaacaggtgggtctaacatagcacaggcgcagccagctcagagtattttccatccagacccatccaccgtttctgtgacgtcaggatcattttgtccatcttctctaggtaaacaccaccttcagatgtttccggaaagatctggaaacatgagtggtgtcaaggcagcaaaattgtcttcttttaaaccacaagcttacatgaacctctacaatcatggcaatattgcagcatctgctgctgccaatatagctgttattacatccgatga

SEQ ID NO: 198342 - DNA, 299 bp, Zea Mays
gtgaaagacaagcttctaggcagagatcactcaaaataaatggaaatattttatcaggggcattctcctactgccaagccttcataagccttatgtccacataaggattccccagagctcacttagccagcttggttgtggccaacgagacaagacagacagacagacagatgagccccaagaaagcagtagtactggtactagcagtagcagcaggccatcaaccagagcggccaagcagacttcaatgggagaaatacactcggatttccattcttgatgcaaaaaacatcataatc

SEQ ID NO: 198343 - DNA, 349 bp, Zea Mays
ggaggtaaaagttgttgaagagaaagaaaaagaatgcaaaatgggaaaagagaaggaacaagataaagagagacaaagaagagagttggaagaacagaaggaacgggaaatggagcgagcaaaagataggcttgctgttcagagagctacaagagaagcacatgaaagggcattcgccgaggttcgagctaaggctgaaagaatagcattagaaaggatcacctcagcacgtcaaagagcatccgcagaagcccacgagaaagaagagaaggcaaccgctcaagcagctctggagcaggcttcaagggaagctagaatgaaagcagaacgtgcagccgttgagagagca

SEQ ID NO: 198344 - DNA, 266 bp, Zea Mays
caaattttctcatcccccctttttcctgggcatgcatagctcgagcagtatctaatctattgccgggtttgacctttggagcaactggagcacatccatttgcctgtgagatcctggaagacgaggtgccctccgaacctctcaaccttccatctgaaggttttccacttggcggcctaaaagacgcagagccatcacgtttcctcagtgcttcattaagcttctgtgacctttgttggactcctatgagctctcctgggttgtag

SEQ ID NO: 198345 - DNA, 364 bp, Zea Mays
attaataaactggacaagaatacctgagctccaataggaacaggcaacaaaccatgaacagagttagatagagcagcaagtatacagtggtcagtttggacaagcttttgaacatcacggagcacaactgtctgaaccaatgcattggggggcctaagagagcgtatctgaaacagtatcaagtcatgacacttattactatgatactttacttatgccactaaacataccagataggtagatagcaatcactcacctcgacatgtcgtggcaggcgggccacggcatatggtttatgtataacaacagaagctggtgtgtctgaccaaataattctgccgtcttgaataagtttaccattttg

SEQ ID NO: 198346 - DNA, 417 bp, Zea Mays
tcgatgtaccttggccaacaatcggtgatgattgtcccaaatgcggagcacgccatggttaatcacaaccttggaccctccttcatcaagctgtcccagacttagtatggagttcttcagtgctggaatgtagtaaacgtcgtgaagaactctctgctcaccagtcttggcttgaaaaatgatggatccaactcccttgatttccaccttcgatgcatccccgaaccggaccgttcctcgaacgccagtgttcagatcagcaaagagttcttgacgcccggtcatgtgatgtgttgcgccagagtctaggtaccaaccgctgtccatatcttcttcatccacgccaaggtaggcacaggcacatggctcagagagctcgacgtgctgcgccgtgtagctgtgcgccggcgtgctctg

SEQ ID NO: 198347 - DNA, 231 bp, Zea Mays
ggtgcagggagcgcaggacctccccgtcgggcgccgacgaggagtagggggatgacggccacgcgtcgctcatcattggtgctgctgtatgtgccttgagtatgtaacgatggaatccgattctgattacaatctcaatccgattctgattacaatctcaatccgaagagaaggcggtgaagaaacacggatggatggacaagtgagacgagttggagatgggatgggacg

SEQ ID NO: 198348 - DNA, 254 bp, Zea Mays
ggttaatctccagctaggtaacgactccttggtagctatgaaggctatgtctcatacaaccatgttacacaaggaattagcaaaccagttggcaatgtttgtgccattttcacttcttgctcctgctgtaatcaagccagttccatcttggacaatatcacagatagtgcaaggtgcatttccagctaacctgacttgccaaggggacacacacttggttagggacagcacaatcataaggctggaccttggca

SEQ ID NO: 198349 - DNA, 854 bp, Zea Mays
tgagttgctaaaggcatttgcggaattttttgatgtcacattggagggtagtcagtctatggatattgccaaattggtacagcagggcctcagaaatatccaacaaagaccaaaatcttctcctattgagagtggcagctttgagaagctacaagcactactgtataccctagaccaggaatcaacactatgtaagatgattcttgaagaagacatgattaacagatctgagaggactggtgaacttcaaagaatggctgaggagattattgttctgaaaaatgagaaggtatcactgcagaaggaggttgaacgggtggaggagagatcagcattgcttagagagaagctgtcaatggctgtaaagaagggcaagggtctggtacatgagcgtgaaggactcaagcaagctctcgacgagaagagatctcaaatagagaatttgaaacaagttttggaagggaagagctctgagatagagaagttaaaacatgctctggatgaaaataagtctgtaacagagaatgtgaagcaagttttggacgggaaaaacactgagattgaaaggcttaaacatgctctgggtgatagttgcgtggaaacagaaaacttaaaacaagcttttgctgagaaaacctctgaagcatataaaataaaacaagaactggatgcaaagaacatggatattgagaatctaagaggtgcgatagagtcaagagaatctgccatgacagatctcagagagcatgttgaacatctattgtcgtcgcaggttgcacgtttggaaaagttgcaagtagatattgttacccttaatgatgaaaaggtgaaattagaaagcatgttggaagaag

SEQ ID NO: 198350 - DNA, 400 bp, Zea Mays
gagatgaagagttgcatttagttgcgatgacatccagaagaaacttgacaaatcatgcatgtttctggggctataaattgccatttggtttgtataattcttgcttgaccatgttaaatcttcggtgcctgggtattgtatttgaccttgatgagacattgattgtcgccaatacatcacggtcttttgaggacagaattgacgcacttcaaagaaagctgagtaatgagactgatccacaacgtaggaatggtatgctatcagagatcaagaggtaccaggatgataagtccatcctaaagcaatatatagaaggtgatcaggtctatgatgatggaaaagtgtataaagcacaacctgagattgttccaccattgtctgataaccagcaaccaatgac

SEQ ID NO: 198351 - DNA, 308 bp, Zea Mays
atcaagaacaactaagtaatatttgtaaccagagacactaacaataggagaggtccataagtcacaatgaataagatcaaagttgttggacgctcgagacattgaagaattaaaaggaagacgaacatgtcgtcctagctgacatgcatggcacaaagactccaagcttttattacaaccagggatagccgaagtgagtttggagagtgcctcgcgaccagggtggccgaggcgacgatgccacagagaggtagatgtggagctggcaacaagggagtgagccacgggcagcttcagtgggtaaagcg

SEQ ID NO: 198352 - DNA, 325 bp, Zea Mays
agtggatgcacactggaaggaattttaccagatctcctgcctgggcttgatgacaaaggggagttagaaccatctggtagaagttcctggcggtactttgaaaatgttttatatcccatgtcaataataccagaagctaattgcttgctggactccattgcatatctagcaactaaactgccactgctaggagaagtagatgggctcactcctggtgaaggtgtgaggttctgtggacttagacggcctgtgtttgacaataaaggagtatttgtggcataggctaaccatctggggccaacagccatcgggccatacccaatat

SEQ ID NO: 198353 - DNA, 488 bp, Zea Mays
gaaaaagataagctatgtactaaataagatatgcttgataagtggatgagctagcaacaagtatatgtaaaagggaggatactttgggaagtaaatcacatctggcaagatatgatatgatatttatcctcgaagtttagttgcttcctcaatgtggcaaatctaaaccaaatgattcatgtgcttaattcgtataacaagccaagcctataaagggtggcgtaagcattactctaacaaggcactccagcaagccatgatatcactaggatgtttgcgaatctcacgtggggttgaccacaaaaccccttacaatatgatgatcggagtcaacaacaatcacaaaaatctttcaatgatcctccgctatctcgaagccatataggtggcaacaaccaccaagagtaataagattctcgcatctcaatatgatcactagtatcactagatgcaaaaactctatgcaaatcactaaagatcactcccag

SEQ ID NO: 198354 - DNA, 339 bp, Zea Mays
gtttttgaaaggggcactactcaggaccaagtgattctcatggctgccagagcgtctcgcacagaaaaccaagatgctattgatactgctatagttgggatgctagctgatcctaaagaggtatgttgctttgttatatgctcaaagcagataatgaggattatattacttactaaatgatgagatgcctctttgtccatgttttcatgaaggcacgcgctggaatccaagaagttcacttcctgccattcaatcctactgacaaaagaacagcactgacatacattgatggtgatgggaaaatgtatcgtgttagtaagggtgcacctgagcaggtac

SEQ ID NO: 198355 - DNA, 332 bp, Zea Mays
acatatgcttcatgtcatcctccaaagcaaatgccagagcttttccatcaataactagagcaaatgctgcatctggatccttctcgagtttgaccatttgtgacccattggcgatttgcgacaggagactctcctttgcaacctgctcagttgtcaaagatgaaactaaagtctaccataaagagaattaccatctagattataccttcctatacagtaaaagagagaaaaaaagttaaggtaccttctttgcatcctgagctacctgctcaccagtgggtatggacaaacatatttgtttcatgccttgcctcagtaaactgcatgcatat

SEQ ID NO: 198356 - DNA, 364 bp, Zea Mays
atggtgtgcggtagtgggggaaaggatggaatgggagacggtgaatgtggtaacggcagcaggtgcagtggaagtgaggtggtggtgtgtgctggtgcggatatggtggtgggtggtggtggaaggtggccatcggccgctgtcatagccggtggcagtccaccatatccaggcatgccgtaggggcagtctggtggcggcgccatggccgatgttcctggggtggattccaccgcggcaatgcgggaggacatggaggccatctgcgtggcaaagagccccaattggcgctggacttcagcaagggcggtggtgattgctgccaactccgacggctgggctgaagctgcagtttcagcttcat

SEQ ID NO: 198357 - DNA, 332 bp, Zea Mays
ctcagccacgtgtcactgtagacgccgttcttcgtcgccgtcgccgtcgccttaactatgtacgtacgtacgtcgtaagcccctacgtgatgacatggccagcatgccctggtggtacacgtactagtaaagaagagacaaacaccaacagcaggagcagagagagagaaagaggaaataaaagaagggtctctagagagagagagagtgatttcagaggaggtgattagagtgatgagagagactgaaagtagatcgatggatcgctgattcgctgatacgattaaagctggcagtaagttggagtggcactgtcactcggacgccacatg

SEQ ID NO: 198358 - DNA, 291 bp, Zea Mays
tggacgatgatgatttgctcatatataccatcaaactctgaacaatcatacgctatgttgattgcacaaagcttccgtgagtccgatgccatctggctctaatcctgtttttgtttatttgttttcttccattttctgtttctttgttttctgaattaattttttcccgaggcaataaattagagtctctgatgcgcttcttccaatagcgttttcagcgctgtacgttgccgagagtgattgggcgcagattctggcacgggacgtctctctgtatgtcttgtgcattct

SEQ ID NO: 198359 - DNA, 562 bp, Zea Mays
cactacgatttcttgtatataccttcactagcaggaaatacttgataccactgaatgagggcgttgttcttctagctaatgcagcagaagagcttcttcgtcatgtgcaatccctgagaagtattggtgttgacatcattattgaaataatcaataaactaagttcatctctgaaagatagaaacaatgaaacagccatcttggaagaaaaaacagatatggaaactgatgttgaaggtcgtgatttggtaggtggtatggattccagtgtggagggcagtaatgatgaacagttttctcatttgagcattttccatgtgatggtattggttcaccggacaatggaaaactctgaaacctgccggttatttgtcgaaaagggaggtctaaatgctcttttgacactcttgttgaggcctagcattacactgtcatctggagggatgcctattgctttgcatagcacaatggtgttcaagggatttactcagcatcactctactccacttgcacgtgcattttgctcgtctttaagggagcatttgaagagtgcattagggga

SEQ ID NO: 198360 - DNA, 1016 bp, Zea Mays
ctattcttatagtagtattagctctacagtttgattgcttcatttggtcaaagctattcttatagttcggaatgctggccctctcattggcactgattctcattacttaacttccatctgatcgcaataggtggctctctttttctatttgatcgcaaagtactgaggtacttcagaaaggatggacacaactggagaaagaaaaaagatggcaagactgtcaaagaagctcatgagaaactgaaagtgagtaactattttattttgaaagaaaatcaatatctcgaatgctgcgcaaaaaagtttaactgtggatgctggaatgttctgtatcattttgggcatttgctacttgttattgtgcattctgtaacttctgtagcggtagtgataaatattttttgtgtgtatactgcctatccagtatagatggtgtccatgcttgtggagttttttttaaacaacttgcatatcgcaccgctatccatactcatagagctgttaacaatttccatcttatgctgccacattcaatttagaccttagcaatgagcattgcattgggggagaagctgttgcatgcagatgggaagtgttgcataccttaggctggggcataattccatcatctcactgactgagcatgttacctgttaactgatacttacatgaaagatgtgtttatgtcaaatttactgcaagcttaagtcctacttaattatctggtagtagtatagattgagtcctatttctttagtgccttcacttgttctctaaagcttgttattataggctggcagcattgatgtactccattgctactatgcccatggagaggagaacgaaaactttcaaaggcgaacatattggctgttggaagagtaagtgctgactgttgcattcatgtcattccacactcatttgggtggtagactggtagttaactcatactcagaggaaaagtgtgactgatatgactttcttatttttcagggatttcactcatattgttcttg

SEQ ID NO: 198361 - DNA, 307 bp, Zea Mays
ttgttgtcgtagtaactgcagttcaatacatattttgaatcgtctacacttgttttgcactagatggacaagtctggcaaggtcattgctaagtgggatagtagagcaacaaaaatttacacagaaatatgtgtagaagaggtgaatgcacggaacaggccacaacaattcctaaacgccaaagggtatgctaacctgataagaaagtttaaggaacgcactggtcgcacgtacacaagggatcaaatgaagaataggtgggactcgttgaagagaatgttcacccagtggaaaactctaaatgaaa

SEQ ID NO: 198362 - DNA, 337 bp, Zea Mays
cagattgtctcattgatcattgagtctgttgcttggtgctgtatgcttgtaatgattctgcttgaaacaagaatttacatcaatgagttcagatggtacatccgatttgtggttatttacatgatggttggcgaagctgctatgttcaatcttgtgctctctgtgaggcagtactacagttcaaggtacactacatctgtagcatctactttcctgatggggccttttttggtgcgacccaacttttttgtcattttagcacttcaatattggcttactttgatatcttttttcctatgcagttcaatcttttacctatactgcagtgagattgtat

SEQ ID NO: 198363 - DNA, 370 bp, Zea Mays
ctgagatccattttatcaatatggcctgtgtctaggatatttgatggtactaccatccccaatcatctgaagtttcgacacaacaattttttcatttagcacgctccctgataagccgccagtcttgcctttgcttcactgtgcagctgctcgataacactatatgtgcctcttgtaggttgttgttgctgttggtaggagcgaccccgcgagcgtgacacagacaaagcagccttcggtgccaggttcgatttggtttctgcaaagtttatcactcctacattttcacaattagtttctacaaattatatcactccatttcactcctatgaaattactgtgacttaatttcaatcgaggtcattcttct

SEQ ID NO: 198364 - DNA, 1005 bp, Zea Mays
gctttgttggccgaggactacgtgagggcacatttgacaatgtcaagtactccatcttttgggtgcttttgctcgccgtgaagtttgccttcagctattttctccaaatcaggccacttgtaaaacccacaaaagagatatacaatctgaatggaatccagtacacttggcatgagttctttggccaaagcaatcgttttgcggtgtttgtgctctggttaccagtggtgttgatctacctcatggatatccagatttggtatgctatattttcttctctgtcgggtgcatttgtggggctttttgcacatttgggagagatcagggacatgaaacagctgcgacttaggttccagttctttgcaagtgccatgtcattcaacatcatgccagaggagcagcaggtgaatgagagcttcttgcccagccgttttcgcaatttctggcagcgattacagctaaggtatggtttcagcagatcctttcggaagattgagtcaaatcaggtggaggcacggcggtttgcacttgtttggaatgagataataagcaagttccgggaggaagacattgttagtgatcgtgaggttgagcttcttgagctgccacctgagctgtggaatgtgcgtgtaatccgttggccttgtttcttgctctgtaatgagctgtcacttgcacttggtcaggcaaaagaagttacaggatctgatcgtaggctatggaggaagatatgtaagaatgattatcgtcgttgtgcagtgattgaggtctatgatagtgcaaaacacatgctgcttgagatcataaaggaggggactgaggagcatggtattgttacacaactgttcagcgattttgatggatccatgaagatggagaagttcactgtggagtataagatgactgagctgcacaatatccatacaaggcttgtagctctattggtcctcatcctcaaacccaccaaagatgttaccaagatagttaatgctttgcagactctct

SEQ ID NO: 198365 - DNA, 556 bp, Zea Mays
aacgatcaaccgcccctagggccccatgctgatgagcaaggcctggatacagcagaggaagagtatgtgggcacaggtgatcagccacatggtgcagtttctgatgagaagagcggtgcagagactccggagcaagaattcagccttaccgaccaccgaaacgtagcagttcctgacgccaggaacatctcggagaccagagaagatgaggaacaagccagtgcagatgatcattcggacaatgcagtcaccgggaaggcaaaggtatatgacgaagacggggaggaccgggaagcgaggtggaaggatctgacagacgaggaggaggacgagctggagtcgctgtgggagcaccaggatctggtagagcagctgaagctcgagctgaaaaaggttcggtcgtcggtcgggctgcccacgatcctcgaggagtcggacacaccaaaggctccggtggaggacctcaagccatggagtatggatgctaagttccttcgcgaggaccccatggacgagctgaacaagttctacaagagctacagggagaggatgagga

SEQ ID NO: 198366 - DNA, 525 bp, Zea Mays
caacgaggacactatctcaagccaactttttgaattgtcgtcactggaaaaactaatgccttccgcctccagtaactgtgcaactagagcccgaaagtgcttcagcaaatcattctgaacaccatcttgttgagatgcaccaaaggcaccgtacccactggctattttattatcaccgaaacaactaggttctaagaaagcatcgtcgtcgtcgtcatcagatccaaatatcctcgattcaacatcatctctctcatcttctggtggtggtgggcaccaaatagcatcaccaaaatcaacgatatgtggtgatccattgacgagttctccttcaccagagatgctagcagcgctgactagctcacgtgcatcgtctgagtcagtcaatgttgttgcatcatgatctgaagcatcatccagcctcaccacacaagtaggactccctgtggggcttggggtcattgatctgtacatggagttactaacactagattcggtatctgagaagtcatgtaagaagtcagt

SEQ ID NO: 198367 - DNA, 318 bp, Zea Mays
gttttctttttcagtttaattggataaaacaaccttatacaaatatcaagatatgtgcaaaattaccttaccctactgtcctttctagtaggaaaagaagcacatatgccatttgtctcatgcattatcaagtgacgatatatccttaatgcccctatgtcctaataaaaatatggagccaaatgatgaatcggcaccaaattatcaaaataccttatgatctgctgaaaaactatggaattcacatctttgacttcaatgacttgtatactttgacattgattttggatttctatggcaaaatactttatgatcagc

SEQ ID NO: 198368 - DNA, 408 bp, Zea Mays
agcgcactggtttcctcagggtgtgtaccattcctcttggaggtgaaactttgtggtgacacaccaactccatccttctgaagatcatcgtaatcaaatgccacacgtgtgagagtagacgtatctggagtatgaggctccatctcttggctgaaagcagagggtgactcgtctgacattgatggcatctgatttggaaatgcttcagaaattgttctgtgagcctggcgaagtgccccagtggactgatcgtatctttctgccagtgcacggtacgctcgatagaattcctccaccaaattcattagctctggacgtttcttgtagtacatctctgctctctttgcaaaagaatcagcatcttcattgataagtttgatcattgctttaacctttgagtccatgtct

SEQ ID NO: 198369 - DNA, 675 bp, Zea Mays
cgtgacaccaaatccgaggtgtgattggcaagaagggcctaatactcattctccatagtgtaatgccagtgaggatcgacaagggcgctatggacaggagacgacacgagagatcgacgatgaggtcacggagaggatgggacgatcaatagggcgaaggaccccaacagcctgtcgagtcaacattgggtcgatatggtgagggccacagtgaataaagagggaatggtgcaccatcggtttggcgcgggagcaaggcaatgtacccactcagacagctaatagacatgcactagttgggcatagcgccaaggagccggctcgggcgaggcaaaggtggggccatgggggccaccaggggtttggtgggggtcgacgggtgggcacacgagtcgaccggggcgtcaaggtagcctgaagggagtccaagtgcacagggaccgccagtgccacaaatgagagtggtggggatgaacctacaggggaaagaataaagggtggtttgcagagggagccacgaggccaagaagaaaatcctacttaggaagggagtcagtggtggagctaaaggggctcgagatgtggaagtatatcttgtcgaagacaacatgatgggagatcaagagacaattagtagcgaggtcaagacatcgataccctttgtgaccaggagag

SEQ ID NO: 198370 - DNA, 447 bp, Zea Mays
ctcaagtacaatgtaagatattgtatcgtcaaatgattattatcttgtttctttttccttttacccaccttgtgatgcatggcgttataaacaaaatgactatgatatgtgctttttagagagatgttgttgcttcttatctagaaggtggaaagcctgtggatgaaggtgtcgaagatgcttttgagctgcttcacgaggtcaatgagcgagtgagaactggaatttgggttggagactgctttatctataacaactcgttgtggcgcctaaattattgtgttggtggtgaggtaaaaatagtctactccttgaaaacgttttcttctgtttaagttctctatatggccactttgtgagtcacgacttcaattgtttacacagttataagctttgtacttacaggtcactacaatgtatcatttggatcgccctatgtacctattg

SEQ ID NO: 198371 - DNA, 236 bp, Zea Mays
aaaaatccctaagtgttatcattcggtattattgaaaataaccgttaatgctattttcgaaaaaatgggggttgtgtgaccattgaacaataactagagcctcatacacctgaccgacatatgttttcttgctatagatcactttcttgaatttttgatggtgaccatttcttggttaataattcgtaggtgttattcatcggtattattgaaaatggtcgtttatgttattttca

SEQ ID NO: 198372 - DNA, 910 bp, Zea Mays
gcgagatgtgcacttaaataatttggtacgcagagagtacacttgttcgttcaaatacagtaaaggctgagcctcagcaaccacgtgccgtttaccctaaacaaatgttcgcccgacacacattcaactccatcagtcaagatattaagacagggtccggaagttcacccacgtggtcacttaaaacatggttttgcactgtataccacactaatgcagatggattgtatgctgagagctgaggtgcaaaaaaaaagagggctataagtttatagccactaataaaaactttatgagaaagataaactatagtatattaatattaaaaaaagagctaactaattatagatcaattaattgctgggagcctgagatggtctattagagaaagtacaataagctgacgtagatgggctgcaatagatgtcacattcgaatttatggtaatgtgaaagaaatagatcgaagtggagagagaaaacacgggctgctcactgtaagccaggtagccagccagcgatctgcatatggactctcaatctgtgtgtgtgtgaaagagaggtagaccaatattaaatgtacatattgtcttataagagaattattatgcaaatagacttttagttgactctatttgacataacaatatcataaatccctgacatgggttatatacttatattattaaactttctcttatgaatgaatggacaagagataggtaggtcggtcgttttggcggcatggatgcgacttgcttgcctgctcctactatactcctcgtggcctatcttttttttgtactgccctgcagcctgcaggggcacgcataggacacttgtccagaagtccagaacttcagatactattcatacagcgataatgctgtgagcctgagcgtccacgtgtg

SEQ ID NO: 198373 - DNA, 600 bp, Zea Mays
gtagcaaaactgcaaaattattttatctctagccagcacattgtaggtgtatattgtaactaaaaatcagtgtcatcagcactcatattacacaagggagcctagccatggcagcttaagttgtttcctagctactgtaaaatctcaggacaccaagctcctgctgctggaaccaaaaatctacaggtcactctcatcaacatgacatttaaataatctgaattcttgataacaatctctatattttaataaccagctgtacggagaaacttgcgtcttcctctactttcactctttacttttgcttcctagtttgtacagcccattttcttcaaatgatatcttcaggtcttctgaaaggaatagcacacagtgtgatgattattttcatttgattttgagaccatgtttcatatataatcctatgcaatatcttcacttcttcaggtcttcatcttttttattttcagataatcctatgcagtattgctatttttgcagttgtgtaatttcagtcctcagatgtgagtacaactgagagtctgagaatcaagttcatgtcccacctttttcacaatggaattattgtgtgcatgttct

SEQ ID NO: 198374 - DNA, 623 bp, Zea Mays
ctggaagccctgcttgagagcgtcgcggtacccgctggtgctccactgcggatcgaccggcgtcagcgaggcgttctggagcaccggcactaggatcacttgttggctgcacatctgcagcagaagctggtggggcatctccgaagggatcacgaaagagtagtcgccgtcagagccgcttgcgcacgcgatcgggttgatgtcagactggttgggaacgtggagaacgttgatggagcagttggcgaagaagagcaggtaacggacggtgtagtccgacaggttgagccacaaggtcggcgatggcgagacggtgacgttgtggtcgacccgcgggcagctcgcgtcgtcgaggacgtccgggtcggcgaggtagatggtggaggtgggatagtcgatgtccgtcacgttgtaggagtagcctgtgttgctgctgttgccgccgagctgtatggtggggtactcgtcgtccacgcagtcgatggccagcccagggtacccgcagtaggaggaggagttgcccaggacgtccgccgtgtcgtcggaaaggtagaacgggtaggtgatattcacttcgccgcatctgtatggttgcagcttgcatatggagcggttgtagaaat

SEQ ID NO: 198375 - DNA, 674 bp, Zea Mays
ctcaacagccacgcgaacatcctcaaggagttcagtgtcactttcatggaggcaatgaggatggtatggacgcctcggggatccggtcctctgtgttgggtgttttaggacatgtgctttttctattcctcttctagttcaaagctgttgccttgttggtgctgcctgctaagttctgctcccgcaattgcagatgagccttggcctgagactatggtcgtatgttcgggaggaggcgtcacatggacgggtgacatcagctatcctcctatgcatgattttcttcagaacacaaatggatccaaaaactgtgctgacagggtgtgatctgttgttgtgcttgcagaaagcaccgatcgatccgttcacaaaagagcgctgtaaaccgtcagcttcccagggtgtgccacttggtgggatggggtgtgtgctaatgccattgcttatctgaacttcatatatcgatgcattctggagaactttgccttcatatcagcagtatcggtttttacaggagcggaagcatttcgagaggtttcaggggagagttcaagaattggcacatcatacctggtctttgtgaaagttcgccggtcatggagaaccagttctctgtaatgtttctatcttatcatgctgtttctattagactttggtttgctgtatgatgtatg

SEQ ID NO: 198376 - DNA, 450 bp, Zea Mays
gcaagtaacacaaggcaacaagcagaaaagcagagcagcaagaagcacagtcacgaagtcaccatctgctgatgagctcatcttttgggttttgggattgtgtctatcgttgcttgatgcagacagacacacaagagttgggcctgggcgacgatgcttgaacctggaagacggcggattttgttggatcttgcaggcaccagcagtggagcttgagtgtccgcctagaaggttggagctgtatcatgagggcggggggcggcactgcggtagggtaggcgtccacttgggtcttgtggccttgagggcggggacaggactgtgaacttgtgcggcggcggaaggggcactgcagcagcaaggatacacggatggtttttgcgtcttgtgcggctgtggctgcccaaccctacaaggccacaattgcagcccatagatgcagtaccaaat

SEQ ID NO: 198377 - DNA, 3251 bp, Zea Mays
catgcccacgcgctcgcctatctcatagtccttccccattccgcctctctagctggcctgtcgaggaccctcgccatcctccccaggcgcaccaccaaacggtccaaacccccagcggcggcgctaggatttgagtctcagcgcgccggcaccgccaccgccaccggcggtgatggcagggcaggagcgtaggacaatcgatctggaggagggatgggcgtttatgcagaagggtatcaccaagctgaagaacatcctcgagggcaagcccgagcctcagttcagctccgaggactacatgatgctctacacgtgcgcctccttctccccttactcctcctcgccgccaccgtctcctgcgcagcggccgcttggtttcacaccgcgatccgcctcgatccggttctgatctaggttttggtcctcttgtcgcaggacgatatacaacatgtgcacgcagaagccgccgcacgactactcgcagcagctctacgacaagtatcgggagtcgttcgaggagtatatcacctccatggtgagcctcctgttcatatctatctttcccatgtgaatgtctgtattagaacttcattgttttgtatttgcggcgttgtattaaggttagatttcctactcagagaggagtaaggcagcttggatgggagtttttttagcttttgttgacggggaacaaatcgtgctctcagagcctggggctcacatgagcacttcaaatctggtacgttctgtgagcaatcaacgttaaggtgggaggggataaatggaaaattgccatcgaatcgaaactgagttgaagggaggtaaatgaaaaattactgatcactgttgtattgctcacaaaggggctgattggtttgctgcgcgctgaaccaggctcgcgagatgcaggaagcgctagtttggttgcttggtccagctaccgagctaggctcccagcatgcaaaagtgcccactctaccaggcgccggggagacgtgagaatctgttgtttcgggcgagccagtctcgagcggtgcaagaacgagctgctttggcaagcatgcagagaagaaaatgctgctgggcccgagacatgcaggcaaccaatcgttctgtgagcaatcaacgttaaggtgggaggggataaatggaaaattgccatcgaatcgaaactgagttgaagggaggtaaatgaaaaattactgatcactgttgtattgctcacaaaggggctgattggtttgctgcgcgctgaaccaggctcgcgagatgcaggaagcgctagtttggttgcttggtccagctaccgagctaggctcccagcatgcaaaagtgcccactctaccaggcgccggggagacgtgagaatctgttgtttcgggcgagccagtctcgagcggtgcaagaacgagctgctttggcaagcatgcagagaagaaaatgctgctgggcccgagacatgcaggcaaccaatcgttgtctccaccaggcctggctgtatagatacggaaaccagtcaaagcgctactgcacctctagagcctgactcctgctttggtgtatatggcgatgtcctcatttccttctgtgtttctgctaaatgatacattgatcactagtcaggttcattcactctgtagatggacattcttttgggaaaaaatgagagttgtttgccatatatgataggtggtgaattcttatagtatatagaattttcctgatctgtttgattgtaatttgtaaatgaattaattaaaactttctaatgctgcaaatattgcagtggcagtgctctcttccccttcatctgtccatctcttgatttttagagggtaattcaatctctttaattttattgtaagcatcttgatttggtgaaacacttgatctagctacttgacgtgccttgtaacaattctgtgtccatttgtttgtacacttgtgcctgctgttctgttggctccagtagattcattagatgtcctgtgatattgctgtgtctattttcattcgctgtttgttggaacttgtagcttctgttatgggcttatcgagggtagacagcaaaccaggattatttcattcactccgtagatacaaatttctttttgggagaatgagggttgtttgtcatagatggtagaacccttttgtaataatatatacaattgtcctgatctgtttgattgtaatttgtgaatggagtaatcagaacttctttcatgctctcttccccttcttttgtgtattttaaatttctgcagcacaattcaatctctttaattttataattgtaagcatcttgattggcgaaacaattgtcccatctacttgacaaacaattttgtgcccattctttgtacattgtagctcatttcttatctttataccctttaaagcatgagtttcgtgcgtcatgcgcgaagggcgtagcgtcgatctgtttattctctccccacgtcttggctaacaactaggccgttaccttccagatgggccgtgagaaaacacctaagcgcaacataacaccaagccacacgcagcgcaacgctcctggataataccacctcgctagctgaaggagtatgagcgaccgagcgagctatagaaagggggcatgtctccttttcaactcatatctttcttggccttttggctaagacaaagtgtagtgtctgcagtttaatatctgctatgtgggccatatgtccactttaattttatttttttattggaagggtccaactttaatcttaaatttgatttttgtggggcgggtccatcacactgggttgccactggacccttgggtgtcatacaattgttgcgctataccatcaaatatgattggtgtaccgtcacacgggcattgtactagtatatcatgtagactgtagagagcacctttttgtgtttttgcaccgcctcctaatggacaggagttggacactaattgatgctatctatggcaggaagataaataatggattgcataattgaatacacatggatgctagtttcaatttgcaggagcttttctgcagcttgctaatttattgtttaatgagcatctttaatttataaaagaaacttatataccctccttgagttacaggtgtttttatgactagagattgaacccacgagttgtatgatgctttcttcattgtatttgtacgttcacttctgagagctttctcactaatttttaatttcatgcaggtactaccttcgctaagggagaaaca

SEQ ID NO: 198378 - DNA, 240 bp, Zea Mays
ctctgctttactacaatcagacaaccgaagctcgagtatgtttttcaacatacccatccaagatggaaagctggtgccttggtaggaatatatttcaagagccagcagtccatcatgagcttcaaggctctctagcacctcatgacactgcttttcctccgccttaccacttgtccactctagtgtcagttgtctcagttccttcttattcacaaggttggctgcttctgcatttcttct

SEQ ID NO: 198379 - DNA, 248 bp, Zea Mays
gcgcgctgccatggaaccgagctggttgagcagggaaggaggggagggagcggctgagcaggaacgaagaacagaggggctgaggccggggacgcgcagggaggtcgacgccgaggggaaaagccttggcaagcaggttgggcgctgttcgagcagaagtgcggtacaggcgagcacaccagggagagaaacccagcgcaagagctcggctgggagcttggcgggcggaaattcgagcagggcaccgg

SEQ ID NO: 198380 - DNA, 615 bp, Zea Mays
caagaagaaagtccaactcggaaagggagtcgacggtggagctagagggggtcaagaaaggaaagaccattttggcgaagacatcgtgatgtgagatcaagagacgatcagtggtgagatcaagacatcagtaccatttgtgattaggagagtaactgaggaagacacaatgggtgtagcagggggcaagcttatgtggagtggtggcagaaaggttggggtagcacgcacacccaaaaatgtgaagatggtcataggatgtagtggtgccaaaaagagcaaagcggggtatggaggtacgaatcattgttgtaggaagacgattaaagaggtgggtggcgttgtggaggctctcaacccagtagcgagcaggaacagatgcctaaaatagcaaggagcgcgtgatgatgttggtagtgcgagccttgtgctcagcctcttcattctgagaagtgtatgagtaggacatctagagctatacaccatgggaggagaaggaccaagaggagttatcaaactcacggccattgttacactggacatacttaatggtgcgaccaaactgagtggaaacctaagcgaacaagtgcagaagagtggaaaaggtatcagact

SEQ ID NO: 198381 - DNA, 578 bp, Zea Mays
ctgatgttgacgtagtagaatatggtggagatggaacaatagtatctgacatgttttccttattgtcactgtgtggatcatatttaaataaggaatccaggcagaatagcaatcagaaatgcaaactatccaaccctcatgctcttgtagtgcactgctgccttgcactagcgacaatagctgcatgtttgaaatcagagggaggatcttcagcatcacttgtcctaacaagttcccagaaaaaacagcggtcccggctctcagttcttgcacacctctcatcagttgatgatacagtgaagagttgcctgcagccacactgtgcatcagcaatgcttgcgctctcatcacttgtttctcttgaaaatggtggacaaaccagatcgtctctttgtgaaactgcccttgctttgtttcctcgtatggcaacactgcacacactgctgaagctttggttatctgatggaagcgaggcactgtgtcgatataatgctggtcttctgaatctttttggactccgcgatggaagtattggactgctggagacaaggttgaaatggggcggaccattggccatt

SEQ ID NO: 198382 - DNA, 396 bp, Zea Mays
gttgacctgtcccaacagctgaaaccaaaaactcctagcgaaaacacaccccaccaagatgtgatcaatagtttcttgctcttggtcacacaagacacatttgtcaggatggctaagtcctctcttctgcagacgatctgctgtccagcatcttccaagatcagcaagccataaaaagaatttacatttgggaggggaccaggttttccaaataagatcccaatacttagccacggtcgaaccgatgaagaggccattatacgctgcttttgctgaataaattccatcattagcgaacctgaaaatatgcttatcctccctgtctggataaagctggacattttgaagttcatcccagagatcaagtagatcggcaaagacacctactgtcaaggc

SEQ ID NO: 198383 - DNA, 738 bp, Zea Mays
gaaagattgatgctgatgttctacagttgttatggaaggtagagcgatagacttttttcgtgaagcaatttcaatatcatcggaccatctataattctgttacgcaaagcttcatgtatttgcatctatgcttataaccccagaccccactcatgtgggagccgctggcactaagtctgcatctatgcttataaccattagcacatttgatgttatgttagtttgctgtggttttattttttttttctagaatgatgtgcaaatagtaattagaaaaaaaacaaaatttgcctttccagacatgccttgtaggagcaggaccagatgggaaacatacagccttggaagctgtaactatagttcttgatctgccaccacctcagcctggttcaatgtctggactcacttctgttgatatggtatctgcctctgatccaaaatctgcaatggcactccaaagattagttcaagctgctgtaagacaaaatttctgcttgattaatttgttcactgagctttgactttgaaacaacagactgatgtttggcccatcaactatcaggtttggtttctaggagaaaatgctaattatgctgcatctgagtatgcctgggagtctgcaacaccacccggtactgcattaatgatgctagatgctgataaaatggttgctgctgcaagttcccgtaatcctacacttgctagcgctctgacaaggcttcaaaggtgtgcatttag

SEQ ID NO: 198384 - DNA, 492 bp, Zea Mays
aagggccataagtgtgaaagtctagatcattatggggtgtgaacatgagtttagcaggaagtttgaaagcctagaccattatgtggtctgaacatgagtcttggagactaacagccagcaggctctatctcctatatatatatgtaagcagtatgcaaggagggatcaagaaagaagtattatctaaacctctcacctgttctagccttcaatctcatcccccttgcttcggtgaccaggaaacagccctggcaccacatctacccaactacgaactacgtagtcagggacctcccagcttagggaccgaggcccttgacaacttggtatcaagatcccggcgatcctcttccacctccgaccaccactccactgctaacactccttcctctccaagttcatcatcagcgacacccatggctaatcccaccaacgccgacctggccaatctcatcgcacagctgaccaccagcctgaccaccctccaggccg

SEQ ID NO: 198385 - DNA, 682 bp, Zea Mays
cagtgtcttgacgccttattataaggaggaggtgttgtacagcaaggaccaactctataaagagaatgaagatggcatctcaatattatactatctaaaacagatttacccagatgagtgggagtacttcgtagagcgaatgaaacgtgaggggatgtctgatattaatgagctgtacagtgagaaggaaaggctgagggatcttcggcactgggtctcatataggggacagacattatcacgtactgtgagaggaatgatgtactattatgaagctctcaagatgctgacctttttggattctgcctctgaacatgatttaaagactggatcaagggagttagctactatgggttcctcaagaattggatcctcaaggcatgacggagttgctggtgggtcagggtattacagcagggcatcttcctctcatgcattgagtagagcaagcagtagtgtgagctccttgtttaaaggaagcgaatatgggactgtcctcatgaaatacacatatgtagttgcatgccaggtatatggacagcagaaagctaagaatgaccccaatgcttttgaaatattggagctaatgaaaaattatgaagcattacgtgttgcttatgttgatgaaaggcagatcaatggcaacgaaaaagagttcttctctgttctcgtgaaatatgac

SEQ ID NO: 198386 - DNA, 214 bp, Zea Mays
ggaaagccgttcgcgggacctgtgcgcggcccgagtgaagttgatggtcggttcgtggcgggtcatggtggcacggaagacttggtgttgggagtaggccggaggaagggtgaggaggaaggagatcatcgtgagaacgagcatggatgaccttgtcgtcatttctggacaccaaatgatttctacctggtcgctctgatgagctaggatgatg

SEQ ID NO: 198387 - DNA, 890 bp, Zea Mays
ctgagggcaggcttgagaagaaagaatccaaaaaaggtggccccatatttgacaaggtaggttttggttccgaatatcttgtttccttgttttaggccaactgtttggcatgaattactctcgaagttttgtagggtggctatcgaatgtagcttctgattgaaacatgctgtaacatgttgcttgaagaaatttatatacagcttattaaatgctgaaacctgaagtgtctatcataataattttgttcagtttagaagttaaatgaatttgcttgttccttttgctttctatcaggatacatgacacaataaacttgtgagaaggaaaaaaagatactgtattttcgtgttctcccctattttccttttacgctgttttactattctgatgtaagctgcatcactcgacagaacgaactttcagctatcttgaggttcggtgcagaggaattgttcaaggaagacaagactgatgaagagaccaagaggaaccttgaaagtttggacattgatgaaattcttgagagagctgagaaagtcgagacaaagggtggtgaaggggaggaaggaaatgagcttcttagcgctttcaaggcatgtgatgtgtatgctatacccaagttactgatgctgaacaggacctattctgtattcacacttattattcttcatattttgggtaggtcgcaaacttttccagtgtcgaagatgatgcaacgttctggagtaggttaatacagccagatcctgcagatatagttcaggtattgattagctagctagattgcccagttattataacctgctttagtcatttctttctgtagacattatcagatagtgatgactgatattcttcaggaaactttggcacctcgtgctgcacga

SEQ ID NO: 198388 - DNA, 318 bp, Zea Mays
attgtggtgtacaattatttactcagtccttgctattttagcacaagttgcgtttcatataatctggtacattgagggcaagggatggtctgtggctcattcttggtgggcgaagctggtgggtttagcaaggtatctatgttttaccagtctattttgctgattctgtattcctggatgtgcacatattcatatgtccacctatttgtagattcttcctatgcaggcacctttggattgcatctaatcatggatgttaatgcagggaccagccatgggaatcaccatcagttatctattttcttgcattacagctat

SEQ ID NO: 198389 - DNA, 633 bp, Zea Mays
ctgatacagatggagttgatacggcataccgcctagtcgcagatcacatgagaatgatcgctgttactaatgcacccggttctcaacttggttagagcgttatgtttctgttggtcacgaatgttaatatagttacgacatcaatgtatgggtttgtcatgagcacgagtacaattattggtcattttcaaggaacaatcagaccaatctgattgttggatgacttattacatgaatacatttttttgtcattacattgttcttattgtgttaaaattggctttcatctttatgaataccagggttaggaaatgaaggtcgcgagtatttcctgaagtgtgctgataaacaggctgtgaagtatggctatcaagtacttaagataaatgaagaggattacgacatgtaagaacaatcacttttatttgaatctgtgctttattttacatgtatttgtacaaaaacagttttccctgtttacaagtcatatttttggataatgtattctcacgcattataaactttgaatttcaataaaaacctttgtatggcaggatgtcttcttcaatgcaccggtgcaaataacagagcatccagttaggtcacctgtcagtcttcatgattttcagtatg

SEQ ID NO: 198390 - DNA, 281 bp, Zea Mays
aaagtttaagatcctcatgcagctggtaaaagtggcattgcataatggtccacagccaggcccgttcacatatgttgtccagtgtatgtatattgtacctctgctggggaaaacttattctgaagggttcagccatatgttgacatcctctttaaagcacttgaaatctgtggaatcagcacagaaagatttcttggaggcaaagcaccttgccgcacaacttgttcttgatatccttgattctattgtaccccatgagaaccgcatattggtcaagcttc

SEQ ID NO: 198391 - DNA, 827 bp, Zea Mays
gtctgggtccgtcttcgaagcatgaacacaaagaggggatgtcatgcccttactgtccttggagaaagcctgtcagtaacttcctcttatgcttctgtctttctgacacaattgtaagctcatcttggtattgaatcctggcaatgtacttatccagaggtttgacttgtgtttcagatatgcaatgggcggatacaatggagacaagatggtttctagcgttgagatcttcgaccctcggctcaacgcctggaggatgggagatcccatgagcgccccaagagggtacgccgctgcagttactctggatggaagcgcgtacttaatcggtggcctggagtccaatgtgcagatcctagctaccgtacgtaactgttggctcctgacaattctacatatatagatgtttgtgctctttcctgaagatgctcttctcttctgtcacaggttgaagtttacaacgcgagctccggctggtcagttctcggtttgagttcactcgggaagaggtcctttgcatctgccgtagtcatgtagttactgatcacgatgttaactactgtcgataacatcaggtttaacatagtcgctgcgttatgcaaggagtagttagggtaaggtgggtggggctagatcacccttccgatgtgtaatgtgttgagatcttcatcaggggaaattcgcatggtatgggagactacggcccgtatacctttgaaccctcgtaggaagtcttgagaacccttgcatgcattcgctgttgtatgcgtgccatgctgttgaatttagctgtactacaccagatagtgatacccgaactcacggag

SEQ ID NO: 198392 - DNA, 473 bp, Zea Mays
tggaggtggtgcgggcggtggaggaggcgatcgcgggcggggcggaccttctccgcgaggtggtctcccaggagcagggcgagctggctcactccgtcgtcgacgtgctgctcggcaccatgggcggtgtggacgaggcaggcgacgccaccggcaccggcgctcctcccaccgtcatgatcagctcgcgtgccgctgtcgccgccgctgagctcctgccttatctccccgaagacgacgagccgtcgccgcgcactcgaacagccttaggtctgcacgccgccctccgcgcctgcactcgcaatagagccatgtgttcttccgcgggcctcctggctgccctcctcgcgtccgcagagaagctgttcgtcgaaatggatcagggtagcagatgggacgggacgccactgcttcaatgcattcagatgttgggtgggcactcgcttagtgtgaaagacctgcattcctggctt

SEQ ID NO: 198393 - DNA, 359 bp, Zea Mays
ccaaatgcattgcccgttgaagtgtctctggcatctccatctccacatcagtgcgcaggggctcccccaatcctgctgtgtacatgttggtctgctgccgatgagtcatgtcatcacagcggcacaagattgttaaaagctgtcgagtgtagtcttcgacggtgccggtgcgctgtaatgctttcaagtcagccatgccattgaaacggagtggtggcccaaaacgcatctggagaaattctataaaccttgaccaagtgagtacgccaccaatgtcacgctccagggcataaaaccactccgctgcgacgccttccaagtgcaaggatgcctgccaaacccgctcatcttgatgaacg

SEQ ID NO: 198394 - DNA, 377 bp, Zea Mays
atgcatggttccgttaagaagatgacgggaacatgagcgattacccagagatcaagcggttaggcaagagcagcagaagatacgggatcgggatcgcctgtcaattccctgtttaaaaatcagctagaccagatcgtgtgtcatacagttcataatgcaatgaatggatagttttagttcaaacgtctgtttagatgaggctccaacacccgcatccgagagagatgcccctgtttctccagatagagaattcgatatttttctcgttttttacagggttcctgtagacctccatcgtctctataccctgaccctgttttctctctttcgtcgatccatccccatttcccgtgatgcgtttgcctagagtcactaat

SEQ ID NO: 198395 - DNA, 409 bp, Zea Mays
cgtcgatatgttgggccactcatccaagttgagttcgagtaagcatgaacctgaagtggactatcacacacatagaataaactctgagatgatgtcccccgtaattagtgcaacacatgaagtaaaatgtccaaaatgaatagaagcacaaacaaacttactcaaaatatggtcctattaagcccggtgacagttagataaacaaggttgcccacaatatgtcaatatcgagagggatcctcaagaggtgcctcattcagtgggacaaagctgcaagtgaagatccataggggtgacaactatccgattatcagtaatacccaaacgagcaatgaggtcttgtatgtatttggactgagagagataaaagtccttgtacaatgcaaaacctcaatccctaagaaataac

SEQ ID NO: 198396 - DNA, 937 bp, Zea Mays
tatttttaaaattgtagaggatcatccaagggatgttaacgcccaaatggaaaattttagcattgtctatggtgacgagtctgtgcctcgcttgtatgagaactctcgaatatcttcggatcaacttcctggccaatcaggtatagtagcaacatggtgatttactgttatttcctctgctcggaaccttacaaacagctgttttctcttcatgtctcaatcgctgtacaggtattgtgaagcgggctgtggcgcttggacgttaccttcagaacccgttggcaatgattgcaacactgtgtggacctgggaaagagatactttcttggaaactgcatgctctggaacagtttctaactcctgatgagaagtatgaaattgttgagcaagtaatggttgatgcaacaaatcagataggttttgatgtcaatcttgctgctagccatgagtggcatttttctactctacaatttattgctggtttgggtccgcgtaaagcttcagctttgcagaaagatctggtaagagagggatccatttttagtcgcaaagagcttgtaaaacctctaggcaggaaagtattcatgaatgcttctggatttttacgtgttcggcggagtggtgcagctgcagccagcgctcaactcattgatctgcttgaggatacaaggatccatcctgaatcatatgtattggcaaaaaatttagctaaggatgtctatgttgaggatgcacaacatgaaataaatgaaatggacgatgaggagcaagagatggctattgagcatgttagagaaaggccaagcatgcttcgaagtcttaaaattgtggaatatataaagagcattacagaagaataccgtaaactggaaactctgcgtgatataaagtttgagctgctgtgcggtttttctgactggaggattccctataccga

SEQ ID NO: 198397 - DNA, 679 bp, Zea Mays
atggccttacactgggcttcaagttcatctttctggagctgtggatatctgtaaggtcgtactgctactggtgttgttcctgggaggagatgaatccggtgatcacagcacctagatgggggaaggccactaggtgtctcaaacactttgtgaagctgctgtagcagacattccatcataggtttgggctctgccttgagtgaccggactgcaggtctcatggaaatgtcccagcgctgcgaacctagtcccttccagagaatacgttgtcctctcctccagaatgccatacatagatcttcaagatcccaaagaatgggccccaaagtgcgcaaaaatgtgatacccaatataatgtcaaaggaatctagaggaatggcatatgcgtccatcaagaactcttcaccgggaatggacataccaataatgtcggcagtgaatcttgtcgccatttgctactgtggcctggaaaccttggttggaactgtaggctagccgtagcccatctgcagttttgaggctgacaaaattgtgggtagagcccgtgtcaagaagagctgtgagggcgtatccccgaatatcgacttgcagttgcatggtgccctctgagctgatgcctgttaaggcgtggagtgaaatgatgggtgctggatcctctggattggattcatcctcgatt

SEQ ID NO: 198398 - DNA, 362 bp, Zea Mays
aaaacttccatggagcaaactgttgaaatgatcactaagcgctcagttacaactgataagcacagtgtggaagaatcacagtcatcatctgatcgaccagcatcagatcagacttgtggcactgatgaaaatgttctgaagaagtttgtggaaatgcctgagaaaattgattactctgcttccagggagcaaccatctttgtttacaaaagagaaagttttgcaccctcaaacatctggtcagccatctcctcctgtgagtgctttcaattcaactgagccacatgagcctttgagctctacatacctacctgtcagctccttcccagaagatgctgccacacaaggaatgctgcaacaggt

SEQ ID NO: 198399 - DNA, 410 bp, Zea Mays
ctgacaccaacaaccattgttcatagtgtcctgtactgtttgtatctgctgaaccttactggggatgagcttgataagagagggtgccaagaccgacaaggattgcccatggagccacctgccataccaaaacgtgctgctagcaccatctcccaccgcagttacaagcgaagcagtgaacatagcaagaccagaacatactgaaaagaaagaccaaaagcaacatgaccaaaactaccacactattgcctgtgcccctcctaaaggtctcccaataagcttcaggaggccctttgctctagctgagtaccaaaggatgcactcataagttacagcttgcaacaccgttgtaaggcttggagtagagccgttaaaaacacagttgtcctgtcccaagccaccaatattgc

SEQ ID NO: 198400 - DNA, 568 bp, Zea Mays
ctgcctttgtactggcatcggggatctgggaagtagaagcatctcggggactaccatgactttcccaaaatgacaaccccggatcaccaaaatcttcttttaatgcaaggaatgatgtctccttggggcatccaccagtttctccactacacactcctaaattttcaggtgtgttgggtggaaacagatttccagtgttatgcatcgagccacagttcacagcaccgggagacaacaccatgatagcatcatcatccgagtcactcaaaactactatatcctgccctgtcgatgctggaggaccattttcgtctgcggatgaagagtcaagatcatggacatgggtcatgggataaccatttgttgctggctctaaattataaccttcatctgcaatgtttgtatcatcaatattgcttgagtgagtgatgcagtttttgttttcatcgtgtcctgaatggtcatggtcgttaccagaagacggcaccagatcagcatccactctcttgctaatttcccactggccattgctttttttcctaagtcccaacttaagatgacatcccac

SEQ ID NO: 198401 - DNA, 395 bp, Zea Mays
tgccatctctattagcaggggtgggtttaatggcaccttgaatgccagtgataccgacgaggtcttccgcaaatgacggctcggtgcggacaaagcgcgcgaaggcgcggtggttcgcgcgctcgcggccgtgacggcggtgcttgctggagacgccgatgccgtcggcgtgctggaggaggtcctttatcttgtacccctgcttcttcttgccggggcagaaggggcagcggaaggtgccgtccgggttgcgcacccggtgcttgccggacttgaggaggccaaacgactcctcctcgtagtcgctctccgcatccgagtcgtcctcgtcggggtcgtcggagccgtcctccgccgcggcagcctcggcctcggcctcctcgtaggggtccacg

SEQ ID NO: 198402 - DNA, 398 bp, Zea Mays
ggccacatggagatggtgtcggtccacaacttgtagaaggaggtccacacaagagattgagaatgagggtctcgtctatgaccgatgagtcgaggtcatgaagagtgttcgccatggccttcatctatcggtggtactcaataacaaagagaccccctagacgagttggtagaaagcggcgtcaaggtggaggatccatacctgatggttggtgaggaattgagcctcgatagcaacacaggcttagcgagcggtggcccctactcacagacgacatcatggaactcaaccatgagggtaacaaggatccaagagaggaccacactatccatctgacattaggaatgcgtcgacacgatagcgtcggtgaggatgtgtttgtcgacggcgtagtggag

SEQ ID NO: 198403 - DNA, 540 bp, Zea Mays
agacagaggaggaggcagcgacgtcgcgcaagatgcggcgcacagccctggccggccagcgagatccccaagcttcgacagagtcagaggaaggagagctgccgaggggggggtgttgcttgcggcttcaaatgtgatatataaacaatatttagtctaacattttatattactatttgagtttgagtcgtttcaatatagccggtcccaagcccggtaaaggagggttgtgttaggtccggcaaaccaacgtaaaaaccagccaaatcttatggagatgaaaccacaaagaaaatcgttggggcgtaaccctcttagcgacgcgccatatcggaacccgggtatggtgttaaatgagcaagggccgggccgtcaccccttaagtgacgcgccgtctcttgatctggagccggtgataaatgagcaaggatcgggtcgtcgcatccttagtggcgcgctacatcgacgcccgggtgtagtggaaaatgagcaagggtctttgcatcttcctcggcgggtgcgaagggtaaggaagttagt

SEQ ID NO: 198404 - DNA, 677 bp, Zea Mays
cacggcgctcgacatcggatgcggggtgtgttgtactcgcatcgcatgaaagcttgccgattcagaaactactcgttggaagtctctctgttcacgtgtcgatgtgtgtccctgacaggtcgcgagctttggggactatctgctcaactatggcgtactgaccatgtccattgctccgagggatagatttgaaccgcaggtgcagctcgccttggagcgtggactgcctgcaatgatcggagcgcttgttgcccacaggctaccgtatccatcgaggtccttcgacatggtgcactgtgcggactgccgtgtcccatggactgctcatggtaggacatgcaagacgtcatgctattcctgattaaacatacttccttcctgatgcatcatctattcatttattatttcactgattactaattgttcaaaataaagtgattttcctattggcaaatgttggagtcggtgaacactgaacagaacaggacaccctcctcatatgtcgatgtcaaaactaaagtacagtttgtttgtttttttagtcgagtgctcttgttctcattcacctatagctgattccagatgggctctacatgctggaaatcgaccgtcttctccaacctggtggctattgggttttctctaagccacccgtcaactggaaatctacatacaac

SEQ ID NO: 198405 - DNA, 513 bp, Zea Mays
tggaaacatacctgaaaatttgtttgtttgctttcagaactgcaaatgtgaaccctctcgatccatatatatgatgatgccttcttctaaggtaggctcacctatggaagcatttcttcatctggtaccggctctgcctcagcgcatcgggcatgctttccgcgatgctgtctgccctcttgaaactcagcttggaggccatggtggcttggaaagaaacaaggtggagaagaatgttatggtttatgtgcggaggaagaagaatgctgtgactggctgggtctgaatgtccatgggcaacaatttatagaaggaagggagcgtgatgaaacaaaactttggcctactggcagagttttctttgtgtggacgccagctggaaaattaaatgggagatggcgcgcaggggagaaagcacattgatttgcttgggttgggagaacttatgctgaagaaacatccaaggcaagaaaggcatgaaaaccaacgaacacatccctgacctgcaagatt

SEQ ID NO: 198406 - DNA, 675 bp, Zea Mays
caaccactggcttctgtcaggaaattccaggcaccactcagccccacccttccacatcatggcatgtgtatagcggtttgtggccccaggctgcaaaacttgacagaccttgtgagcatacttggtcccttcagcaagtttcacgcatatcctctgttcactgtgaacatcagaatccattgtgatctgggtatcatactccctccaacctctatcacccactgtaacaagaacatttgcaatgcaagtcaatagctctggactgctatgcccacttctagaactatcaggaagtttttttgcatcacttgtcttaacactgacatgagattgtatcttgcggaaatgatctttgttttttaagccaagttcctcacttctaggagaacctgagtatgaaacttgacttcgtggcttcttagaaccactagcgaagccagtcaacatgtggtcttctggcagtaactttgaaccatctccaaaagcacgtgatatagacgtaaaccggttccgatgggaagtagttctgggggcagttggtgtaacacgaccaattggatgttcattcaattcctgaaccaagttagatataggatgcttttctttttcatctttgtcaagaggtttatcatttgttgcatcaattgctttgtcttgaggaatattgatggaaat

SEQ ID NO: 198407 - DNA, 485 bp, Zea Mays
gctcccagcggggccgatgacgagctgcgcgtaccccatggtgacgcgagggcgggtagatcgaagcgagtcggcgggagaggttgcaagtatagtaggacctacaaagctggaggtggggtgtgctacaggggggaggttagggttggggagtggggagtgggaatcagaaggcggaggagatggcagcggcgaggtaagcggcgcaccagatggcggcggcgaggagggtgctgattagggcggacaaggccatcgacgccttcaatacggaatagaaaattcaaaaatatcgcaagccgagatgaagatgaatatatctactggcgccctcgtggcctccccttcctctttgctctcctatggccagttcaacggcggggatcaggagcaccaccaccgtcgacggaggcagaagaggcggcgcttcggggtgggggaaggagcggcggcgctggggcagggcaagacaccgacgccaggat

SEQ ID NO: 198408 - DNA, 644 bp, Zea Mays
tgcatacatggtccttcggaatgtttggaacagacttggacttgtgaaaactttgtgaatcatggtcatggtgcttcctgaaatgcgacgaaccatcatggatagaacttctctcagccccaattgaatgggagcgtgaagatctcgacggtggtcgatcagttcctctgggttttgtacggggttcgacagatgattggtctttaataacatgataatttatactaaccacttgaagcatcaccttcacttcgctaggaggctgtctggtctgacctggcctcccaggcacaacagtgtttttagtggtgtcattaacaccgtcaatatcttcttctgtcgatgagaatgcccacaatggcaagtcatgctttttaccacgtacagggtagtacaactcatccttgcagggccggcgtggatcctcatagctaccttttggtatctgacatagaggatacccttcattgagaacaagttttttcctgaatggagtatcttggcccaattcgtcatttctcctccagtcaccacctttgcaagaccatctcccagaaaaccattcgctagactcgacataatgatggaagttgtccacagaaacaaggccataagcatctgttgttctattttctaagaattct

SEQ ID NO: 198409 - DNA, 480 bp, Zea Mays
acagtagaaagttagaaaccctaaaacagtaaaaccctaagccgccgcctctgccccctctcacactctgctccattgctgccctgcggccctgccctctgctccggtggtcctcaactccggtggtcctcagctccggtggccctgccctctgccctctgttgcgctcgcctctgctcagattcggcgctcgcctctgctcactgctcaactccagcgcttgcctctgctcactgctctgctccggcaaccgtctgcaccaatctgttctgaacttaaccgaaatgagcacctctacagatggtaatctctgtgttcttttggttcttcaattgttcatttggtgctgcacctcttgagttgttattcacactacagatgagactaggaggtggcgtaataatgttcaagttatctattagtggaaacatccttgattttgattgcttgtactgctgtcctgctagacagctatagtgt

SEQ ID NO: 198410 - DNA, 223 bp, Zea Mays
cttttcacccactagtccgtattttagtttagacaccacatgagcactacagattttttacccgcgcccataaccatacacatttagaccacaacaagccattcatcgcgactacaaacttaattaaagtcatctaaccagtcgtctagctagagcaacgacacagcccgctagacagcatacacgtcggcttgcctattatcatcacaattcatgacacaac

SEQ ID NO: 198411 - DNA, 436 bp, Zea Mays
tccctcatcccagcctacgcaggagctcgacacggctgacctcgcctttgctcaccctggtttgctccccttcctcccaatggcgctggcttcttctcccatgccatgagccccatcaccatccctgtcaccaccctacccttccacgacacgagcgtggctgccagtgccggaaccggtcccgacgcgcctcgtgccgccccgacatcctcccctatgtctccccttcagtggctctacaccgccatccggctcgcgccgactccttgcgtcgtcgtgcccccttcatcatcagtcatgggcctctcaccggtgctcccctcgccctcgtcggcagccactgttcgctcttccctaccctgctgctgctctatacaacagtacctccctggcgcgccctctgttgctgctctatacagtagtacctctctcgacg

SEQ ID NO: 198412 - DNA, 400 bp, Zea Mays
gtacggcttcacaacaagtttccggcaatcaattattactagagtggaaacgtgatggaaacgacatagcacttccactccttcctcccccgttgtggtcgtaagcagctctaccaactttggcagtcttttgagcttaaggatctttaccagtggcagttccacaagttccccaaggtgctccaagtttggtaagttgtccagtactaattcagtcagatgggagaattcagatggatttctttgcattactatgtgtgtatcatccgctggaccacaagagtcactttgctttgccatccaacgtggcaattgtgaaccccggtagccacgaattctcagcttctcaatttttgatggtggttcaagactgtcgagcaaatgcaattccttctccata

SEQ ID NO: 198413 - DNA, 279 bp, Zea Mays
gagctggacgggcatggctagcgcgcgggcgttgaggaaagcaaggcaaggtgccccatactccgaggacaggatcggatcgaagaattttgccgagcacgggcaacaaagaggaaaggggtgcacctggtgattcgattcctgtggcgttgttttggtgtaggagatgaaaccgcctcaggtgatgtcgtcgccctcgagcctcggctgcttggatgtgcgctcctctggtgacgacgcaacacagggaaggaaggacgcaggggcgtggggtgctgc

SEQ ID NO: 198414 - DNA, 564 bp, Zea Mays
gttcgtcaccatcgcaggtactagacctgtggtacagggatcggaggtgttggatgaggtggctcgcagctttggggtatgtattgataacatgtccatccaacattccacaccagaggattttctgcttttcctgccggatgaggacactgcctccaggattttcaatgggggcagattattcactggacctcgtttctgcttaatgttcaaaagatggtctcgtttctctcatgcttctatgtctcgcatgtctcacttagtggatgtgcagattaggggaatccctgaacatgcatggtcttgctccactgcggaagctgttcttaacgactcatgtcatattgttgagatccattctgataccctgatgaaaaagagtctctcatcctttacagtgcgagcatggtgttttgattttaaaaagttacaacggcagatgacgctacacattattgagagagggttgcagagcaatgacaagggttgtttatcatacaagatcaatatcagcgcaaccatggtcaatcctgaggacacggatttggggggattgcactcctc

SEQ ID NO: 198415 - DNA, 470 bp, Zea Mays
ctgcttcaagggagctttggatcgtcgaacctccctttgccgttgatgggatgtcttctggcaggagaacgctgatgtatccaatccgcatcacattctcgtctgccccacggagggatggatccgatcctaagcttcatgctattacttcgggcggggatggttctggtcacgtgcagcagggatcccctcctttttcaagacctccccattcgagtgggagaaggggagaacatggtcattcgggacgtctctcagttcatgagcgtttgggcccaagagatgagaacatgcagcagcggagcattagctccggggtggcagtttcagatttgaggagaactttggaatctgatggggggaccttgtctcctaggctggtagagatgactgatgacatggttcttgtttcaccggtgaaggcgaagcagctgaaagtttattttcgtcaaagattcaagaatgtcctg

SEQ ID NO: 198416 - DNA, 221 bp, Zea Mays
ccaacgccaccacccccaccattccaaacccccgtctcccaccggctgccgtttccctcccccctccctccctgcctccctcggcggctcctcgcggacggagagaaccccgctcccttgcctagggttcccggaaccctagccccgatccgtacgcgcgagggtccccggcgacgaggaggctgctgtgaggggagggggcagaaggcgcgggaggcgga

SEQ ID NO: 198417 - DNA, 380 bp, Zea Mays
taggtattcagtggaagataccgggcctgttgcttgtatatcttggacgcctgacaattgtgctttcgcagttgggtggaaatttaggggacttactgtatggtctgtgtctggatgtcggttgatgtgtactattcgtcaaactggttcaaattctgcctcatctcctatggtgaaacgttgcactctaaaatttgagcctctaatgggaggaacatcacacattcaatgggatgataatggatataagttatttgctgtcgaagaaaacttgtcagaaagggttcttgctttctcatttgccaaatgttgcctaaacagagggctttcgggcacaacatattcccatcaggttctttatggggatgatcgaatccttt

SEQ ID NO: 198418 - DNA, 273 bp, Zea Mays
ctgcactcgccttccgcccggcgaacttcgtttttttagaagacccagtccgtttcggtgccaatgctttctctgttactgatcggcagttcggcattcttgcttgcattattaggatcgaattcctctattcaaccacaccgggaaaacgcacgcgtcatttctgctgacacgctagcggctatattttagccttgtctgtcattctttttgttgttacgctaagtacgtatacacgcagtgacgtcgaggaaactgggtggaggagttggt

SEQ ID NO: 198419 - DNA, 280 bp, Zea Mays
ctccatcgtccgccgcgatctaatttcccctcggtggcctcgattcggacgagctctccggcggtcgctagggttttgggcacgggctagactacgatttggaagaggatgtttatcgtcacgcaggtgatgtgaacctctagccggatggggacggggctggccggctggggtgagcgtgagtgagatcagcggtagttgggagtgaagctggtggtgaatgcgctgcgaagtgcgaacttgccggccgccgcacgagatttcggaaggggaagaccgg

SEQ ID NO: 198420 - DNA, 266 bp, Zea Mays
tggagagggcctaggtccttcatcgcgaacttgtgctacaaggcagcaatcgtgcgcttgagcctgaagagggcgggattagacgctgtgagcacgatgtcgtcaactttgaggaggtagacggtgtcatcgtcgtacaaatagatgaacaagggcatgtccgacctggtctcaacaaagccgaggggttgcggtggatagcaatcagatggtacatcgatgactcgttacgagagcgagataaggcacgggtcagcacaacgaag

SEQ ID NO: 198421 - DNA, 437 bp, Zea Mays
cacgtatccaccggatgtcatgctcagattgtacgccagcgagaacacgtcgattccagaatcgtcacgcgcgtgcagcacgaaaacccgggactccatcatcgcagccttgaccagcacggcggccatctcgctctttcttgcccctggcctgatcgcagctttgtacaggatcttcagtctcctcttggcaagctcgtcgtctaaggaggacacgccgtttcttccgtagtcgtcatcgatgtacacggctgtcaccatcttccacccgtagtaatcaactatcgcagccacggaagccatctggaactggtcgctgtggacagtgcgcacaaagaaaggatactgaagcggtgtcagagtcggatcggttgcagcgaaggacatcagaggcacctggagttcatttgcgacgtgggatatgacgtgcgcaacga

SEQ ID NO: 198422 - DNA, 1374 bp, Zea Mays
gaattttggctcctgagcttggtcagctttctcaaatgaaaattatgtgagtggatttaatttcagctggcaattgattgattgctgagctaagtttagcttgtcatttgaactgcccacttatttaatcgtacatgcacaaagatgctgagtatttatttcttttgaagggattttatgtggaattcgattggcgggaccatacctaaggaggtcggaaatatcacttctctggagttaatgtaagtcgaaatctgcagcacgtcttagaaatttggtcaacaacattgtctgaccggctcctctaaaaaacctagtttcttctcccttcttactgtcctagcttaactttgttggtcttgtttctgcttgtacagcttgtgcagttctcttagttgtagacttgtagctccctggctcctattttcccctctccctctttgtgcagtggtgttcttttcatttgttaataaaatccttaccgtggggatctcccctgctgtatttaaagttcaaaaaaaacattgtttgatgttttggttgcacatggggcatgtcatggctgtaagtttttttaacttgatcactgggagaggagatacttcccatgccatttttttaattgaaggttgaggtgtactaaaccctgtctggccaggaaacatgctgaaaccaatttctcagggaggtattgacaaattggtgagccccgagtttgactccgggtgtctatcctaccaaatttaggcaataaccaaccaaattactgtttggttcttcagagctattaatttaatttagtattcattagactgaatctaagattcacccaaaaacatggtatttctattttccttcataataatttaaaggtgtttctctggtacaagtttttggcatgtgtgccattgttgtacatcctatgtagcatgggatgacctttgcaatttttttttttatttctttcacgcaattgtttctgctctataacaaggtgcccccattgtgcatttgcaggctcctgaatggaaaccaattgaatggctctttaccagaggagattggcttccttcctaatctgaatcggattcagattgatcagaaccatatatctggacttatacctaaatcatttgctaacctgaataaaaccaagcacttgtgagtataatatggtttgtatctctgttatcaaggaatacgtaccctaatgaattttctatcttcatccagtcacatgaacaacaactcattgagcggtcaaatcccacctgagttatccagattaccttcacttgttcacctgtaagtttctgacattgcatatttgcatcattagtctttatactttattgagaacacaattaatttgca

SEQ ID NO: 198423 - DNA, 363 bp, Zea Mays
cggagccgagtgatgaagtcgaagcgtggagccgagagcgctagcgtggcgccttcctcgccgtcctccgtgtcgcggcgtgagagcgcgtcggcgaccacgttcgccgctccggatttgtactcgacggcgaaatcgaagccgagaagcttccccacccaacggtgctggtgcgtcgtcgagagcctctggtccagcaagtatttgaggctgtagtgatctgtcttcaccagaaaacggcgtccccacaagtacggcctccagtgtcgcacggcgtgaacaaggtcgatgagctcacgctcgtaggcagcgagtgcgcgatgtcgaggagcgatcggcctgctgaagaaggcgatcgggtgg

SEQ ID NO: 198424 - DNA, 943 bp, Zea Mays
agaaaaaggacaattcatggaggttctgtgtcgattataggcacttgaatgccctcacagttaaatctaagtacccagttcccatcatcgatgaattattggatgaactagctggcgcctgttggttctctatattggatttgcgagctggattccatcaaatattgctcaagcctggggaagagtacaaaacagcatttcaaacccacacaggacactatgaattccgggtcatggcattcggtctcactggggcgcctggcacatttcaaaaagccatgaatcatactttggctcctcttcttcgtaaatgcactattgtgttctttgatgatattttagtctacagccgctcccttcaagaccacttcactcacctacaacaagtattcgagctgctgtcgtctgatcactggaagattaaaatgtctaagtgcagtttcgctcagccccaagtaacttacttaggccacattatcagctcagccggtgtcgctaccgacccagcaaagatccaagctattgtggcatggcctgttcccaagtgtgtgaaggaattgcggagcttcctaggactctctggatattacagaaaattcatacggcattacggcgtgatctgccaacccctgacagcactgttaaaaaagggcgctctgtacgtttggacagctgatcatgatactgcattctgcactctcaaacaagcgatgtcatcggctccggtgttggctctaccagattttaatgtcatatttcagattgaaactgatgccagcgccaatggtgtaggggctgttctttcacagcaaggtcaccctctggcattcctgagtaaggcccttggagttaaatctcgtggtctctcgacttatgaaaaagagtatctagctgtccaacaatggcgtgcttaccttcaacaccagaaattcgtgattataac

SEQ ID NO: 198425 - DNA, 1093 bp, Zea Mays
gcccggaggagttggagttgttaattttgagtccatgggtttgtttggaagcaaggagattggaggagaattgcagggattaaaatcttctcgatattcaaattaaatagcgagtggattttagcccttacagggctagtttggtgaatagcaagggatttcttatccatggatcctctctaattctcttgttaccaaattggctctcggtctcctttaatcctctcgctcccaaacaagcactaatggttcctagaagcatctacaatacaaccattttagaatacacatggaagtcgtttgagacttacaggaaaagcataaatatggccataggaggggcaagggaattaaatccatgttatttagatttgtttatgtattctaagtctgttctaaaaaaatatgaaatctcaacgtaaaaggtatagtaggtgaatagattcttaaaaatctacatagtcctctagttcaacccataatcttttgtcccctaatatttttcacattcttagcatccaaattttccaaaatattatccacatggcaatttataggatgaatcgttgtcttttctatttggaggcctctcatttcactcccacacgatggcaccttccaaggacgactagggctaccactgtgtccctgcgccacactccggctcaaccatctataatcgccgcacctcttgcctatctccccttcaatgctgcttcatcgtccaacatccatgttcttcttttccatctaacggtaccctccttagcacatcccgcctcacacttcaatgttcggtggagtgggtatgactacaaccacgacgcttgcgcctagtcgggcgtaggatctccatggcaggacgtaccccctgccggtgatgacatgttgttgaatcggttcgtctcaatgggcagagcggcatccctcctgctaggttgtcacatcatcataagaatctcttatagaatatatagttgacaagtgtttcaactaaacaacttttagcttttctacaaccatcaactcacatcgactttcccgtagtttacaactaaaatcagattttcaagaatctattactgaaccaaac

SEQ ID NO: 198426 - DNA, 518 bp, Zea Mays
ctactacataagtgactacactgagtgcaagcttgggaaggaggactctccagtgtctggggtttgcccagataaggtctatgagggcgggagcaacgattcaatcctggtgtatgggcaccgccaggatggagtgtcctttgtcaggtatgcgaggaagcttgatgctgaggatgccaagtatgatgtgccagtgggtgccacggaggagatggtggtgctttgggccattggtaggttgcggccaccagacacaatgcgcccacactacctcccacagaaccatggggggccaagggacacgacctttgggtttgcccggttgaatttgtcggagacggtggacaattgccttggaccgttggatgcggataataaggaggatcaggagaggatcattgcagatcgcaagacaccacttgtggtgacatctgctccagccgtgcgctacccgaacccaccaaaccctgacaaggtgctttacatcaacaagaaggaggcgccgctgcttaaggtcg

SEQ ID NO: 198427 - DNA, 342 bp, Zea Mays
agaaaattgaacgactaggagctgatatggaggctagggataaggttagttgtcttaagcatttgaaaataaatgatgctgttattaatggataagatgtttttttgccaaatctgttatcagcaattggttgaattaaaagagctttatgatgctgaacaacgtctgagtgcagagttgggtgaagaacttggaaagactcgggtatccttccagcctgagtcatgtggttttacagtcttagcaaatatgttacttatcgcttcagtcttttctcttgattgtagaaagatctggaggacaccaagagagctctgcatgatctagaagaacaatacaaag

SEQ ID NO: 198428 - DNA, 343 bp, Zea Mays
ccattagatgtgaaggtagccaatggacaggctatcaggtgtgaaaagagagctttgcagctggaatggtgctgttgtggaaagactttttgtgctgatgcttatgtgctccctgtcactgcctttgacatgattttgggtatggattggctagagcagcacagtccaatgttatgtgcttgggacaaaaagtgggtggaatttgaggaagacggtgtgcccatcaggttgcaaggggatttggttagaccagagaaggttatttgtgagtctagtggtgatcaagtgtataaatgggaaaaaggaaatgaggtgtgggctgtggcattgatacagaaggtgg

SEQ ID NO: 198429 - DNA, 236 bp, Zea Mays
ctcagatagcaaggactcagaaacttcagatgataaaagtgaccagagtggttcagagagggaaacttcttatggtcacaggtcccataaaaaagataaaagggcaggtaagaagaagcctagtgtggttgtcatccgaaatatcaatgtaacatcgaaaaggcacggatcatcagacagtgactcacaaacaggttcagatgtagtatcagaggatagcgacgattcacacgcca

SEQ ID NO: 198430 - DNA, 342 bp, Zea Mays
aatttatgcaagttgcaacaagatctctggagataggcaagaacttaatgcacgggattgaagcatgcagtgaagttcttgaatcaacggaaccagatattgatgatgacatgaggcatgggtttttgtgtactcgagcagcattgtacctaaaggtttgtttgctttctttatcatttgtgagagctctgttccacattaaaagtagggatcatagaattttgacctacagaggaagtggaaaaatgatgtttacatggcgattcgggattgtaatagagcgcggaagattgatgccacatcatatcaagcgcacctacatatggctgaggcactattgca

SEQ ID NO: 198431 - DNA, 254 bp, Zea Mays
tattagagccataccttgagaacattgtttcaccacttatgtcgttggttcggtcaaagacaatggaacttggtgctagtactgatgaacttcttgacattatcaagcctctgtgtatcatcatctacacccttgtcacagtgtgcgggtacaagagtgtcatcagattcttccctcaccaggtttcagatcttgagctcgcagttgctcttcttgagaagtgtcatacaatgagttcagctactgctcttagg

SEQ ID NO: 198432 - DNA, 447 bp, Zea Mays
gtcgccgtgccgtctattctgatgatactctacagcctgacagccatgacgagcagctagtcaggttgctggctttggaaagtgatcagcagctcaagacggtggcaatccttggcctgcctggcgttgggaagacaacacttgccagaagactgtaccactgctatgaagggaggttccattgcggggctttccttcgggcgtcccgtaacctgcaggataccaccaggcttctcgccaccatgctatccaagattaagggccaacaagggtgccgctactgggggggctccggtgatgagcaagatctaatcgacagcatcaggcaacatctacaaggaaaatcgtaagtgctactgcatgcctcagttagttcataagaaaaacggcgcagctttatttcacgctctttgatgcatgtgtgtgcccgcccactagtctctctac

SEQ ID NO: 198433 - DNA, 502 bp, Zea Mays
accagcaacaggccctaacactgccccacaagaggcacctgccatccaaaaagcgcagcaactgcagcaacatggctaccagagagtccatttttgaataaccttgcataaccgttggcatcttcaagagagatgttctccatctcatcacaaaaacccaattgtatacagacctgggcagcagaactagaacccaattctggaggaaacttggccaccctcctgctacgcctgggaatgaaattagcaggcacagtcctcctccttctaatggtggttcgaggaggaggcagcaaactattaatcggaccagtgacatcattcttgaactccagcagctgtgaagaaagcacacactcctcatcctgaactggctctataacaagcttctttctcctggaataaaccttgaggcagggagaagcatctgtccagccatgaatcatcttactgagcaacaacgaagacattctgttcaagggatcaacagtccaaatatttc

SEQ ID NO: 198434 - DNA, 623 bp, Zea Mays
ccgccttcttggcgttggaaagctgatagtgaacctgcatgatctgggcacgattttgggaggagaacatagcgtgcaacacagaccaggcagcagcagcactggtgtgctgggtcatttggcctagcatttcttcagacatggatgcaaggagtgctgaaagaacaagttgatcagaggcgaaccaacgaaggtaatctaggttgggaacctgaagagcatcgactccagttccggtggtgatgaccagagtcggtggtggaagcgagccatcaacatggccgaacagctgatgagcacgaaggatcggcgtgacttgagctttccacaggaaaaaattggtgcgagagagacggacggtgatggcggtgctgagggaaggagcagaggtaacgcctgagaagctgctgtgtgcagtggtggttgacatggcgagggaggatggaaggaagaatggatcttggctctgcgataccaagttaaaagattagattgggctgctcacctcattctcattctggtggcatgacttgattacttataggtacgatttataggataagctcagcataatttcagggataagccctcgtaacagtctatgcgtttacatgctaatctaa

SEQ ID NO: 198435 - DNA, 453 bp, Zea Mays
cagcatgtttagcaagatggtccaagtgtggtgatagtgtccaatcatccttgggatcactgtttgggatttcttcatcagtacctgtatgtcccacatggttaaccaaactcatcacatcctccatattgccatcaaaggaaaacaatggtgtcccatctttctctctgccgtgaggtcctctcaaggcaaccatcatgtttgatttccaccgaatggcatccggcaatacagtgctgtcccttataaactttactatttgctcttccaagtcccagcgtttactcttgttaaaacctatcaacaatgatgttattgtaaccaaatcaacactgaagccttgctgctccatctccttcaccaactctacagcctctgcaacttggtccccaatcccctccttgcagaactccctcaccatgatactataagcaattccatccaacagttgcc

SEQ ID NO: 198436 - DNA, 318 bp, Zea Mays
ggaagcaccacctagttcctgaccctgatgtccatggcacccgaccatcccttcgatgccttcgtcgccgcagctcgtggcgccataacccaccttcaccttcccgtcatccacatccctggatccaattccagtcctaaccccgactccaagcagcaccacgaacccgaggtcgactgcctgctccacctccacgtcgtcgtcaccaacttcttccacaagcccctcagatcattcgctaggtgcttcaggcccaagcgacgggcaggcaaacactccccgccgctctaccaggagcccagcaatggcgcgaccccg

SEQ ID NO: 198437 - DNA, 251 bp, Zea Mays
gaaaggctcggtattggagaggtccaaaggtcacagtggacaagatctaaggggcgagcggtataggacatggaagaggtaaaaggtaagctagtgtggcgaccaagctgaaaagcatggcatggcagcatggccgcgggggtagggaattgacgaggtggaggagagtctaaagaggatgtcgtggccgaggtgataagacaacgacgctaggtggaggtagaggcagtaacaatgagggcatagtgtgg

SEQ ID NO: 198438 - DNA, 346 bp, Zea Mays
gagcaaggctccaagggtggcgaacaaaacccgcaccttggtgagttgttgaggttagaggaagttgccaagcaacagggtgttggtcgttggagcaaggttggcaatttttcatcttgaccaacttattttgtattgaatgagatatgcttttcttgattttgctgttgtgtgcttcttatctacatccaggaacctggtgctgctgaagagtcaataagatatcttccaccatctgcaattggtgaagcaagtggttttgatgcgaagggttttgcggttgaaaataaaggcaagagtttggaggccattgttgaacaagtacgcgatggcagtactgttcgtg

SEQ ID NO: 198439 - DNA, 338 bp, Zea Mays
cttttctcagcaagctttgcaagcaccctccttgctctcatctttagcttattctcaatcgcgttaagaccagcctcaccgttagggtacccctcaggcctctcaaggttaggtttaagcccagagcgaatggggtccttggagggatcaattgtggagacaaggagaatgttctcaagcttcaaatctgaatggatgatgccaagctcattgtgcaagtaatcaagacctaccaaaatcgacttgcatatttgcctcaccctatcgaacccgatgcctttgtaccggttgtactgtaccagcttaagcaagctatctcccagtaactcaaagacgag

SEQ ID NO: 198440 - DNA, 519 bp, Zea Mays
gcgagcggcgccttgttctctctgaactttcatgtgatcactcattttatgcaagtggcagaggcgagtatactgcaagttcctgcattcggaagcagagtgatcttccacttgcatcaggaggtgataagcatggaagagtgccagaacaagtagaagatgttaaagccctattgtcaagtctgttgggttttacatatccttccccagtggaatccgaacctcgccaaatcaaaacaagctttcaagaatcagcaacttcaacactctcacaagttgagactggagaagcaaaaagtggatgtgaggtttgtatgaggtccaaagggcagaaattggatgatactgccactcctttccaagggttttcattgattcaatcggacgaggaagatatttggtgggtgaggaaaggcacaaagttacaagaatctttcaacattgaacctgttcagaagtctgttaagcaaacttctaggggtagggcaaaagtggttcgtaaaacacaaagtcttgcac

SEQ ID NO: 198441 - DNA, 566 bp, Zea Mays
gaagtctcttgccaagtcggaactcaagaaagtttgggttcagttcattggaattcctcctgatatgttgcagttcaagttgatttgggcggtaggttcagttcttggggtgaccaaagcggtggatatgagttttacaaacaaatataatgttggtcgtcttcaggtttgcgtgcttgatcctagcatcattccacaatttgtggatgttgtgattggtgattttctatacgaactgcagttccgggtggaagagaaaacgttggaggataatcctgtgccgatggatatggatgattatgatagtggagaaaataatgcgaactcatcaaataataatgccccagataatcataaagggggagctgctcctaatgtcattgggtcagctagcaacattgaaggggaaccaaagaacaaggatgtgaacgaaaagaaagtggggctgctaggagggcaagagacagaggtactcatggacagtgagatggagggatccgatctggtaccaggctcaggtgctccagatttgtcttttggtgatggggccgtaattagcaagattt

SEQ ID NO: 198442 - DNA, 479 bp, Zea Mays
aagttatacaccacaaggcaatgctaaggtctctgaacagcttgaaagaaataactcagacggattgatgcaaagtgcaagggataagagagtgccaaatggtctctttgtcaatgacagaaatgggcagaacaggtccagatttgcaaggacccgatcaagtcctgaactcacagactcgtctactgaaggatttcgtggtaggcggactaatgcagttggtatggaaaaatcttttggtgttgattacagcagaagaaacatcttgattccagaagtgtctagcaaccacagcactaagtcttcacaagatgaatcagtgtcttccatgaatggttcatctcaccctagtgcattggcagcttctgactcaaatagcgtttcaagcagctttcgtgatgataatggttttgtgatgaatgaagaactcccttctgtttctgaatcatcggatatgcaccacgatgaacaagttctgg

SEQ ID NO: 198443 - DNA, 282 bp, Zea Mays
tgatgtgccgagttcctagccatgtagcagcgtggatctggatgaggaggacaaggccatgagcaggactgcggcctcctccactcccatcaggaccctccgtttcttcaccacttggagcctgctgcttttggtgttgtctctgacagcgactgcacttgttgccggacagtgatcctcttgctgctgctgctgctgtggcggcggcggccgctggttttgttgtggtttcttggcgctatcgagacctagctcttgcctccgcttcttcctgtaccggat

SEQ ID NO: 198444 - DNA, 304 bp, Zea Mays
ctttggtcgggcaaggaagttgtccataggtctggatgtcttgtcccctaggaaatggtgcttggaagcaagcctgccggtggcctaggtgttagagatctcaaactgttcaacacatgcgtccaccttaaactcatccaccgcatccaaacatcgtcatgttcttcctggggagtatgggtctgtcgccacgctcgtttggtgagcatcacatatgtgacctcccaggtgaacactggtcttccttgcgctctctgctcccctttatcgtgctatcaccacctgcgacatctgcgttggtaag

SEQ ID NO: 198445 - DNA, 580 bp, Zea Mays
gggaaagaaaagcctgagaagaagatgacaagggagatggcagcgagggagtctccccgacatttggcaatactggaatccatgtctgcttcctcagtcccagtcgctcccgaaaccctaacctcggcgatgacagcagcgacagtgatgcaggataaggagcgcaagagggagaatcaggaggcgctgccggcagctccattaattgaggaccctgtgccgaaggtagaaaagaggcacaagaaaaggaaggatagggaggctgcaatgattataccatcggtgcccactgctgctgtggcacaaatcacgcagatggaaaagaaggtgatgacagagggtgcgacggtaaggaagaaacataggcggcggaaggtggagcaggagcaatctggcgaaacaccatttctcaatgatgtctattcaagggcaggggaagaagctgctgctggtggcgtcatgggcagacagtgtgtcaagaggatcaaccgcagcaagaattccaaggttttgaagaagcagcagacactgccccaaggctttttccctcccatagctaatcccgatttcattgatcagg

SEQ ID NO: 198446 - DNA, 329 bp, Zea Mays
ggggcatagagcacacaactagcttagctaggccatgccttcaaaaactgtgcatgaaactctagaagacagacatcttcaaaacttcctcctctctactcgtatttccctactgtcttctaactcgtcaaacaacaaagagtcacaccagattgcccaggcaccgacctcttgaaaagaaccagggttcttataaatcattcgcatcagtcctcacagtgtcttctggagatgcacacaacatatctcccccatccttctctctcacccatgccttcataaacagcaaagttggctagctggttatttgtatcaagatgaagtttgaa

SEQ ID NO: 198447 - DNA, 506 bp, Zea Mays
tacgtggccctgaagatccaaaagagtgcgcctgagtttgcgcaagctgctcttcatgaaatcgagttcctgtcagagatcaccaagaaggacccattgaactgcaaatgcattattcagctgatagatcacttcaagcacacggggcctaacggacagcatatctgcctcgtctttgagttactgggagatagcttgcttaagctggtacagtacaaccggtacaaaggcatcgggcttgatagggtgaggcaaatatgcaagtcgatcttggtaggtcttgactacttgcacaatgagcttggcatcatccactcagatttgaagctcgagaaccttctccttctctcgaccattgatccctccaaggaccccattcgctctggcctcaaaccttgccttgagaggcctgagggaaaccctaacggtgaagctgggattaatgcgattgagaataagctaaagatgagagcaaggagggtgcttgcaaagcttgctgagaaaag

SEQ ID NO: 198448 - DNA, 212 bp, Zea Mays
gtattttctagcccttgagtgttttacccttgaagttaaacctgcacaacttatagacacccataccttgacccctaaatcgactaaagcttccttgtgcccttgtgtatgtcaaaaaaaatggtttactgtctgttcacgcaaaccatatctagcctcaaattctttttgggaaccttgtccaaaatcctcattaagttctcctctgctca

SEQ ID NO: 198449 - DNA, 399 bp, Zea Mays
agatgctcttctcttgcttgagaatgcattggaaggctcaggtggtggtggtgctgctgcagcttatcaagaggcttttcgtatcatcatgcgaggtgtaagtgataaatcgttcattgtcagagcagcggcagcacgttgcttgaaggcatttgctaatattggtgggcctgcattggggatggctgatttcgattcttctatgtcttattgtgtgaaggtattgtttatttaccttctttctcatgcttaatgtggctcagctagctgaaaagcacatgttgaatctgttccttttgttgatgttttatcacagggtttggaagatagtgtatcttcagttagagattcatttgccgaagcacttggtgccatacttgctcttgcagtgaatccaga

SEQ ID NO: 198450 - DNA, 464 bp, Zea Mays
aatatatgtgagtccattattggtacatttcttggcattattgggaagacaaaggacactattaatgctaggcttgacttggaagaaatgaacataaggaaacatttgcatttgaagcgtgatggaaattcctacactgttcctcatgccccctatgtaatgaataggagccaaaagttagttttttgtgacttcttgagaagagtaaaatttcctgatgggtatgcttctaacttagcaaaatctattactagtgatggatgtaaccttcaaggattgaaaactcatgactgtcatatcctactccaaagagttttgcctgttgctatccgaagaattatgcataaggatatatacgaagcaattgccgaattaggtaaattctttcaacaattatgtgctaagactctaaagttagatgttttgcatacaatgaaagctaaaatcccagtcattttgtgcaa

SEQ ID NO: 198451 - DNA, 330 bp, Zea Mays
ctccatcaatgtttgtcgcaggtcgatctctagctccaccagaatcttcatcgtcctccatttcttcagctgtatttgttccacctataccagtttgctcttgtgacttgtgaggcttcatttccatcttgcccatcaccttcatctccttctacatcaacttccttacttattgctcttgtgtgcttccttctcctgccatatgtattgatggtttgcgtacgagtagcagcatcccttgacccttggcaaatttctccctcttagagacttagactagcaaatttcacctcatgaatttgcgtacgagcactggcagcttgatcaacc

SEQ ID NO: 198452 - DNA, 398 bp, Zea Mays
tggaagaaagaggtgttggcatctccctctttcaggtactgaactctagatctgagtcttgcaaccgttctttccagggaagcaaggaccaggcactgatgcttgagctttcttagcagccataattcatctggagataaaaccctgctgtcttgagccatttccagtctgtgtaaaatctcccttgctaagcccagttggtatttaaagttgcccactgttttgtgcccccaagactgcagtgctcttgttagtctcttgagctttagagagatcctctccagatgcccgcaattgtgaagtggctagttccaggaatttgccaccacctcatgaaagcctggcattttggtccagaagctctcaaaatgaaatcgccttcttgccttaccttcttc

SEQ ID NO: 198453 - DNA, 409 bp, Zea Mays
tgatgacggtgtttggtgtggcgatggcgatcatagtgacggtacgagctccgcgcagatagcagatagcatggggtgtaacgagctccagcggacatggcgctgatacatataggccggggaaggagagaagataacagggagaggaaacgaaggggtcattgcaattaatggctagtggagagaagaagaaaaatgggaacaacgatttacgatggtggcattctccactgcggtagacgagagggcggctgcgagtggaagagaaaacggaaggccagtgcgtggttagcggcggcgttctcctgtaacgtaaacgtgagagccacggagaggcggagagcaggcagagcataggacggtcctgggccgtggacgtgcgtgtctcgtgtgtgtgttttttttgttt

SEQ ID NO: 198454 - DNA, 343 bp, Zea Mays
gccgcacatcaaacgctcaacgtctcctgcttcatcttccctcctggtggtcgagcacggcggcgcccgagcctccaaacggtggcgcttccgccgccgcggcgagccttgctctattcgccgccccaaccccgactagatggcgctactcgatccccaggtctcgacaacttacatggggccctatctacacactcaacagttgcgaccacccggctctcgcattcagcgggctgccgtgaagtccggcgacgaatccaccctcaccggagcactaaacttctaatcttccggtgctacatgttgaggacataaaagcgaaaggactggtggtgaattaccg

SEQ ID NO: 198455 - DNA, 392 bp, Zea Mays
attgtggatgtcaatgaggtcttacttaaagacatcgaggtcacaattgatggccttgtcagtagtcctgctcgcggtaagcaaaacaaagagtacatcactgtgtgggaaaagggagcgaagttggttggtgttctccatggtgatgaagcagctgtcataatgcaaacaacacgtggtaacttagagtgtacctaccccaggaagctagtccttgtttcaattgttcaggcactggttcagaagcgtttcaaagatgcaataggcatggtgaggaggcatcggatagattttaatatcattgttgactattgtggtttgaatgcttttatggattcagctgcagacttcgttaaacaagttaataaccttacccatgtcactgaatttgt

SEQ ID NO: 198456 - DNA, 253 bp, Zea Mays
tggaaaacatcttcttctgccatggggtgtgcagcctttgctcatccaactgggcgaggctacgatgatctgtgagtatgtgaaattccttgagttgcaagtaatgacgccaatgatcaaccgcaatcaaaatcgccaaatactctttctcgtacgtggacaacccttgcaattttggtcccagtgccttactcaaataagcgaccggatgccccgcttgcattaatactgcacccacacccaaattgctagc

SEQ ID NO: 198457 - DNA, 345 bp, Zea Mays
ggctatgttagaatatattaccaagatgaaatctcttgcagatgagatggaatctacaaagaagatgcctatttcgcaatctagtgctgatttagcgttgaaaggcctagatcaactgcactactttcttggcattgaggtacaaacagctaatgatggtattcatgtttctaggctagaagcgtggttttattcagaccgtggagctgcagacacttagaatgccccctgccgtgaagagtcttgtgagcatttggctcctctctttgtagtttcttttcccgtggagattgctcggcttgatctttgccgggtttgtgggttttgttcctttctttccttttt

SEQ ID NO: 198458 - DNA, 538 bp, Zea Mays
aaggacttgatttccaacagtaagcttggatacactatttttcttctttctgtaccgtgcaaaggaatggaacaacttagaatttgcatctccttccttgagccaagaaattcttgatctaaggcgggcaatggtacgcttggtagaggccaaagccagagcgagcttcttcaatttacttaacaaccacctttccaacacagacagaatacgaccatcctgcgcaatctcaagttgatggatcaaatctctagcaagatgcagttgagtctcaatgtgccccaccttcttgctgctccatccttgaagggctttggctgtccctttaagttttaaatcaaaagtggagaaagggcagtggccaacaggaaccgaattccaggcgttgtgcaccacttcgtggaacccttcaattttcgtccagaaggattcaaaatggaagcgccttttaacacctttgcaaactttgagacccaataataaaggacagtgatcagaatcttcagaagccgcactttgtaacactgcaccaggaaac

SEQ ID NO: 198459 - DNA, 549 bp, Zea Mays
gaagaatccaccaactccttaattgagtcttgcctaacagaggagttcagccccctcacattccataccagcagttttgtgggatccatgaaatacaaacacaagaaactactgaaaaacccgggtggccaaaaaatctaatacaccaggtcaggtggaggggtctagccaaagagggctgccaaagctttcacctggctatgtgacaagggttgcttgaaaacccttgcataagcttctgttgcttcctgggacgtaccctcagcctcagaaatgatatgcagtgctcttaaagcttgtttagtagccctgctgccccagtcatgcatattgaattcaactccagcaccagcaatgcgtcggcttcgcctaggtgcagcttcccgagaagaatttgaagacagtaaggcattcatatcctgcttcggtgccggcagtaattgttcagctgttgtactgatttttctgaagaactcgtccttcgttgtggagtgattcatagtccttggggccgagtgcaaggaatcattattctgaactgagccttcc

SEQ ID NO: 198460 - DNA, 490 bp, Zea Mays
cttccaggtacatgcctttacaatcttgcactgttctacacttctatgtttatgctaacagcaaattttttgagataatagttcaaaaggtgaaatatgttataactgactattatttcctaagtcctaatgaagctagctaacagcgcaacgaaacaagcataaaattggcagttcatgtaaaaatggcatgacataagtaaatcaaccaaccatactgtgctgattgatggtaatgaaagctttgtgttagccaaccaattaaaggccttattatcaacggaaccctcttcttacctgccgatcaattgtcatagcaccgtcctgcagcacatcaggcacattgctgcaactctccttggcctcagcctccaccttccctggagccgcagaggagtgtgccccctcgagcaggaggagggccctcctgataccgttgagcctggcgtcgctgggcacttcgtccatcacggcgaagggctccccgccc

SEQ ID NO: 198461 - DNA, 753 bp, Zea Mays
gcggcccatacacacaggttagccaccatgcagtcccattctctttacaaaactgaaccgacacactgtgattatcaattctgctctgcccagttgatttaagatggtgtctccacgcaaccaaaatgcccccactaactccaacagcagggaggaaaatgtaatcgctgaaattagaacccagcatggaaagaatggtttggtaagggatattctgcatttttgtctcctgtagacaaacaacatccatcttaacagtttcaacaaaatccctcacagagtcttgtcttacagatgagttcaagcctctaacattccaaacaaggatttttgatgggtccattaaaaaataacagcaagggagcaaccagcgcaagaccctactcaaggctccaaaacagaaggagcactccagccaaacaaggctgcaagggcttcaacatgacactgagacaggggttgggaaaacagtttggcgtatgcatcaatagcttcctgactgatgtcctcagtttctgaaataatgtgcagggttgccatagcttttttcatagatcgtcttcctaggtcctgcatgataaattcaactccaaccccagccactctacgacttcttcggggagcagccagcgatgagagtggagaagatgctttcttgtgtactttgatgcaaggatttggcagtaaagcatccggcctgatagcaactctgttcaggaaatactcagcgcttggacagctgatctgttttgc

SEQ ID NO: 198462 - DNA, 514 bp, Zea Mays
cggcacctccactatgttctggtcggataattggcttaatgggatgtccctgactcagattgctccagctttgtctacccgtatctctataagaattaagaaaaaaaaacagtccagcaggctttggcacctccactatgttctggtcggataattggcttaatgggatgtccctgactcagattgctccagctttgtctacccgtatctctataagaattaagaaaaaaaacagtccagcaggctttggaggagcatagatgggttcaagacatctctggtagtctaccaatacaggttattctggaattcttcatggtctgggatatattacaggaagttcatctccagcctgcggttcctgatcaacaccgatggctgccaacatcttcaggagagtactctgcgaaatctgcatatgagcatttccttgctggtgcagtatcctttgagccagccaataggatctggaagagctgggttccacctcggtgtaaatgttttatttggttgg

SEQ ID NO: 198463 - DNA, 239 bp, Zea Mays
tgcatttgccagtgcaagcaaatttcagagataaggatggcagcacaactacttttctccaatgcttccagttgccactgcccattaggcatttcaaggataaacgttgggaagacacttcttggtgaaagtgcaagttttcagagaaagaagtcgttttctggtggttcctatcgcttttctcgatttgattgctctgcgaactcccgccgagctgggccaaggcgcaccaaggatac

SEQ ID NO: 198464 - DNA, 293 bp, Zea Mays
ggtgagagatagccagtgtctgggccgttggattcacatggggtggcggtgatctggttggtgcgaatcatttccgggcgcccatccgagctgttgattgagtgacgggtggtagagattagatcccgggggtgtcagcaccgcatccgtagatctgggatcggccggtccacaatgcatactggttcgcagttatgccgatctaatcaggaacgttcattcgtgatccattggccgaagctaaaccataccgtttcgacccccactttgcagaagaacccctgggtttattg

SEQ ID NO: 198465 - DNA, 231 bp, Zea Mays
tgaggcacaccttctataattggcaaggcacttaacagttatggatgacatgcacacttgagttttgaaacctggccctttgtttaggttacggtgaaagcgtctaatgttcatgctaaggatcccgaggaagcgccatgcggagtcgatgacatgacaaagcttgcctatctgcacgaacccggggttcttcagaatctgaaagctagatatgacatgaatgaaatttat

SEQ ID NO: 198466 - DNA, 289 bp, Zea Mays
cattggcaagcgagaaactgggaaatctacaaaaaggactggtaattcaatctcttagccctgacacaacatatgcacattgtgtgacttggtgaaaacttatgcacaaaattttccagctcctatagacaaggctaagactgctaaagaggaggccagagagttgctcttgaaggaggaagcatctgtgcgtatgaaggttgggcaagtgcagaaggatctctccttaatgttggatgctcttggcaagttggctattgctaatcctatatttactcatggtcaactg

SEQ ID NO: 198467 - DNA, 852 bp, Zea Mays
tgtttgcttctctgtcttgatcggggaggcgccatggcggacacccgcaaattcgtgctgcccggccaacccccaggtacggctcgctcctcctgtctgcttctcctccggggttggggttttgcgcgctccccacgggagagcacggagaattcgatggttttacggccacagatgcgttttcgtttcaagacggagagaaaagcaactgcacgtgccgtgtcgatcgaggacgagtcatcttaaatgctttattaagtacatctggaaaaagggccgtgcgtcccatgttcttgcagttgcacttgcagtccccgcgaaatttcaccctcttttttttatatctacaaaaaaaaaaaccccggtccattcccggcctttgcaaattcgctctatcgccccgcggaatttcgagctggatgacgggatgagtttctctttcatcggccacgtattttgtttttcgaaagaaagcgactggggctagtctctctctggcgttttgctgacttttccgaccaataattcagagcagacaaaaaggggtttcggtaccaagaacgaggagtcgaggaccgtatgcgagtggtggtggtcgcctggtcggagcagttgttggcgttgactaaccggggactaactaactaacctcgtcgtgaatgaatctgcagacatctcgcagatactgcaggaggctcagaaccggtggctgcggcccaccgagatctgcgagatactgtccaactacaagctcttctccatcgccgccgagccgcccaacatgccgaggagtacggtttctctccctatgttttttgtgctctctttaggtgcatgctgtggcttctgaac

SEQ ID NO: 198468 - DNA, 442 bp, Zea Mays
agcatctaaaacatcgtgcataactgcagcgcgaagttctaaatcgaagtgagactcaacacgttgctttgttacagttttggccacacccttggaatgacgaccctcaaactgccgtgccaaaagattacccaaccaacgctccaatagtgggacaatacctcgaaggaaaaagagccacactctccacattggagcccaaaacccacaaccaggtcctttgccaacaggaccagtgttgaaacggtaatatatcaagtgcttcagatctttgcacatcctaatctgcctcatcaatcggtacttgtacctatacataccagttaactgtccaacatgagaaaatatatattgcagaccatcagccaactggaaggcatccacatttcccagacggaactggatgttagcatcaacaaccaacttcgtaagtcgtaaaatc

SEQ ID NO: 198469 - DNA, 327 bp, Zea Mays
cccgccactgtagcacgtcgttcataggcacgagccaaccccacggtgtcctccaaagtgtctggttgttgcaactcaacatcggtcttcaatggttagcccatgcctgcggtgaagatggcgatctagtgctactccgtgagggtgtcgcagagggacaagtgcgcgaggaaagcctccgtgtagtcagcgacgaacccttgcagacgaaggtggcacagctcgcccagggggttgctgcgagttggcgggccaaatcgttggttggccagttgggagaaacatggccaggttgggattccctggttgtgttccaacctgtagtac

SEQ ID NO: 198470 - DNA, 899 bp, Zea Mays
caagaaactgcattaacaatcctggatgttggtgaccaagaatgccaggacatgagacaagaaggcacaagttctgaggtgagctcactagatgaaacttactataaagctacatgttgttgtgtccacacatgaaaacactagaccatgcatatcgccataatattttctataaatccactctttgatagtttgacacatcgaaaagcgagatgtgtggttgatggtggtgagtatgcattacatgcttgtgttccacaaccaaagactacccaacgtgcaacgtagtaacggtggtccctgcactgaaactggcatattttacaaccttgtttttctagtatttggttgggtccaaccattcttcgttcttatatcaaactacatagctgaagaacatgatcaatctctctttaatttcttgattaattaggctgtgatcatgtggaaatatggaggtcgtcgttaataaccaccctggtaatgttctgcaggtgataaccccagggtcaagcgagcttttgcttgacgtccacccgctgacactccactttcccttccatgcccacaagttgatcccgtgcacgctgcacctaacaaataaaacagatgaacatgtggcttttaatcttagtatagaagacggaatggagtcttggcagcagatctttgtaaggatgcccctaagtggaattgtgccaccaaaatccacttacactcttgttgtcacaatgagggagctgacgtatctaccaacacaaaactttaatttgaccctgcagtctaatatatgcgaagataggtacatctattcatttatgagcctatcagaatctgatcagttttttgaggatttaaaggagataaggaatgtggcgccgcctcaggtgaaactgaaa

SEQ ID NO: 198471 - DNA, 302 bp, Zea Mays
ccgctgttgatgggcgccatggcgggcgccccgcccgtgcgcgtccggctccaaccttaccgcgccagagcttagggttttgaagatcggcgctgggaagactccgcgagctgggcggaggagcggatggctggaggtaggaccgtaagagtgcaggggcaggaggcgcgggctcgtttcccccgacgcgaatggcaaccccgtgttatggactcggaggaaggggtctccctcgcgctcgcgagccgagggtttggggtgggggtagagacggggacggacttggaggaagacgagggcga

SEQ ID NO: 198472 - DNA, 215 bp, Zea Mays
cggacggccagacggaagccgccaaccgagtcatagtgatgtacctgcgctgcttcactggagatcgcccccgccaatggctgtgctggttgccatgggctgagtacacctacaacacttcgtaccagacttagcttcgggacacaccgtttcgggtggtgtatggtcgagagcctccttccatccacttttatgagccgggggagacgagggtg

SEQ ID NO: 198473 - DNA, 408 bp, Zea Mays
cttgctacaaccatcttcgtgtctttgggtgtgcgtgctaccccaacctttctgccattactccccataagcttgccccttgctccaaccgttgtgtcttcctcggttgctcccctgattacaaattgtattagtgttttgacctccccgaattacaaattgtatcggtgtccttacctcaccactcatcgtctcttgatctctcgtcatgtcgtcttagccgagacaaacttcctcttctcgaccccatttagttccactgccaactcccttcccgagttggactttcttcttgacctcaaccatgcggctccctctagtcagccaccctttgtttttcacctacaggttcacccacgactctcccgctttcagcaccgatgccccccgcggtacctatgctcctgg

SEQ ID NO: 198474 - DNA, 762 bp, Zea Mays
gcagggagtgcattgttgatctcatgatagatcctggtactcttatttcatcagatggtgctgacctgggtagagaattggaagacagcttagtcgtagataatcaacatgttaacaaagatgacactagcactcagttactttcctctttcagtgaagcttcaagttccatgcacagttcatttgaaaatggatcgcttgaaaaaggatttatttgcaatgctgggcattttggtccatatgaagcaacaactgcccatagtgacaatgatgtgcttgggtctggggtatcaagttcatttgatgagctatcggtcagcacatatgcatgtgaaaacatacctattattcatgaatctaatacagatcataccatgactgaaaaaagcaaagataagtcgatcacatcaaataattcgtcatcatgttcgcctccatcttctgagataggcagtactcctgctgtacgaaggaaaaaggtcaaagacgtctcggagtatatgattagtgctgcaaaagagaaccctcagatagcagaaaggatccatgctgtgttacttgaaagtggtgttgtgccaccacctgacttgttttcagaagaatctaaggaacaaccaaaggacctgattgtttacgacacatctctgtttcaaacaacagatgaaatgataaggacaatgaatgagcttgaatccacagcacacgatggttgtgctggtcttggtccttcattgccacctgatcctggacatgagctccaaa

SEQ ID NO: 198475 - DNA, 793 bp, Zea Mays
catgctgatccacatgatatggcaggaatttgatgttttaatctgttattgtgcatctatagagtaatttaatgactacattacaccctccctacttgatagatcaagccaagtggcatgcttagaacccactaacaacctcttgcaattagaagcagtcggagccacaacaaagagagatgaccacaataccaatgcatctcttgtctccttgtgtgtcgactgtgttgacgataaaccatagttttcccatgatgagacatgtcaggcacacccgatgagacatcgacatcgaccactgcatcagtcaatttacatccgctcagcgacatcggctcatcttcattgacttatctacatcggctcattctcgtcaacatgacccaagcaaggaaggagattcctagctacagcgacgggattaaatgttggctaccaagcaagactaggccaccctagctcgaggagatcaacctagatatgttgtaatgctatgaccaggctctcaagaggctaaccaatgagcttcttgtgtgcttcacgtggactcactccagtggtgacaaactcacccgaaaattattgagatgtaacaaactaacatcatctctagttgtcgataccaccgatagagggtgtttggtatatgtttaccatatttacttcatattcttagaatatactgtaagattatggggaggctacactagcacaaaacaaaattttcgaccccataaaccaagatctactgctgttaggtcatggaattaccacaagacgtgcaggacaacga

SEQ ID NO: 198476 - DNA, 202 bp, Zea Mays
agcttatcccggcatcccgcggaatctcgctttgcgatgaaaccatagctccacccaattcttgcggcttcagagaaccagcgctccctgccgtcgctgtccctcgttctcccagcgcctctcattcagtcatccctcctctccgaactgaccgatgcggttggtgccaaggttccggccctctaatgctgcttgaactcca

SEQ ID NO: 198477 - DNA, 562 bp, Zea Mays
gaggcacgcgggtcgctgaaccctcccaggaatatttcgccccagtccatggtgactgggccgctggaattaaatgggctgggatcgccccatgcgccaactcctgttctccccccgactgggcccgtccctgggtcgccggagatggtcagtccatctgtggtctcgccccacataattgggccgctggagacacacaatctcagatcagtctcgccccagggactcgagtttgatggggacgtctctgtttttgagtctgggccgcctgagacggttagtgtgcatgcgatcttgacccttactgggcaggtcgagacccagtgcgcagtaccagtctcgccccaactccagttgaagcagagttcttgtaggccgctgctcaaggtatactcaagaagaaaatgtggaacaactcagctgatggaaaggaccactgatcttcaggacagtgaggaacccagtcaaggcatttcggatgggataattaactcggccactgacatctcagaacaactgacgattccatcatcatccctcatcaacatgattagcagaaagc

SEQ ID NO: 198478 - DNA, 212 bp, Zea Mays
tgctaaaggacgggaagcttcaaatttggttgtacggaagcgaaacccgtttacgtcgtaacggccataactcttcactatcacactaccaatagaaagctgacgcaggtccgaatggacactacgccgacgtgcgggagaatcaatgccctcatgtgaaggagatcccacaggacacttttgtgagtcatccgatacattcccgaactgac

SEQ ID NO: 198479 - DNA, 249 bp, Zea Mays
gctctgtcaccttgtgcagctagtgcagcaaacataccaattaattgatacacagcttctgaattcccagttcttatagagctgggctggctagatgagatatcaacagacatcgactcaaaatttgtcttgtttgcctcttcactatgttcattagcatcaattgattgcctggctcttttagtggagtggacatcatcctctgtcacatgattcatgtcttcagccagactacgcttgttactaccg

SEQ ID NO: 198480 - DNA, 395 bp, Zea Mays
agatggtgtcgccgtgggtttcgcagacccactgggcctgctcatcgaagatggcgtcccttgaaacatggacgcgctcggtgatggggtcgtaggcgtggtacgccttcgtgccttcttcatagccgatgaagatcatcttccttccttgatcctccagcttcttcagatgaggtacggcgttgcggacgtagacgatgcagccgaacgtcttgaggtggtgcactgccggcttcttgtcgtgccacgcctcaaatggagtcatcacatctacactcttggttgggcacctgttcaaaacatacacagctatttttaccacctctccccaaaaccaaccagggagtttcttcgccttgagcatactcgttgttgctacaacagtcccattccag

SEQ ID NO: 198481 - DNA, 332 bp, Zea Mays
ctcacagataacgacaaggtacaataacattcatttctactacttaatgtatggtcatggtttatgtgaacttactggtagtcgtgcactgacaactagttacaaatcttttgtagacttcgaaagctgcaactctatatgccacatcacagaaaaagccttttcatttcatgcattgctggacgcggctcaaaaacgaacccaaatgggatgccatggttcatggaagcccctggagaggcaatgcggggacggagcctgttcgtattctaacacctataggttctgttaatgaagtcaaatttgaggaaggtggttcaaaaggtaagaga

SEQ ID NO: 198482 - DNA, 617 bp, Zea Mays
gtcatctgacactgttcctggagcaaaaatcagattgtggcgtagaataagggagtttaatgcatgtgtaccatacactggagtgcccgtcaatattgaagtacctgaagtggtcgtactggccttgatcagtcttcttccaaccataccacatagccttcctgctgatgctcctcctcttctgcctccatctccaaaagcagcagcaacaataatgggttttgttgcatgcttacgcaggctacttacatcaagaagtgtggcatcacatgtgatgtcgtttcctgtcgctgttgggagaataatgggtttgcttaggaatggttcggaaggagtagcagctgaagctgctggacttgtggctatgctaattggtggtggtcccggtgattcatccatcttaatggatgcaaggggagaatcccatgccacctacatgcatgcaaagtctgtactgttctcgcaaccaatgtatgttccgatccttgttaacaggttgaggccaatatcggtgtcaccgttgttatctttgtctgttgtggaagtccttgaagctatgctttgtgaaccccatggtgaaacaacccaacatgctacatttgttgagctactgcgtc

SEQ ID NO: 198483 - DNA, 274 bp, Zea Mays
cgccgagcataaatggccgcacttctcctgaataggcgcagaagcagattcttgggactccgaacagtcttcatggggataatccgcagcattaacagcaacgagaacagggccagacgccgctggcacaacacccgaagcatccaatagcattgacacattagctggcccctccatcgcaggaaacgaggcaggtccaggcgccgccagccctacaaccgaagtaacagggagagctggcgcatcaactggagcagtcagcgtcggaagcgag

SEQ ID NO: 198484 - DNA, 236 bp, Zea Mays
ctggatttcccttggggagcaagcctgccacgtattgagacgagaatgtatcttgagcaatacggtggaagtcgtgacgtatggatcggcaaggttctctacagaatgaacatggtgagcaacgacatgtacctcgaggtggcgaaagtcgatttcagcaactttcagagactatgccgactagagtggcacgacctcaaaaggtactcatcatgcagcatgcatgcccttattag

SEQ ID NO: 198485 - DNA, 288 bp, Zea Mays
tgatactccacagtagcgatacgaaagttgagaagcattctcacattgacgatgtttgtacagaaactgagatttctttgactgataatggaatatgcgcagtagataaccacaccgatctaactgggtgcactaagcaggaggagaggggcagccccatgaatgaagccaatgatgtttcatcacatgacattgtatttacaaggagaggtagaaaatcatgtgaggcaaagcagaggacatgtgaagaggaggcacggtttgagaagcgaatcacaaggtcagcta

SEQ ID NO: 198486 - DNA, 222 bp, Zea Mays
gtcgcccagttgtcgcacgagaggaagaacgcgcacgcggggtgaacagcagaacagaaggcaggggtgaattccggggatgttactggatggtgatagctgcgccgttgggccaccgggctgaaaccgtgtgtgtggatcatctgctcttggaatgtgccttctcccatgcgacgtgtgctatactattggattcatggcgccagagtttcccaaactcgg

SEQ ID NO: 198487 - DNA, 406 bp, Zea Mays
tcggaacaccacaaccagcagcaacttcaagctgttgaacccctcgtctatctcagtcagcttcccaacatggcctagtgtagagcacgggtcatttaggtcacatttatgagccacgttatagctcttgaggacccttatatcctcgatgagcttattaagctgctgatcgacttccactttcatcaaatccaagtattctgcgtaagtaacttctacatttgcatccaagaagtgttgatgcagccctgacactacagttgcaaatggtttgaagttgcttgcgacactagagcaattatgacacgacaatcctggcgatggcgcagttgcatcgttgaactcgattaaaccattgttaagctctgcagaagtcttagtgtcactggaagccggtctgttgagc

SEQ ID NO: 198488 - DNA, 681 bp, Zea Mays
tgtggaatgtttggcatttgtggcagaggtgatggcgagtgcggcaagggcagtaggtggattggcaggggtgtggtggtggttgtgtatgcggcggcggaggtgtggatgggctgcgggggtaaggatccctcagggactagtgtggttggcggcaggccgccgtaccctggcatgccgtaggggcagccagatggaggtgtatcagctgaggttcctggatttttttccatggccgtgacgcgagatgagatggaggacatatgggagttgaactcccccagctggcgctgcatgtcagcgagcatcgtggtgatcgactccaacgatggcgacaccgtggcggaggccaaactatcgccggtgttggaccctggcatctccgataccaggttggtatgatctctactccttaggttgtatgagtggtaggggtagagcgcaggctggaagaacgggggcgagaggacgccgtgctgtcgcacggttgggcacaatgagaggcaaggaaataatctcttctttagattaatttctcgctgaccatcctggttacagagataggacttatatagtccctgattgaaacaaactctccctaacaactccttatttctaggacttatctaatctgtaacaaactccatatcctaacaaactccctctaacaactccttactt

SEQ ID NO: 198489 - DNA, 434 bp, Zea Mays
tccacctcatcttgtttaagcccaagcaaaacctcgccatagtgcggacggagagcccaggaactgaaagcctaatcgcaatcccactcgcagcaacgacctacgccgcccctaactccaatccagaaccccagagtccagaggcagaccggcaagctggacacctgcggcatggagcgggtggcgctgctccgcacctcaggccgccgcctcctacaccgctgccgcaggggcaggcccgtcgtcgtgcccgctgccgcggcctcatccttggcacgccgggcgtcctcgttctcactcccggcgcgcggctactcggctctgccccgcggcggcgcgcgattcctggtcgctgcggcgccgctgcactgctccggccggtactggccggccgctgcgccccagctcgcgcggaggctgtccgcctccgctgt

SEQ ID NO: 198490 - DNA, 464 bp, Zea Mays
ctctcttgtgcacctccggctcccagtccactgcctcctgccaaaataaatccgtccgctctccagcttggtggcacaatcccatcgaaagctagggtttcaagcctcttccgacttctccttcccttcccttccccaccacaacgcggccgccatagacgcggtaccgcgcgaactcccatagatctgagcgagccaccctgcgaatcatcccctgacgcaccaaatctggtcagaaacggtgaagagttcggacacgatcttaagcgtcgttgatttaagaccacacacaaacacatctgtttgcccttcccccctatttttttcctgtttcggacgattcataagaacagacctgcaaggtttgcagatctacctgttcaagaaccagggaccttgttttggacgcccagaacgaacccttgaccctgcggatctgctcgatccgttttggatctgcttgc

SEQ ID NO: 198491 - DNA, 844 bp, Zea Mays
cagccactgaagcttttaagcctcttttcttgaacattgggcatgaggattttaagaatactattataccatcatgcataaagatgctgaaaagaaatcctgaaatcgtactacagtctattggatatcttcttaagacagtccatttagacctaagcaagtattccatggagtttatgccagttgttctgcatcaagctcggcattcagatgaagagaggaggattaatgctttgagtattataggaacactaagtgagaagtcaagtgatccagatgctctaccttccatggtcaatgctatcaaagctgttttaggaggtattgcatgtatttttatttcctaatatctatcgacctatcatgttcagtggtgttatcgcttaactcatttttaatgcatgttccagtttgcaattttgtgctgtaattcatatatctcttgacaaacttggtttgggcaggctcagaaggaaaactatcacttctataccagagaattggaatgataaatgctttagagcagctatcaagatctcctccaaagcaaataggcagacttgccccctcagtatcaactttccttctaacgtgttacaaggatgatggtaaagttccattttatgctttttagcctcatctaatgaaattgattcatagtttttctgtattatcttattacaggtatcgaggaagtgaaattggcgattctatcagcaatagggtcctgggctttggtatcagctgaagctgtccaaccagatgttgtttcatttattgctgcaggcttgaaagagaaagacactttaaggaaggggcatctgaaatttttacgagttatatg

SEQ ID NO: 198492 - DNA, 330 bp, Zea Mays
tcaccagaaatcgccacaagagcagacccctgatttgaagtggtggaacctgcagcaatctcgcattacaatctccctatcctcaatttcagagaccattttcatcactgtgtggccgtccccggacacccgcaggttcttgaaaatgtgaaggggtgccgctggtggtgtagctatcaaaccaaatgcgagggctaggcgctcactgtgcattgccagcatagcttctttctggtcttctgccacatcatgaggcacaaagcttgtatcaggacaataaccttcttgctttaacttagctgtcattgccctgagctttgcatatatttg

SEQ ID NO: 198493 - DNA, 409 bp, Zea Mays
gcggggatgtttgcctcccatggcctcaaggaatgtcttgaatatccacttgaatgtttctattgtttcatcagaaatgaatgcacatgcgaacaagcatgtatgtgcatgccctgtaacacccacaaatggagcaaatggcatgttgtacttgttagtcatgtatgtggtgtcgaaactgatgcaatctccatacatctcgtagtatttcaaagatgtcccatctgcccaaaacatgtgcttcacctttttatcttcatcaatgacaattctgtagaagaaatttggatcttccttctgtttttcctgaaaaaactgcagtgcttgtgtcatatcattccctgttacttccttgtttattttagttctgtagttgctaacatcttttttttgtacggcaatgctatca

SEQ ID NO: 198494 - DNA, 567 bp, Zea Mays
ttaggcaggcaggccggccggagcagcgctatagctctataccatggctgacggtcctggaggaggaggagtctgtggcatggggagatcttagctgaagctactggtgcatgagccgccgaacagctttgtcagagactggattttccgaaaaaggggactgaagcttaaaattgcagtgatcggacagaaagattggtagtaaaaggggcctggtgatgctgagacctgaaaggtcagaaaagatttacccaaagcagcaaacttcgggagttgaaacttgcttacaccagaaaggaaggcaggtatttcccggtgttttacgcggcagcagctgctggcgtgttggatcaagcggccgaacggaacgcggcgtggaagaggaaaccgagttggtgactggggagtcgagaacagtcaaggcctagtagagcaagggagaagaggatggctggacgggagcggcgggatctgcgctgccaaatgcacaggggagggaggaggtggtggtggtggtggtgggcgcggaattccggggagaaaggcgcttgtcttctcccgccgcgg

SEQ ID NO: 198495 - DNA, 569 bp, Zea Mays
ttcgttgatatcactttatacttttcagtttgcacaaacccatgtgtcaatgaacataactaagttgctaggttccaggtggcaagagtaaatttttatcctgttaccctgtccagactagcaaccatgtctcctaggtaaaggtaacctaataacatggatctgaacgatggttcatccttttcagtatgtgagtatagatcataaaaatagaaaccacaagcaagatggtgaattcacctgccggccaacatgggcatctaatgcactgagtggatcatcaaatatgtacacatctgaatcagaatacacagctcttgccattgaaactctttgcttctgccctccactaatattaactcctctttcaccaatctctgtcagatcgcctccctgatagaaagcataaccaaatgcattatttgttaatgtacagtagcaagttaaaacagtgcgccagtattaaaaaatacaaaggcatcactggattaaaacattccaaatgaaggaacatgttctccaggaagctctttcttcatcaaatgggtgccatagctttccaaaatttc

SEQ ID NO: 198496 - DNA, 331 bp, Zea Mays
cgaggtcaaaaaaagggttgcaatgatcaacactctcccactacaggggcagaccagccaaaaagggctgcaagcgcctaaatatgggaaggggagagaggctggtcaaacaacttgttgtaacgatccagagcctcctgatcaatgccttcgttctcatcaatcacgtgcaggaccctcatcaccttcttaaatcttgtctgaccatcgctgaaagcagccaggttctcgacgccaattctagcaatacgccggctacagcgtggaggaatagcacatgagtttgcaacccttggtctaacaacctgaggagccggcaagatatgctcta

SEQ ID NO: 198497 - DNA, 522 bp, Zea Mays
ggtgcatatgaaccagttgaagatagaattgtgaatgaatagttaacctgattctgaacctcatgcaaagcatgagcatctttcagagatcgtgatggcgaagttccacccagaggctttagatcttttgttggatcataacactcagcagacgggctagataatgcagaaggatagaccatgttataacccataggggaggaagagttatttgcatttgagttaactctatcttgaccagagcctgcccacattgatttatcactggtagtaactgttgaaagctgaataaaatctttctgctgctttgggagcacttcagtcaacagtagtgagttctcctcactctcaaatgtaagccatactctcaggtcgcgtgggaaaaaacttgcccacttggataactgcaaaagagtaaacgggccctgaacatttccattagggtccttgtagtgccaaaccttttctggctcagtgtcatttgataaaattccaagtgatgcaggctcaggtgccatgttg

SEQ ID NO: 198498 - DNA, 908 bp, Zea Mays
gtgaacttgatgtgtcagttcagactgcttatgtaggaaacagaataatatctcttatctagcaactcgataatccgctggtatggtaagacagcacttgcaaacctatagtcatggacattgttaatggtgatagatgaggaaagtcctactcatagtgtatgtcctacgaagaataatcaagctaatgggatcaagaatctaaacagtacccagatctccagacatatcatttgctatgtattacagctcaaaagttcatttctgaattgtataatcatgtactccttttgacccttcaataatccatattattaattaaataaataaatcaagaattttgctccaatggacaggtaatggaatggaagcatgcatgatccagtaaaaacgagaaagaaaaatacaccatattcacagtgctagcaccgaggataagggattttggcaagggaaaggaagtgaaatatttgttgaggtaatgaatctgatttacaaattttacatcattgatcttgacagcaatggcatctcgtttgtctttcatcggaagatgaaaactcaaacatgaagaaaaacttaccttccagcccaattaggcattgctatatatcaagatagatacttcatacaaggccaattgtagaggagtgattagtttataacaaatcttaaagggcccaacactccgtaacacaagagagatggcaatatattcatagtatgaacaacaaagtacaaaagcaaagtgtgtttgtttatagcaaaaaataccagtacacttgggacacctacagaagcagcaaagcttatcagggaattctcgaacttggcttgatcagaaagatggtacaaattgcatgcaatgataaagaaggtgtattatgaaacccaaagctaagaaacca

SEQ ID NO: 198499 - DNA, 274 bp, Zea Mays
gtggacggtagagaggggtgggaagaagagagtatacccgcatctagagtggtgtggtaagaggcaccagaatcaacaatccagctagtgacagcaggagtcagggccatcgtgctgaaggagctagcgagtaactactgatcccacccaccgcgccaggggttctaggacgaaacaaagtggggtgggagaagcaggagtgacagcagaggtgtcaggggcgcaaaggggagggagccgaggtgataccctggatcaggcattatcagatgag

SEQ ID NO: 198500 - DNA, 479 bp, Zea Mays
actccaaggcttcgaaggagcagttttttgtagccaaagccatcgcaattgtagggcccagttcatcttttggagattaggaattccaaggccccctaaatcaagaggccgagagattttatcccaagctacaaggcaattacctcctctagcctcctttcttcctttccacaagaagttccgttgaattttatcaatggctttgataacccatttaggagcattaagagcaataaataagtaaactgggatggcagagaggacagatttgataagagtgattcttcccgcaagatttaaaagctcagccttccatcctggaagcttggcagcaattttatctatccagtgagcgagatccccagcactaagttttttgctgcttagagggagaccaagataggttgtgggaaaattttttgaggcacaacccaaggtctgaacagccagcgtagtcctctcagtattgcactgaattg

SEQ ID NO: 198501 - DNA, 1525 bp, Zea Mays
ggcaccacgagccactctagagacgcctcctccgtttgttcgagctgcctgggcgggaaagagaaagcgagaccgagaccgcagggattgaaaaaagagggtgcaaaagcaaggctcggattcttgcggggcgagcgactcgtttctcgtctctgcgctgcgagcgaggctcctgctcctcgcggtctcgcttccctccaagttccaatccagcaccgggcgccaccgctaatcaggtacggcggttcttcctgttgcctctgcatctctctcgtggggtgggtccgggggcaatgccgggtgctgttcttgcgccttgtactcgcgtccccgccgatttctgtccaccaacaccaacaggggaaaggggacaggagcagtagcgcttccggacccgttggaagtaaaaaccgaagctttaattttttttgtctggcgttccacgcggttcttgtgacggttgccattccctactggctgggctgtggtcgcaggtattaatgctctccgtttcgctttttcttgcgccgcccccgtttcttgaatcttggctggttgttccttttttttcctgaaattattttttggtggggtaccgggtgggcacagatgctgtcctgcaccctcctcctggcgattttcgttagggttttggtctgcattgtgtctccgatgtgggattttgctgagatttggtgatgggcgaaagctgaagtttttctagccccgcaatctttctccctccgggttttctgcggatttcatctttctgcatgcggagtgtgtttgactgagattttcggtggatttgaaggaagaaatctcagttttttctaaagaaaaccattaatgttgatctccggggaatttgagcctttgtctcatccctccgctacatttttgtaggattctggaggttttaggtgcagcctatttttcgatcctgtccgcgattttttttctatacgaaacgtttttctctgttttccagagcacagagtctgaaatggaagggtggattttttttgtctgacaaacttatcatttgggcattgtaaaagccttgcacaaagaatgtttggccgtacgttttctcggtctctgcagccgtactcaatcactgcctgcatcctaccgatctctgtattttttaacagcagaaaaggaaaaaaaatataatcctgtgtcggtgagggttgccttgtaaacattttggtaattgcatcctcaaaatgtcatgtcctccagtcattattttactgcatgatgtccagcttaatgtacaactctgtagtctctgcaacgtcgcttgtattgagttctctttcaattttcagtgctgatatatgaaccccgcatttggacatttggtggtggcaaggcaacgccaaccttccctgttgctgctttgaatgttctggtggttgtcggatggatcgccgcagttggctctggaagcgcaagtcattggataagagccctggggagagcgatagctctggctctgcttcatcacactctgagc

SEQ ID NO: 198502 - DNA, 613 bp, Zea Mays
tctttccataagtcttgctgtctccgcatccaggcgttgatccttgcatatgagatcttctagcattggcttgacttccaagctaccgttgtctcccagacatgcatgtagctgagatgattccttcttccaatcttctaaaaagttggtcccctttatcacgaaaggtttttggctgagggcgcccgctaccacgttggccttcctggggtggtaatggatctcgaggtcataatccttgatcaattcaagccatcttctttgacggaggttgaggtctggatgagtgaagatgtacctcagactcttgtgatcagtgaagatgtggcatttgttcccaatcagatagtgcctccatatttttagggcgtgtattatggctgccaactccaagtcgtgggtggggtagttctgctcgtgcggcttgagcaagcgggatgcataggcaataactttctcattttgcattaagacacaccctaagccttgccttgaagcatcacagaagatgacgaaatcctgatgtatatctggtagtgtcaatacgggcgcggttgtaagcttctccttgatgatctggaaactttcctcacattttggagtccacacaaac

SEQ ID NO: 198503 - DNA, 386 bp, Zea Mays
ccgcagccagagccaggacacccgaagcccacacctcagcccaacccaacaccggaacccaccaaaccgaagcccacgccgcagcccgagccgaaaccaaagccacagccgcagccgatgccggagccccagcctggccacggcaaacccaagcctaagcccccggcgtactccccgggcacgcccggtccttgatcgtgttcgtatataaacacgcaggccgcatgagcttcgtataaataaataagcgggcgccatgcatgcatgcacacgacacgacgatgctttgtttcttcgtgcaaggtccgatcatgcgtgctcgtgcgtgacactactacctgcgcacgcacgtgtaaggaatgcaatgtttcatcacactactgact

SEQ ID NO: 198504 - DNA, 307 bp, Zea Mays
gacgtcgtgcacggagtaggagacatcaccctagacaccaacgagcggataagggggcccaagaagctggcgctcgagggcatcgacggtcacacattcctgctcccatacgtgggcggctttgtgcgggcgcgctgacgggcgacggcgagggcgactatgacatcgatagtacgtggacgctgagtagtggtgagtgtcgactggtgactgtagacgggaagtgggatgtcgaaccccccgcgaccccaggcagggcgggggtgccaggacacgcactcaggtacgggaagtgcggagccaaaag

SEQ ID NO: 198505 - DNA, 265 bp, Zea Mays
ggcgagtttagggtgggtcctggtggggccagggacgagtctgatatccctccatgggaccgtgactttggggacccaaattgttgcaggttcccggcgatttttgtctcttactcgcgggtgctccacgagccctgaatccctcttaccctagctgtcgcagcctctaacctatcgacttttaacttgcagaggtgcacagactgtagacgatattctcttctcccgctcccatccagggtctcccctctcctaccgcctctcc

SEQ ID NO: 198506 - DNA, 423 bp, Zea Mays
ggaagtcttcaccaggatcgcctccaagcatccgaattcaacagttggtaacaatctgctcggccatctctagaacgtttcctcaagatccacgagaatgtttctgatgctacatcacgcgtgcaggtgtgttctactgcggcgcaccgacgcttgccaaggagctgaaggctctggcgcacgagatgagccacaggacgggcactcgcttccatttccacaaggagtacttctgagtttcgacggatagaatgggcagtcgatgctcgttctaacgtgatctggtcttttctgatctgatctcgatagcgttaggtaccggtaaagaagacagaattttgcacagatgcaagacaaaccaagctgacctctcctcctgatctggaactgtacatagcataaaagaagcaccacagggttagc

SEQ ID NO: 198507 - DNA, 1732 bp, Zea Mays
tttggagtcgggctctaatctgttgatcactggtaatcctctattttatttgctcccattaaaactagacatgtgttagttatttgaacactttctctaaaggaaactgaatcaattactgagtatttgaatgttcaaactgcaatgaaaagagtgagaaaaatcatacaataatattttttatttcctattttgtgctcaaaagtactggtttcttatgatacattgtgttggtggtgatttggtttcctcatccaatagtgtgttcaccttaattacttggaatcagtcttgaaatatgctcttaggcctggaattgcctgatctgttgctacagaaaaagcaatttgcatctgtctaacttcaatgcttatgtattactattcaattttaggcatgaagcagcctctctccatatttgcgggggaaggcttgtctcagtttatcccttcaccatatcccactcatgtgtgggccttcggcattgagtctactcttttttctcccctcttgtttttcctgataacagggcaagagctctgccattcttgcccagcacctgctgcattgctacagtagtatcagagaagaaagcaaaggtcgcatcacctggagaaataactaaagaaaagaagctaacctgtagaaaagggcttgcagcaacaggaggagcaggcaacctgtgttatatattttttctgaatattatttgtgttctttctgcctgtttaagtacccgtagatatcctgttcagcttaaaaagcaattaaaactattaaaccaagtaagtgcaggctgttttcccagatgcattgagcttgcttgctggccagtcttgcataaattttctccataatttgtttggcttatatagcaacaataaacgtctgctaatcttaaaaaaaagaaagctaatcttcttgaatgtgggaaagctctgtcaagtagatgttctttcttgacattttatgtgtatgcctaatgctgatttatatctatgttcttttgctttatggaagttgcagccatgggaattttatgatgtgccttaacttctatttcaggtcccaatggtagtggaaaaagctcccttttccgtgttcttggtggtctgtggccaatggtatctggtcatattgtcaaacctggtgttggttccaatctcaacaaggaaatattttatgtgccccagagaccatatacagctgttggaacgcttcgcgaccagttaatctatccactcacagcagaccaagagactgaaccacttagctatggtggcatggtggatcttctaaagaatgtaatagcaatcatatctatgtagttaataaattagcctttcaaagcattaccatcaacttttcactttgtttttgcaagcaactgaaaagtaataaactaggaaatccttaatgtcgcctgttggttgcaggttgatctggaatacttgctagaacgctatcctcttgataaggaagttaactggggtgacgaattgtctcttggtgagcagcaaagattaggaatggctagactgttctatcataagccaaagtttgctatcctggatgaatgcactagtgctgttacaactgatatggaagagcgcttctgcaaaagggttcgagcaatgggcacatcttgcataacaatatctcaccgtccagcattagttgcgtttcatgaaattgttttatccttagatggtgaaggagggtgggatattca

SEQ ID NO: 198508 - DNA, 302 bp, Zea Mays
ggaggggataagcgagggagctagagcagtatctgccgtaagcatcagccggtcaactggtcgaataacacatgtcgatcgacgtgtgaccatcgggtggatgtggtggtggtcatggtggatggcgaccggccagtaggggcacgtactccatagcacgacgcccgtggggatcggcgagcgcgatatggatggaggggataagcgagggagctagagcagtatctgccttaagcaccagccggtcaactggtcgaataacacatgtcgatcgacgtgtgaccatcgggtggatgtggtgg

SEQ ID NO: 198509 - DNA, 318 bp, Zea Mays
caaagaaccatccacctttcgttggtaggtctagacccacttgccagtcaccagattgccacatgggggacggggcaccaaatcccaagtgtgattagcaagaagagcctggtactcttactccatagcacgatgccagtgaggatcggcaagggcgctatggacagaagacgacgcaggggtgaccgtcagggagaaggtcgcggagaggacaagacgatcgacaaagcaaatgatcactatggcatgttgagtcaccatcgggtgaacatgttgagggtcacggtgaagagaatggtggtacaccgccaactcaac

SEQ ID NO: 198510 - DNA, 451 bp, Zea Mays
ctcttgtgtcgactccgctaatggtcaccgtagccaatggtgaggtccttacatgcacttcagagctggtggaagcagactggactttacagggtgtcccgtttcgcacaacattcaagttactgtccttacctcactatgacgcaatccttggtatggattggctacagcagttcagcccaatgttgatagattggaagaacaaatggctgtctataccatttcaagatcagcttattgtcctgcgtgattgtcagtcattggttcctgctggttcgttgttggaaatccgttccgtgtcctcgacatcgacaccacaacatttattttcagccacgacttctgctgttcctgagccggttcgttccttgctgcaacagtttgatgccttgtttcaacctcctacaacgttgccaccgagccgtgcatgtgatcactccattccattagt

SEQ ID NO: 198511 - DNA, 769 bp, Zea Mays
cgaggtctcacgaaccccaagacagactgggactaaaaactatactcaccatgcgcctccaccattccctcaaggtaatctacgctaacatgcgggtttaaagattgcattcatttcacttactaacaactttcacattgttcttttctgtccaggacaccctagctttcctgtacactccccatccccttcaccagcctcatcgaggggtcctgcgaacgcgaagaaaagtactttcagtgccttgtctctttgcttcacttattgttgtcttttcctcttgtcaatagaaatttacagaactgctggattccacaggaaatcatatttctcctactcttccttcaatccctcccctaccagagccaaaagcaccgtcagcgcatcctatttggacattacctccaccaccacctaattcaggtaaagttttctgtactttttaagataatggaagcataggtacagttttctgtagatgtcctcatttggttgtcaatccaaaacttacatgttcgatctggtaataactgtatggcgtatgatatttgtgcttgcttatatgtttaacctgccaaatgcagattgcaattccttatcatgcccagagcctctaacagatccacctgcgggagcaccatgtgcatgtgtgctaccaatcagagttggaattcgtctaagcgttgacctttactcattttttccattggtctctgattttgctgaagaggtagcttcaggggtaaacatggcacagaggcaggtccgt

SEQ ID NO: 198512 - DNA, 528 bp, Zea Mays
ctcatagaaggttgtggacaagcatgcgatcggaaacgagcttgttgagatcacaaagagaatcttccatgcccttcatttggcggacaatacttagtgatggagaggtcaccgtagatgaaggtccgaaggcaacgtcaaggtagagggcaggaccgcacgagcctcatagttgccaaggaactactcaatagccaccacgctcgtggacgacattctggagctcgacgatgactgtgtcgagtaccaagagaggaccacatgtccacattgtccattcgacactaggatggtatagtggggcacacagtcgtagtgaggacgtggtcgtcgagaacgtagcattgcagggtgagaaagacgaggtcgcgctaacggacttatgcgaaggagtctgggtctaggaggatggggaccagagacaggatgttctaaacacgagtcccatgagcgtggaggttggcgataacaacaacctcgtacaccgatggggtctcaacctcctggtgccctatggagggcctatgg

SEQ ID NO: 198513 - DNA, 332 bp, Zea Mays
gcaaaactatttgattactatgcaacctcacagcttgtgttggcctctttggatggaacagtgaagccaattggccctccagctatatatacatctgttgatccatcaccggatgataaatacataatgctttcttctatccaccgcccatattcctacattgtaccttgtgggaggtttccaaagaaagttgagttgtggactgtagatggaaagtttattagggaactttgtgatttgcccctggctgaggacattccaattacgatgagcagtgtacgcaagggtaagcgctcaattaattggaggccagacaaaccttcgatgctgta

SEQ ID NO: 198514 - DNA, 1335 bp, Zea Mays
attaaatggcacaccgcattcataaaaccacaaagcccattgcatatccacataatccttctcctctttggacttcatcttggctggaattgtgggttgagaacaccctttacgcctttcatcaactacatctttaggtgatttccgaagcatctccacaattgagttttgcttgcttgcttgatttgccttggtcttgattgatgttggagtcttatacagatatgttgcacgtctttgattggctgcagtccctggacttggttgtaccttagagccttgggattctataggcgcatcttgttgaacttgaacagattcagctgttgcatccaccaccattacatcctcctcctcctcttgctgctcattatcatctaggaaaatagctcttttccttctattggatttccaataatccctcatctcctttataattgcagtagtggtctttgaacatatctttgtatcttcatagccaccttctagatgctgctttagcctttttatccctctagaaactgtggtgtcacaaaggttgcatgtcacttgatccctatttttcaaatttgcccaataaccatacttccaacctgaatcatttgagctagccttccttgttttttctgtctttggatcatagttgccattgttgccagaagatgggctagccattaattgattttagttagtgctgctgctgcataaaaaataggagggtgatccaaagcacatgaggcagtaaggcaagcactaaggcagtaaggcagggacgcagggtgatccaaatcacatgaggcaggcagacaggcagcagcagcagcatgaaaaatgggactacacaccagggcagtaaggcactaaggcaggcagcagcagacaggcagcaccgcagcagtaagacacacgagggcagcaaagcactatatatcaactcaagcacgagcacactggagtgaccatcaacacctaacagactagcacaaataactagctcaagcacgagcacaagtcaaagtccaagaggcaagcacaagcaagcaggcagtatatccaagagattcagaacagagagaacagaggaagaaggtgcaagaagagtagctttgatccgatgggaaggacgctagcagggaggccgaaggtgtggatcgatgggcggggatccaatcggaggggcgaatccgctccaatcgaagggcaaatcggcgggtggaactccaatcggaggggcgaatggaggctgacggtcggatggaggcggacgaccgcgcggactgtagctgctagcgccgccctcttttgtcttctcttcctctcttccctctctttccc

SEQ ID NO: 198515 - DNA, 561 bp, Zea Mays
aaccagtgagattcttgagactgttcttagcaacaaggtgatggacagagaaacacctgtgggatctgaagatgtgcttagttcaccaacctgtacacaaccttgtttgcaaaatgaccaaagtaaaagtgtagttacctttgcagcttctgttgaagcctgcattggtgcaaagcaggaaagcataaaacttgccaattccccaatgcatgacaccaagagtgcatattcatcctcggtaggaccttttctttgttctcatgaagttgtttatttttataatatgtacgattttgcagttgcaatctgtttaggttgatggaattttttatcccttccactctaatggttgtagtaatgttatactgtccattctagtgtccaacagggcgcatctcattcaagttgtatgattggaatcctgcagaatttcctcgacgactacgacaccaggtatagtcttgctctaagttcatttaacatagaaccatattattttaaagggatgctatatgtgaatgtgcagatcttcgaatggttgggtagcatgcctgttgaatt

SEQ ID NO: 198516 - DNA, 1395 bp, Zea Mays
ggaggtagaagagggagagtaaagtagcgcgccgcagccgcagcggaggaaaggcaagggcggcgagggaacacgcggttgcttgcggaaacccgctcgactcggtctctccgcccgcgagttgggttgatcggagggtttgatgacgggggcgcgggagccggtggccatggagataccagcggaggaagggccagcggcggcgagggcgccgccgcggcggattaggaggaggctggtggagggggcgcgcggcggtggggcgccggcgagcgtggaggagatcgaggccaggcttagggaggccgagctccggaggcaggtacgtgtccctttcgtcctgtttccttcttcccgccgcgtgctagtttggtttacgttgcttcttgcttgctcgtagttgccagttgggttgcttcggcgtgaactgtgaagtcgaaataattcgtagcggtcacgataattacttgatcgctttttactggtgcggtgaggcgaggccagggtagttgttctccgcccgtttctgaagctgttctttttttttttctggatttctcctgcgatttcattggccattaattccaaattggagttccttttggcgagacaaaacctgttttactcttttcatgtgcgaatttgttggcaagtaagggtgtaggaacgaggaattgggaggtgcagactgcagagtgtgtggattgtggaaggtttgggaaaattggatgagcaccgttaaaggatctctggtttagaaaatactactgaaagatttagttgtagaaaactagcacctgaaggttgctccgttgtttcgttttaccatccacgttgacttgtccggaaaaaaattggttggagcaacacaagcaccgaccgcgtggattggcttagaagtaacttgacacacatgtacctctgcaaaatttggtgaccaaaaacatggttggagctttttgttgcttaatgtgaattgtgatttgctagtcgatgttttgttaaatttgctctaaaccgtttaatgaggagtctcttgatgggtctctaggggcctaagttaaaaaaattaagcccgtctcttcacggactttcgtagtctttcgtagtccgatggttcttgtcgtagtccaatggttcttgagagttgtcgtgtttactgtttgtttgattcattttgggagtaaagtgtcataggaaacaactattggagtcgaattggactgattgcagtataggataacttgttgacttttcgaatgttgtttttcagcaattccgtgaatggttggcctgcaaagcaaggaagaagccacggagcccgtcgtggtcctctcaagaagaagaccatgggcagcgccttgaagcgaagcttctggctgctgagcataaaag

SEQ ID NO: 198517 - DNA, 349 bp, Zea Mays
gggaatcaatgaatgccttttctgcttcagcttgcccgcgtggggtgctgtgctgtgctgcacagagagagaggcgacagtaggcgtggcttgcatgtgagtccaaagccagcctccaagttccggtatagtaaaggatgtttagcggaaaactctgcatcataactagtacaaagcgccttgtgtgttgtgtgtccaaaactaaaaatgtctttttttttctttctttctttcttttccctccatacacttttgggcatgggatgggagagtgaaagtgctggtgagtgactgagtggtgacatagttttttttgggaaggtgataaaaaaagagagagaagaaagta

SEQ ID NO: 198518 - DNA, 749 bp, Zea Mays
gacaggatgcctaccaagaacagcagggaacataagtcgctccaatctgaggatgcattggtgagccaatactttcaagaatcctcctctcctaagatggcaaaatcaccatcactacaaaggacacatggtatgcttcaattttggcgatcagatgccaacagaaactctcatgattcaccaaaggatctaagtccaccttctgaacaaactatggacaatggaatacctatggttgcaattgaaactgaaaggacaccgtccattaagagacagaatagttttgaaatgaaattacctgatcttcctaaagttgatgtacatcctatacagcggcagtcatctaagaattcagaacctgactcacccatatctcctcttttgacttctgatcctaagaacgagcggtcacattcacaaacttttagcagaccgcagagtgaacaagatgatacgagttctgaacgtagtgaactggatgaggttcagcaccagaaacctccatctttttggcgtcttgcaacacttagtatcgctgaatggccttatgctcttttaggtacaattggtgctgctatatttggctcatttaatccactgcttgcttacacaatagcacttatagtgtcagcatactatcagatagaaatccgtgatatgcgccatgaagtgaacagatggtgtttattcatagtgggcatgggtgttattacagtgctagtcaactggctgcaacatttctattttgg

SEQ ID NO: 198519 - DNA, 223 bp, Zea Mays
gtcctttaccgttttgctgttgagctcacggtagtcgatgcagaatcgccatgatccatccgattttcggaccaggagaaccggggaggagtatgccgatgagcattcccggatgatgccttgctgcagcatagcctcgcattgtttctcgatctcatccttcagcagctgcgggtaacgatatggtttgaccacaactggtgttgtacctggcagaagtgtg

SEQ ID NO: 198520 - DNA, 306 bp, Zea Mays
gcttctttggtataatgattgtctatcagttactaaacctggatgatctcgagaagaaccacaatagccagttcaaagccgagggccatgtatttggaggcttcatttctgtctggtcgctgttgccgtgtttggttgatacgttactgggtggttttaggtcctcgatgtctgatccctgggtgatcagaatcagggagtttagactgtcttcagtagagtgtgtaaaatatgggacgtggaactgtagatgacactgtttgcagagagaagtgtgaaataggggatgcgatatgggatctgctg

SEQ ID NO: 198521 - DNA, 272 bp, Zea Mays
gctgtatctcgctgtcggtgacccccacgctcggattcacgccggcgctgtgattcgcgcccattaacccgcggataatgaccctctagtgaaaacatctcgccgtggatgaagtcaaagcactgtggctgctctgtcgcccatccacttgtgccacaacgtggccgaatgggcaccgccggtgtgaccgccatttaccgtaatccgccacgctactgaccctgttacctcatcgcaaggtgtcgtgtgaattggtcagtcatcgtctcagg

SEQ ID NO: 198522 - DNA, 482 bp, Zea Mays
cacggcgaaaatcgaaatccggcgacgaatttcagacaccaccacgatcgccacctccccggacggccacgaaaccttcaccagacaccccgcaaagctcccggacacgactcatgtgcctggtcctttggcgaagatggtaatggcgctggcgcacgattcctggtcgcagttcaagcctaagcctcctgttcttgtcgcgattgctagattaaagggggcaatgggtgcagaggtttgtggggtcatgtcttataggctaacggctcgaaccggcgagaaacctaggcgtggggcgagttcaccggagattacggaggtcgcgtagcgaattctgttggcgtgggagcgattgatctgacggcttggtcccatcggtcacggaaggagcgatgaatgcgggtgcaagagggaatagcgggcaacggctgacagttgggccccgcgcgtaagtgagtccgggcgggcgtggtgacgttggg

SEQ ID NO: 198523 - DNA, 537 bp, Zea Mays
ctactatctcgcatctttgtttaggtctccacccagttcatttgccttgtccgtgctctccagtgcaacaatggtatcgagtacgaccagtcctcccgcaccttcttcctttctcacggtgttcggataccggtctcgtgcccctacacctcccctcagaatggtcaggtcgaacgcatgattcgcactaccaccaacatgttgtgttgcctcctcttccaggtgtttctttctgccatttactaggtggaggccctgaatactgccacctacattctcaactgcctccccttcaagacgatcagtcatctcactcctttcttcaccctctttggcaccgtcccctcctatacgcacctccgcgtctttggtcgtgcctgctatcccaacacctccaccgttgcctccccataaacttgtgtctgctccactcgctttttcctcagttactcttctcatcacagagggtattgatgccttgatcttctcacccactgatcatctcttgacatatcgctttcgatgaggatgtcttcc

SEQ ID NO: 198524 - DNA, 490 bp, Zea Mays
cgcagctcaaggtcttccaaacaaggcagctccacaagcccatctagatgcttcaagttagggaaatcagatagcttcaccaccctcagaaatgggaagtgaacaagctcttgtggtcctcttctgccactcacttgattctgcatccagcatgcgtgttggcttccagaatacccattaattttcaactctttaatctgtgacggtggctctagaccatcaagtacagcctgctccaactcagtgtccacctcacctgcctcaagtggcatccactcagagtccaagtccacctcacctgcttcaagtgccatcctttccaggtccaggtccacctcacctgcatcgtgtgccatccgttccaagtccatgttcgcctcacctgcctcatgtgccatccattccaggtccacctcacatgccttatgtgccatccattctaggtccaagctctgtaagcttgttttttgttgcaagcatgccatctgtg

SEQ ID NO: 198525 - DNA, 205 bp, Zea Mays
tcgcgcccggccaacgcatgccgcgagtctgggcgggtaggacgcggcaaccaatcatgcgaaagatgacttgaatgtgagtgaagatgatgatatatccggtgggagagaacgcgaagaagacagtaatcctcccatttttgatgagtttgatgatgtatcagaacttgagagatgagagtatcagaacctacttatgttggac

SEQ ID NO: 198526 - DNA, 456 bp, Zea Mays
ctcttactggtgtttctttggtcgttacgtgccttagtcaagtcaattgcaatatctgcaaagctcagctgtgcaaattttgtttgataccttttatttggatcctatatatgattccctaattatgtgattccagagcctgaggccgagctgtgcccattgtggattaagaagttcaatagagaactaatgcgaacactctcattttcggagcatgaaacgtttgaccatcccgtggcatgtgagatttgatacttcctgttcttagctggctattctgtttgcagaatatgttcttgcttatgctttaagctattattaacaggtcttctagttgtgtcatcaatggacaaagaaccagtcaataaatttgttgatctcttcaacacaaatcagttgccatctcttttgaatgaaggcataatggatccacagattttgaagcattatcttgta

SEQ ID NO: 198527 - DNA, 346 bp, Zea Mays
ggaaggtgagacatcggcacttggttgcattgcttggatactgcacccatggcaatgagaggctcttggtctatgaatatatgtcaggaggaacactgcgccagcacttgtgtgatcttcagcagagtggttatactcctcttacatggacacagaggatgacaatagctttggatgttgcccgggggatagaatatttgcatggtttggcgcaggagactttcattcatagggatctgaagccttccaacatattgcttgatcaagatttaagagccaaggtttcggactttggattggtcaagcttgcgaaagatacagataagtccatgatgacaagagtagc

SEQ ID NO: 198528 - DNA, 200 bp, Zea Mays
gtaagataagataccgaagtccattcttcaattgaccacgaattagcttcggatgctcaggaagcggagtgttgagaacatcttcaagctcctccttactaatagcatgatccatgtcacgtgtatcaagggaagtatcagaccatgttggacttgcaacatgtggttcatcaggtccagcggcgtgcaatatatggcta

SEQ ID NO: 198529 - DNA, 358 bp, Zea Mays
ctctatatagccaccctctagggttggccctgttaatccaatgattattctcttaacagttggaaggcggttcagcaggtaggtggtagtgtggaggcccttagcctaatgacaagcaggaagggaagcctggaacaacagagaacaaatgatattgttggtggtgtgaatcgtgtgctcagccttgccattatgagggaaggtgtaagggcaactacattttaagagagaggaagaaggctcgaggagagttatcgaactgtcacgtgttgtcactggacactattgatgatgcacccaaactgagtggacacccaagtgaagaagcgagagagtgggaaatgtgtcagacttcaag

SEQ ID NO: 198530 - DNA, 858 bp, Zea Mays
attcttagacatgtcgccggcgaggacctaccgctggtacgtaatacttggtgacttgctggtgcattcagtttttctccatgcaaatagtggttcatcctctttgtgatataagcagtgaagactggaataaaccctgtgtgatacttgcttgctcctagtcatagatattattttcaatcaaaactatatagaggttattcagctactctggaattgcttgagcctcggttagagcacaaaagagacaattcctagttagatgaatgcataggagcacatgattagatgatgatccagatttaactgaccagatccttttcaaactgtatttctctgatgtaaggaatggagccgatcaataacagtaacccgtttcgttttgccgttgcagtgccatccagatggataacaccagaatccatcgtcgagaccaaaccatagtaatcgtggctatcgttttcctggagctcatcgctataggggccgtacgtgggctttctgtacggcatcgagttcgccgtagagaaagctcgcgataaggttcacgcgatgtcgggtgaccagaagacgaaggagatcatgcacagtatttatagcattggggttggttatattggtcacttgattgcctcgccggtgatgtttgtgatgaaaacacagggtggaggaaggtgcgctccattggcaagagcgtcagtgcaagcctcggagttgccaaggtggtggaaggaggcgtggaagtgaaacaagcagagcctgtctggatgaaaggcattctgatttggtgcccgtgacaacattgctcgagttcttttgtcttagtgattaagatgctttgttcaagaaaactgagag

SEQ ID NO: 198531 - DNA, 425 bp, Zea Mays
gggatcaacaaagcgagtcgaaggtggtcggagaggtagggtcgcgcgtggcatggacgaaggtgacggggccttgtgtggcggaggtggaggcgacgaggtcgcgcgtggcacaggtggaggcgacagggccacgcatggcgcagtcgaaggcaaaggggccacgcacggtgcagaagagatcgtcggggcctagggtagaggaagaggtactttgacaggatcgacatcaaggagacgcaggaggtggtgaggatctagcaaggggaaaacatcctcatcgaaaacaacatgttgagagatgatgatgctgtgggtgagaaggtcgaggcactaatgccccttgtggtcaaaggagtccccgaggaaaaggcagcgagtggattagggtggaagtttgtggggagtggtgatggaggtgttag

SEQ ID NO: 198532 - DNA, 429 bp, Zea Mays
cttatttatttgctttggtgatggatgaggtcacaagaaacatacaaggggatatcctttggtgtggtgttagttgatgagagtagggaaggtgttaataggaaactagagttgtggaagcacatgttggagtcaaaaggtttcagacttagtaggactaagatcgagaacatgatgtacaatttcagcgcgactagacatgagaatggagatgttaccctcaatggaaaacttgtggctaaggagtcttttcgataggatcgatgcttcaaaaggatggtgattggtgacattcatgaagatgttatgcatagaatttcagccgtttagttgaaatggtgtcatgcttctagcgtcctctgtgacaagagggtgccacaaaagcttaaaggtaagttctataggacggcgatgttatacagtgctgaa

SEQ ID NO: 198533 - DNA, 429 bp, Zea Mays
acttttgagtcttcagattcaaaagagttccccatatcagagttccttaccttttgtacacatggaccttccaaacctcaggtccttatgaggcgtcgttcattttatatttaagccgtatggattttacaagaatggaggggattgagggttttgacgggacttaatctctctcaattttcatagatttggggtatagaggacttaatctctctcaatctacatagatttggacaaatcggcctaacatgtgcttccatccatcgatgacacgacagaacgaacgaaaaaaaatatctccccacctaagaaaaaacaaatgtttcagattagttattgactatcttgagcatgagtagttctactttgagcagttatgtcagcttgctcgcacagagcagaccatcgtaattaaaccaagacaatgac

SEQ ID NO: 198534 - DNA, 870 bp, Zea Mays
cttcaggttgctccattacattatcctcctgtacaacaacagatacttcccctgcctccatcttattgctttcttcctcactttttttggtatcaatattgccatcatgtaatttgacttcaagacgagtaactttgtctactgtatcgcaattctcctgtgggctactaagttcttttgggacattgtattcttgagcaatcttgtcctcaacttcagttatattatcggaactagctagcatggattctgctggttgtgactgagaggcattcccatcagatgtgtcttcctttcctgtatcaatagattcacctgtttcggtgtcacctgatttatctattttgataggcgaagaaaatgcactaccatcaggtaagtctccagcagactctctaagctgatttggctctgcttcatcactaggacaagaatgtttactatattgatggtcctggttttcttcaactgttgaaggatgtcctggagattgtgatgtttctgatgcttcatcatcacccaccttagatgcaagtgcctcagtgcagccatcaagcttttcttctgctactgaaggatgtgctggagtttgtggtgttatggactgctcagaaacatctgccttagaaacaggtgactcattggagatactatgagcttcttctgattttgaaggctgttctggaaatgttgttactgatacttctgaatgatctacctcggatgtctgtttcttagttggggtgctatgattttcttcctctactgacagatcctttggaaattgtggcttttctgatacttcagtgccatcttcttcaccattgtgtcccatgaaagccatgacaggattgaagaatcctattccat

SEQ ID NO: 198535 - DNA, 207 bp, Zea Mays
tggatctcgaggtcataatccttgatcagttcaagccatcttctctgacggaggttgaggtctggctgagtgaagatatacctcagactcttgtgatcagtgaagatgtggcatttgttcccaatcagatagtgcctccatatttttagggcgtgcactatggctgccaactccaagtcgtgggtggggtaattctgctcatgcggc

SEQ ID NO: 198536 - DNA, 473 bp, Zea Mays
tggaattattgtgaaagcttttctagaggtatgctacatgcttctaattaacatatgtttctctgtgctcgaagatgaaggtcatcatgatttatgggcttgtttttgtttttgttcctggattgtctaatattcataacgacttttgtttacttcagcgcctagattggagttctagctcctctgcatcttcacggaaggactgcattcttcttgctgcctgtgaggcacatcaaactcttcctcagagtgcagaatttcctgccgatgtgtttacagcttgcctcacaacacccatcaaaatggctttgcactggttctctttctctcccctctctcttctctgtttgtgcatgcatatttgtgtggacagttccttatttcttatgctcctttttcttagcatgatgtgcttacatggggacatacctataaaccatgcaggttttgtaagcgatcattactccgtggtt

SEQ ID NO: 198537 - DNA, 624 bp, Zea Mays
gtgaaatggactgctgacgaagggcgatgatgctcaaccttttcggagtcgcacgccattgagcaaccaaggcagctgcgtgtctggtagcctatttaataatccctttttgtttgtggttctgcctaggatggtcacctggatggatatatgacaaccaggacagttccactcacaataggatgagtagattgggcagaaagagaagggagggcctgatttctatgattgagcaaaggagatgctgagctgagcccctttcgtatggtttatgcagcggtgctttatggctctgttttttgtttcataccgcgcttgagtggctaagattgttctgctttccattacagagcttctgcactctaccatcttctgagctgatgatacctgggatattctttgacgtttgctgctttactacgatggcccatgccttactagaaggtgattctatatctgtttgctgctttaactaggatgccttgcaccttagagcatctctagcagtcaccaaaagaaaagacaggttgtgcatccttgacaacaaattcacctccccatgatagggagtagcggtcatccgtgtatctctgcgtgttttttccaagcgttgatagattcggg

SEQ ID NO: 198538 - DNA, 208 bp, Zea Mays
tcgatgtcatggttggggagcacgatggtggagagtgcgcataggttgaccggggacgatgcacagttagtcggagaaggcgataatagaggccgatgtcatggtcggggacggtggagagtgcacgtaggtcgatggacaccgagtcaccgatgcttcgacgagaaaaagagagtgaaaatgagtagaggggaaggtggtttccatg

SEQ ID NO: 198539 - DNA, 444 bp, Zea Mays
tggaaagggctatttccacaggaaattgggatattaaacgttttaggatgcataggaaaggtgtatctcaggtaccaagttctccatacctttgatttttatttatccccccagttgttttttaatataacctcttattcttctgatgaaaggttctttcgaggctatcctacatggcatctttaggctatatgacgcggataacaccccaatttgagaagactcgtaaaacaagtggtccacgtgctttgcagcctagtcaggtgaagagaaattttacaatgttgctacatcatatggaggaaaaaatatcatgtaaaccaagaatgttaaaacccatatgttcttcctatactgtgtaataatgtactaattttatctgtaacagtggggtatgctctgcccatgtgatactcctgaaggagaagcttgtggattgacaaa

SEQ ID NO: 198540 - DNA, 381 bp, Zea Mays
cctgtttttaggtgaatcctgtgatcacagtggcgggctgggggaaatccttgtggttcttgaaacactgattcaaatgactgcaatagttgctccatcatctgagggtctgccatatgtagtgaacgagtggctggttcatggatgtcattgcgtggtgacccaagtcccttccaaaagacccgccgacccccacgccagaatgccatacagaggtcgtcaaagtcccataagattggacccagcgtacggaggaaattaacccctggaatgacatcgaaactgtccaatggaatggcgtagcagggtattgcgaaatgctcgtggccgatgacgactggaatgccctctgtgaatcccttgcaggccactctttcgcca

SEQ ID NO: 198541 - DNA, 462 bp, Zea Mays
gccattaactgtcgtggacggccttttccctcctctctcccatgtgccgaccgtttcttccaccgtgctccatctccattaatgaccgtgactgtttcttcgagcaggtaacgctgtccttcaatccacatcaatggagtattgaatttggccgcaaaccactctactccctcgcctataaaactcgcgccgttcttctcttccccacgttctggacgccgctagctccactaccactcgtcgccacgttctacttgcttgctgctcaaactcaccacggcgccagcttgcgtcgtgcttcgatttggacgttccccggctgttctttgccacgcggcgagtgcctctcggcctcccgtgctcgtgttataaacctgtccaagacgaactccctttctccacagctagcgcagcttcacgctcttagtctgtcgcctcaccagttcactgcgtcgatccctt

SEQ ID NO: 198542 - DNA, 771 bp, Zea Mays
cttctagcgatgctcctcttgttgcctttgggtcatctgatggtgtcatcagggtcctttcgatgttgacatggaaggttaaatataccctaccctacacccttttcttcattactggtgtgctgcaagtttaaactgagtcatttgatccttgcagcttgtgcgtaggtatacgggtggacataaaggagcaatagcttgcttaatgacgtacatgtctgcagctggtgaggtaaacttttgcataaatatgtcttgtctttgactctggttgcttcattgtggtagttacaattatgttccttttgttgtgttcatatgttgtaattttctattctcatgtttcatttcttaacaatcaattgttgttaattcttctgattttcatttcttcagatattactgtcatatcttccaattaacaatgcattctcttcaggtacatttagtttctggtggcagcgatggcctgctgatattatggagtgctgatcatatccatgactcacgtgagcttgtgcctaaaattagtatgaaggtactggcatactgactttgattcactgattatttatgtatcaagaaaaaataaaatggtacaaaatgtttgtaaataacttgtaaaaacattacttagcatgcaggttgcttaataatgtttttttgggtgttttctgaaggcccatgatggaggtgttgttgcagttgaactttctagggtgatggggagtgctccgcagctcattacaataggggctgataaaactttag

SEQ ID NO: 198543 - DNA, 292 bp, Zea Mays
cactaatgcaccgccttttccaagccatcatcgaactttcccaacccccaagctaggttcgtggtgtcacgtcattgtcacgggctcataccttcggcccgagcctcacccaatcgcaagtatgctcgcacgtcgactatcctccgacacagagtcgaagtggggccgtcacaaccctcccctcttgattgtcgcagcccctcaacggatccccatagcttgcccacgatctgacggcctagagcaccaaatgtcgcttcacctcccaccgtctagtcttaactaatggtgc

SEQ ID NO: 198544 - DNA, 423 bp, Zea Mays
caagctcctctttcaaaggaatcctatttttatttgatgaaaatatcaatcccattgcattatgggctgcatttgcaccctcgttcccgacttcaccactatgcatggctttctccttggacttgctttcattcacagccgatccctcactttctgacaacccagcaggagatgagatgttatccattttggttgttgatgtgttctttgtcagcaagacactgccagactctataggtgccgatctagtggcagtgtcaagtggtgatccttcagataacgcttcatcaaaatttgacactggagaaacaacatttgctcttcttgtccttgacatcttctgtgggcgttgcccaacccaggcaataggaggtgaggaagcatttgaatgtgtggaacgtttgcgatttgtcatgcctccca

SEQ ID NO: 198545 - DNA, 695 bp, Zea Mays
gtttcaggcacatggtgatcgctatttgcgtgatttaactcaatatgcaattggagttcttcacatcataacacttatgccacaaccacatgtccgcaaatcaatagtgcagggaacattaagcaacaatcgtgctggtatggctgtcttattagacacggtgaaaagttttgactacattgatcatgaggtacggtctcactttgaaaatatgaatgaattaaataacctttgcaattctctgatggtttctgaagtgttatttcaaatatcagctcttattgttactcagtgaacttcacaaatctgcttacacttttgagctacaaacctacatcattctgtgcccatttcacaaacccaccaggccaccattacttgggctacattctcacaatagtaaaacttcgtgatagttttcatttcatggtcagctgggcccacttgtaagcggcatgctcttggccagatgagcccatgtcaaatttgatgagctgtggctgatgtgggcccaattggtcatgaatggtcacaagtttgtagttttgtgagaagactgctcaagtattggcagttttgcacaaaatatggtgtgtctgactattaacccaagatattggtgaggttgtgaaaaatctgctttcactgtttttgtgaatcaggtgatctgtccagcactgaatgtcctcgtcaat

SEQ ID NO: 198546 - DNA, 720 bp, Zea Mays
aaaaagcctttttcttttcttttcttttcttatgtttctttaacctatggtctaccttttgtttggtaaatagtgcccactgatgactctgctctgctgctgagctcttcctcctgcccctgcccctgcccctcccccctcctagtgctatgtataaaggaagcaaagcaatccatggagacccaaccatcaatcccatttccctcccatctaggcagtcagcaggcagtaggcagtaggctgcatctcaatctccatctacacgactgcactcctgctcctactcctacaggaaacacacaagaaaagaaaagaaaagatgatggaggtggagaggccgatgtgggagctcaaggaggaggaggaggagccgccgcagctgctcatggaggccgaggaggatgactatgaggaggaggaagacacctccgccctcctatacactagggagagagagagcatgaggaagaagatgacgacaacgatggcggacctggacctggagatggagtcctccgactccgactccaacgcagcagcatcagcagcagtagaggaggaggcggcggcggcggcccagcagagcatcttcttggatccaacacaaggtatggtctgctcactcacagtactctctatccataatccatcccttcatttgtcctctcagttgttacttgcagtctctgcccatgtcctctcctcttgtttcctttcttt

SEQ ID NO: 198547 - DNA, 376 bp, Zea Mays
ccaagacagtgaaactccttcgcacatcatcttccactgcccgtttgcacgccaattttggagctccatcggattctctgtcgctgatgatctgggcacccaggacctaccaaacatcagtcgccctgatcgccttccgggtgcagaattcaactcctttgtcctcctctgctgctggcaattgtggaaacgcagaaatggtgtcgtcttccgtcaggatcatgccactcttgcggccactttgcattcagcgcttctgaagcaaaagcttgggcgtacaggcacaacaggaaagaggcacaagtattaggtgcttggttgttggtgttttctaatcctattatgtaatctcatcattgtttcgcccctgtaacta

SEQ ID NO: 198548 - DNA, 402 bp, Zea Mays
aaccctacccccctccgcctcctcgccggcgcgctctaccccgcctcactccccatcagtgtctctcatcggcggctctccggtgcatgcccctcgccctccctctcacctatacacgcctccttccacttattgcgcgtcaatttcaccttctgctctcggtctcttcgccttagggcttcacgttggtccggggtacctctcgtgcgatccgcgcgcaatggagcaagatcaaagcccagccgtcgacagcgcggattctggcgccgcggcttttgattttgcgactggcaatgcacctagctcggctgtgaccagcggaagcgccgtggcccctgacggtggggctcaggcagctgatacttctgcctaccaggccgagcacacggagttgaatgggac

SEQ ID NO: 198549 - DNA, 412 bp, Zea Mays
ctcattcgcagccctctcttgttcaactgctaatgctaatctaaacctctcgtcttttttcatttctttaaattcatctgtttctttcttcttttcaaataatttgtttaaagtttctgtgtagcctttcttttcagcttgaaatgctgctgctttggccttcttctttccaggtggtcttgttgtgacagtctcatttggagttgtaggctcgcttgtttcggtggcacttggtaaatgtggaggtgaggtttcatttgagttcatcttttgcttcttattagatgacttgccaacagccaattcttcaagtttcatctcccatttacgctgtgtccgcaacttattccaacaatgcatatatggaaaagctttatgttgcttatcttcagacttatataaagcacacgcc

SEQ ID NO: 198550 - DNA, 541 bp, Zea Mays
gtgttgtgatgttttagatctgtcaaattcatagctttataagtactacagatggtaaaaaaatattatacaggaaaacaatatggaaaataatagcatggttgaatgtactgtagaaacaaatggagaaaacctttctaaacatgaaacttggtcaaatttatagctttgtaaatggtacagatggtaaaaaagactataaaaaaacaatctggaaaataatattacctccgttttcgaatattttgtcgtgtgctaaactaaaacgtgataaataaaaaatacggagggagtaggaagtagcatggttgaatgtattgtacacacaaatggagaaaacctttctaaacatgaaacttggaaagcaggggaaatttcagtgtgatggtatatctcaagtaacctgaagttaaaatagttaactaacgatttgttaaactgctccacagcagaagtaaaaagacagaacactatgtttcaaaaagaatagacagaacactaaattcaataacacgacagtttgtacctgctaactgctgag

SEQ ID NO: 198551 - DNA, 344 bp, Zea Mays
aggctggattcaagaggtcatcgagttcgtagtctcaagcagctgaggttatcacatgctcttgaggtaatctttatccaccctcctttcctctcttatgtttcctagttctttctgctttgtggtctttggttataactgaacaacacatggctgctgattttaccttgcaaagtcgcaaagcctaggaagtcctatgcatgaagccatgaagtagagaaccagaacctgcataagttgccaatgtgcaataacctggaatgtctactgactagcattttatttctagtttgtgtatctgagggacaaccttttatcaagtttggagggcattgagattctca

SEQ ID NO: 198552 - DNA, 539 bp, Zea Mays
tgctgaatattggtacaacaccagctttcattcggcttttggatgttcaccctttgaagctcagctctgtatggccgtcaacctcgctcactaggcatcacactcgatgacgctgctccgtccctgttgtctgaatggctgcaagagcgttcatccatacaggagctgattcaccagcatttagtccgtgtccaagctcgtatgaaacgacattgctgatcaacacaggtctgagcgttccttccaagtcggagactgggtctatatgaagctacaaccatacgtccagtcgtcggttatgcctcgctcccatcagaaattgagcttcaaatactttggcccctatcaagtcgctgctcgggtgggggaagttgcttaccgtctgcagttgccgtcttcttcacgcatccaccccgtgattcatgtgtcacagctgaagcttgttgctggtttcaaaggagttgcatcttcttccttaactgcttcacttcccgatttcaatgttccagtgcaggtccttcagacatgcggcgtcacca

SEQ ID NO: 198553 - DNA, 371 bp, Zea Mays
aattctcctgtcattcggtgttgttggcataggtgtgatgaattgttgttcagtgtgaacaattccatcacttgtgaccacgttggtgtgaaggatttgtggtctcgccttgaagccatgaatgatagacaatcagggaatgaattccctagtcaagttgccacgacacatggatgggatccgaagatccttgaagcatctatttgtccacctcggttggtagtcaaggattgtagttggcaggccacttccgatgggttctatttcatattgaggtcagttggagtcactagtttccatctcggcattgtgttggtcgaagagccaggtaaggtggtgtttggtcttttggtcatgtaaggtcattgttt

SEQ ID NO: 198554 - DNA, 425 bp, Zea Mays
cccgagtggatcggacaccggtgctacctaccacaccactcccaaccccggtatactcacctttgttcgccctccttcctctcttccttcgtccatcatggtggcgaatggctcgtgtcttcctgtcacatctgtgggtgccgccggccctcccggctcttttcgtattcccgatgttcttgtcgctccttctttggtccacaatcttctttctattcgccgttttaccgctgataattcttgttctgtcgagtttgactcttctggtcttactgtgaaggactcggcaactcggcgccccctcctccaatgtgacagcaccggccccctctacacccttcgacttccgcatgccacctcttcttcgtcttcgtcacctgccattgctgctgtttttgctgccaccacgtcttctaccacctggc

SEQ ID NO: 198555 - DNA, 310 bp, Zea Mays
atgatacaactctgagcccctaaatcataaattgttgaattgttggatacttggtgcggaacgactcaacatcttccgaggtggccaatgcagcggagtggcccttccagtggaccaggacctgctcgtcgccacgagcgacgcgccgacggacaccggtggaagtggcgggggaccctctggcggagcgccatggaacttttttaggaggcccacatggaacacgtcgtgtaggcgagcctgaggtgggagagcgaggcgaaagaccacctcgttgatcatctcggtgatgcggtagggaccgaagtag

SEQ ID NO: 198556 - DNA, 496 bp, Zea Mays
gggaactgttgcaaagacttgtggtgcaaggtcagcaattctctgaccctgaatccatctatccgaccaaaacagggttgctgccccattgcccacctctgaaaccactgctatggagaagaaagcttgtgcacatttatgtacaggtatatgaaaacgagaccagcgaaaattaggatctgttttcttcaaccaaagtcacctctcctaagagccgaactaagattttgaagattggagatccgcaggccacctaattctttagggaggcacaatttagtccatgccacaagacaatggccaccttttgcatctgtctttccttgccagaggaaacctctccttattttgccatttgccttaatggtccatgaagggaggtcgatggccattaccaaatacaccagcatcagggttaacacatgttgcactaaaatcatgtggccttccttagttagtaggtcaggccttccaacctgacagccgcccagccaag

SEQ ID NO: 198557 - DNA, 448 bp, Zea Mays
ctaaggtcggattggtgtctggaagacctgagcccccttaagatgcaaattctttgtatagttggcaatcaaaaacagggtttgggcagctgatcgactggcaaaaagaggtctgccccatccagttgtttgccctctgtgtgatcaggccgaggaaaccatccagcatattcttgtctcctgcgtgttcgctcggcagatatggacgtccatactacacaatttaggtctcctagccattgttcctcagcatggatgcactcgtttctcaaattggtggtgccaaagtatcaagaaagtggagaagagtctaagaaaaggtcttaactccttgatcattttggtcgcttgggagatttggaagcaccataatgcttgtgtttttgagggggttgtgccccgcacccagcgagttcagagtgttgtgattgaggagggcagtgtttgg

SEQ ID NO: 198558 - DNA, 206 bp, Zea Mays
tttgctggactgttaatttccaatggtggtgttacctgtattttgttgctgttcttgctcaagccattctcacaactataccttgaatctatttgctggactgttaattaatctgttaaattgttcgatgtacaggtggcagtcctgttttctgaatggtgtcagatgtgtaatcatgtaagtgctagtgatgcggcatacactcg

SEQ ID NO: 198559 - DNA, 357 bp, Zea Mays
taaggattcgctgccaggaaaagatgtaaatgggagctcagtaagtttggattccttactttaatgagatctaatgatataagaccttctatatatcacatttcttattattaactcacctttttgcagtacctcgtggagcctgaatgtgtaagctctcttcaaatcatactagttgcaactgcggacagttctgaaggaatgcaacagtcaattagaagatgcttccgctatgagatcgacatgaagactatgaatgaagaacagagaaacaaactgatatctgagacacttcaaggcattcctaaagttgctgatgaggtgtcttttggtcattctttggcccaaaacttattt

SEQ ID NO: 198560 - DNA, 723 bp, Zea Mays
gacgatctctgagtcaagctgatcaccattcagagtcatatttggatcaacgctggcaccttgatgaggttctcgttcttgctgggatgtttctctatgtcatcagtcttggctcaagttcttttgtggaagaagagcagtatacatggcacttcctcacttctactctgtatctaatatttctggccaaggcagttcagtcaatgctaaaaggatcaaatccaacacttggtcataaagcagaaggaaatagctttgacagaagtagctttttctatgctacaagctatgaattaacaccaggcaagagaaatggttacaagttatgtactatccttgttgttcttgttgctggaagagttataagagcttggcatcaaggtggaatcaactgggttcactttcctgatatttccaagttactggcgcaagctgacccttctgttgtaaagtctcttcagattatctcagttcttgcagttgtggtattgttttcaatttcactcactttactcagagcaagaccagagtttgttataggagtatggttgacccacatttcttgtggatttttggtcctactgcatgtttggggaaatcatattggtacttcattaccaattaaccataccacagcatcggtagctcgacaattttatgtcattgctagtgtttcagtatctgtcactgttcttgcttcaccttgggtatttccaatatttt

SEQ ID NO: 198561 - DNA, 213 bp, Zea Mays
cttgaacaggatctgttctataggatcgtactgttgcatccttgattaataaggaggcaagtacttaaacctggttgatgagtaaatgacctgtgggccagagcgtgattaacggccaggattcagtctctgtgctttgtctggtgctgtagatgatcgttcctggtcaggagcccctggctaagggtggcccacaggttgtctgacaggtct

SEQ ID NO: 198562 - DNA, 419 bp, Zea Mays
ttcacctcgcaccactcaccatccctcctctctaagctcaatctgtgcccacgcggccaccctcccccaacttcggtgagatctccatatcctcctccagtcgtccaaagctcaatcaagctagcgcacaagcttcactgcttcctcatgaccacaatgaacctctccacgcccccaatcaaccaccaccacctcgtcagcggcattaccatcacggtgaccctccaccccaccgtggctggccctccctagcttgcctccggccaaattgagtctggccccatgaacacccacctctccttgtgctagcacacctccccattgcccgggaaccagagcaacgacggagaaccgccgcgaacctcaccggcggccggttcgccctccccccatcaatagccgctaagcgccgtttccct

SEQ ID NO: 198563 - DNA, 390 bp, Zea Mays
aagacaccaaagctcaagaaagaagagatcaatctcattaaataggaataggaatcaagctagaccccaaaagaagctagattatgccatgtcaacactcattctatgcgacctacccactaaccatctgtccttacctacaagccatcttaactatgtgtccccaacttaggtgaagattccatggtcgaagatcgaagatgatcaccctcatcaaatcaaggaaggataacattcaagccggatcctcaaaagaattaagatccacaatcttggatggagtcttttcttaccctactctttcttacccaaacctatctatgctttaaagatatcttttatcctgcataataaagtggctatacccatatatacctatgctctcctaat

SEQ ID NO: 198564 - DNA, 323 bp, Zea Mays
gaatttaacaatgtatcctctactgctaaacatagcaaacataaaaatctgtgtgatgaaggatcaagaattgagaaaagttcagcatccagctatgtgcctaccagtacaggatgtgaagaacccctaaatagttctgccaaatctgagctgggtccatcaagagtgaagcgcaaatgtaatcagatttctgagggaaggagactggaagaaacagataatgaggaacattgttctgaactgctaaaaaagactagaacactgaggtgctctgttaaaggttctgaatcagatgattgtactagggctagttcccagtcgtc

SEQ ID NO: 198565 - DNA, 371 bp, Zea Mays
aacctcctgtatcatcagcaccaggaacacctatatgcgatcctcatggtgatccaccactggtgggagactgctggtacaattgcacccttgaggacatagctgggaaagacaagaggcaacgtctccgtaaggtgcagttctcatgcttttgttgtctctctgaaggttcagttcaaatgcataccgaacactctggactggtatagaagctgtatcatccatatccccatttccatatttttctgacttctgttttgttgttgagaatcatttaacaggcactggggcaaacagtagagtggtttagaaaagctctagctgttgaacctgtcaaggggaacctacggctcagtgggtactcagcttgt

SEQ ID NO: 198566 - DNA, 474 bp, Zea Mays
ccccacggcagagactcagggcaaacggaggacgcaccgcgaaatttggggtcttcttgacattgtcatgcaattgcaagccaagagttccatgtcacggcaccgggagcctggggacggccagaatatcgtgttcgtgccatcggaaaaccacgattcgtcatggcagatactcgattacgagggggaaggcacgacacaggtatcgtcttgtcggtgcccatggacgggcagaaacgcatggagtgtacctgaccttgggccttgggaaaagagcgagaggagctaggcatcaaccatcggtacaatcagcgttgtgtaggacacgttaatcccaatgaggaccgaagtctgagcccccttcgccggggcctcaggccttcgaccgccacatcctccgggcaccagtgcctcgatggtacaggacacccaccaacatcgcaaagtattcgggagagtaaaaccctagcctat

SEQ ID NO: 198567 - DNA, 507 bp, Zea Mays
cgaaaagatacgaaagggtctgggaagctctactactgaaagttcggtatgtagatatgtgtatctacttgtcaaagaattgaggatgttctttgtgtcactttgctttctatgtaccaggactttacaactcctatgtttcctgaacctgcttatgagcaaaatgggcatcgggacagtaagtgtttcttgatttcttctgtaatatttcctgcatgtaagtatatcggtctgatttccttcataatacagctgaaaggccttacaggagcaccagagaacaacttttctctattgggcagatgctgcgcattagaaagggtcctttgaagggctacctctgtcgagtagttcggatatttcggaatgatgtgactgttaagctagattctctactgaaaattgttacaggttggttagcttacctattgttggagctgttatttggacaatgactgacttcgccatgtgtgcagtacaagctgatcttctctcagtcccagctaa

SEQ ID NO: 198568 - DNA, 239 bp, Zea Mays
aaaaaacaaataaaaaacaacaaacccttgaacagaaattagccgtgaggaaggttagctgctaggaaaataagccccttagcccctgccatctcccacaaccttcgctcttctccaacctgctccagaacaacagcaacactcggactgtcgccctcgaagacacactgattgcggtgcttccataagatccatgcaccaagcaaaacaagggagttaatccccatcttcatttgtcc

SEQ ID NO: 198569 - DNA, 328 bp, Zea Mays
catcagcgccctccatttttggcaacatcgtgataaaggcagagttgaggaggcgaaggtttctgaagtccctccacacagcaccattggcttgcatcaagtcatctttgattacaggccagcatatcttgtaaaactttccagtgaagccatccggtcctggggcttggtaaccaagagaagttcagtatcgaagatcaagaccgttactgtatactctttggtgccatgctttcagacccacattttcagcccttgcagcaatctttggttgggcagtggatgaagaagacgaggtgcgatcagcaggcctcctagctgattgtta

SEQ ID NO: 198570 - DNA, 486 bp, Zea Mays
cacggtccatccgaagcattcaccaagttttgaatctccttcctccggtcagatgcacggattagagcacttccttttagtatcctctcagaattctgattcaagtttgcttttggaaacctctgtccttcaagaagagtgcagagctcaattggaacatgattcggtttgtccttgctcttgctcaaatccaagcatggcagcatctgatactcaatcaccttgccatgtttctgagcataataatccacgagcctccgtgtttggccggattcagcatccacaaaggtcatctggctggcaggtaagggtgtcaaaccttgcactgtgtacttctgattagtcctccgatgaatcacagttacacgtcggcctttaagctcatcaaccagattttccatttgcctcttgttcaaagttgtccgataatcaaggtacctcactaatttctgaacaagatccatcaccggtccagctttgtaaaac

SEQ ID NO: 198571 - DNA, 341 bp, Zea Mays
gaagttctttacagctgttgaggtcactgctgcaaataggtaatacattatactacatttttagatagatatatacaatctctaatcttgtttatttatctttctgttcaatttttagtccactaatccattctgttcttaaattaatagcttgttccatgtggttgtcgagaatgatgacatatcaacaaagatcattcaaatattaactagagaaaaaggtggaagggtgacatttataccattgaacagagtgaaagttccagatctcagctgtccgcaaagtcctgattttgttccattgttgaaaaaattgaaatatcgatctgaccatcgtcgtg

SEQ ID NO: 198572 - DNA, 362 bp, Zea Mays
gtgaccggatgaacgaggtcaccgagggcatcagccatgcccttgagacgacgacagtagtcggtgatggaaaggtcgccctggacaaaggtccggaaccgcgcgtcaaggagcgcgcggtgctcccgtttgccaaggaaatgggattcaatggcaagccaggccgagaaggcgttgcaactgtgctccatcactgtgtcgacgaggtcggtggagagtgtcgtagatccacgacttgaccacgcaatccatgcaagtctagttaggggagggtggcgttgaggcagagaggatgtggtcgttgagggagtacttgccaagagtgagcagcatctactcacgacagtgggtgtagttgtcgg

SEQ ID NO: 198573 - DNA, 336 bp, Zea Mays
ccatctccattcagacggaaaatcggtgtaagttagagatcgcgcactctcatgtacttggttagcaacaaaccactcagttagcattgttcgacgtaggtattcctgtgataagatatgtgacatgttggtgttggcatgatatgtgatgtaattttcattaggcaaatgcaccggcagtctagcaacaggagggaagtgtctgtgaatttcaaagccgaaaatcctccaacatgaatcgtatggacaaataaatctagcatctagatattccttgacctcattccttgtgttcgtttcttcatcaataggagtgtcttggccatctaaaactcg

SEQ ID NO: 198574 - DNA, 457 bp, Zea Mays
gttgcaatggcattggccatgatggctgctggtgcctcaggaacagaaacaagaacacctcctaggaataccttgaataggcgtgacaaagcattgcctgagcgcaaggcagcagcaaaactacagactttctcgagtttccagatgcctatggaaacagcatctaacaagcctgggtccaccctgaaggacaaggcagcagcaaaagctgccgcattggcagccgctcgtgaccttgaacgaactgctaagattggttcaagaaggggccttagtgctgtagcaatggcaacatcaggacaaaggaggagttcgggtgacatcgaacgagcaaagaggtggaatacgtcagaagctatgagtgctgcttgggtggagtgtctgcaatcagatgattccaaatcagttgtgggaagggatttttcagccctttcatacaaatatgtcgcagtacttg

SEQ ID NO: 198575 - DNA, 394 bp, Zea Mays
gtggaatctgggagcttaattgataaagtgattgaagatagggtagagcagctggaggccagcaggaaggctgagaacacagagaagaagctgaaggtgtcaatgaaaccgttggagtgggcagaggagcttgagaagaggcaggcctcgtctggtcaacattgggaggaaggagcagctgcgcagcccatgcaactagagggaatcggaaagggcccaccagctatcggttacatgcaaattgagatggacaatccagtaacccgtgtcatgtcctcaccgtcatttaggtcagaccatggctctccccaggtgctggctgttcataggagctatatagcaatgggcacatctaaaggtgctgtcatcgtcattccaagcaaatactccattc

SEQ ID NO: 198576 - DNA, 415 bp, Zea Mays
gtttaagaagcctggtgatgacatgaatggcgacatggctagtttgtctactctatttgcaaacaggaaaaaagggcattttatgaagggtgatgctgtcattgttattaaaggcgacttgaaaaatctggagggatgggttgaaaaagtagaggatgaaaccgttcacatcagaccaaaaatatctgatcttccggtaactaattgcaattatagctacttattattatgaaattttggtggaggaatggcttacagtatttctattgtgaatacatttgtaactgcagaaaacattagccttcaatgaaaaggagctttgcaaatatttcaagcctggtgaccatgtcaaggtgatctcaggtgtccaagaaggtgctactggcatggtcgttaaagtggaagggcatgtctt

SEQ ID NO: 198577 - DNA, 245 bp, Zea Mays
atgtcagtagtgtaccaatcaataactgtattgcagtcaagaaaatagtaatttccttgactgattttgacatccccatggctttaacagtttaaaaactgaaaattgattctactatatttgtgttttaaggccttagtgtaggcgtacaatctacgtcgacgccaaaattaaatcaccttcctacatccatagttgatatgaactggtgagattcttactgatgcactaaatttcaatcttag

SEQ ID NO: 198578 - DNA, 426 bp, Zea Mays
taatactcaaaattagtattaaatattcgatatgacatggactaaactttagtctctaaaaccacaaccatttaatctcatctggttcggtcaaagtattgagtttgactgtcctcgtatcataatcgggagtgcaataatttaaattttatgattgtgatatcctcctcgtatagttctaactagatctgatctatccgctgcacgggtgaaggaaaaggctcgtgctacctcaacgcctcaaagtgcagatctaacagttccatctagtattttattgaaggggagtcgtcctagttctgtgtcatattcgctgtcttcctctgtcccagcctaattcatcgtcgcctccaaccctgtccgtgctcccatccacccgagcacgctctcattcgtcgccgccctagccctgtccgctggggccac

SEQ ID NO: 198579 - DNA, 329 bp, Zea Mays
gtcattggccagtaatgcaagatattttgtacttagtgggagatagtgtgcctgacagaattcagtaaccaaattccagtgttgacttgcttcattctgttgcgaccggtaaagagatgcatcaccaacaccagtcaaaagccaaaacccacaagttttaccttcctccaatgatggcaaacttgctttttcaaggtgttgcagaatagaaataagaggatattgtgtctgttcccgcttgggagccatcgaggtttgagtctgctccaaaacatgcagatgatcagactggacataatcttcagctagcgctcgagctagagcaggag

SEQ ID NO: 198580 - DNA, 483 bp, Zea Mays
tggttagtgttcactgccatggcgtccaacagaaactgtgtctgcatggatggtcgagggggcgccgtgattgattacccacaagcttaccgtgcgggctggaattacagggaaaaacaggtccttgcgggtagcaaagcactcgatcacacaaacctaggccagtgctcagatcaaagccgacggaatcgtgtagtcaaggaagaggactggaacgaacagatggtgtgcataagggtgtagcaccgccaagattttgccgagatctgatcccctgacgccgaccgcgaaaccgaagcaatcgccgattgcaaacaaaggattcgatgcgccgatctaccaccgccaacaccacccactccgatccgcccccgccaacaccacccactccgatccgccaccactacttcgccactggaaacgagagacggcgcatgcaccgccgaggatcaccaagagtttgataccatatgtcacgacgag

SEQ ID NO: 198581 - DNA, 467 bp, Zea Mays
ctagggcctacaaagcttgtatctataaataggtcccagttagataaaatcggttagggagcgcttatcacttcaagtcgaaagactataaaatgtacatttcatgataataataattataaggcagacattcacccaagaaacatgtgcttctcatctcacgcatcgtcgccccttgaccaagggtttcctaagataagtcccatgatgccatggctcaatctcttgtagatttcatcaagacaatatgatgttgtcaccttacctagtagatcttggactaatcgttgtggttggcaagatctgctagttatcttgtgtagtatcaatttatttcatgctgagcttaatgttattagattgatcttgcatgaccaaacatgtatctcttgtacaattgctacaatccacaacatgagaatgcaacatgtgtatgtagcaactcgagagtttgatatgcatatggc

SEQ ID NO: 198582 - DNA, 325 bp, Zea Mays
ggctgatttggagaagtctaaagcagatgaagtttccaaattgaaagaagctcttcatgagatggagcagcgagtagaagaagtgaaagcgatgcaggaacaagaatcagcaaaaaaggctgttgaagaagctctagctcaagaaagagaaaagatcagtttattgactactgaaattgagggcctaaaggcatgttcttcatctataatattctgctttgttgcaactgatctacaagcagaaggattcaaacaaggaccaatcttttctgttttatcaaatggataatcttaagttcatacacttaatagtatgcgaacataa

SEQ ID NO: 198583 - DNA, 492 bp, Zea Mays
cattgccaatatatgacgatcgagcatcacgaaaagcagtagacgatttggttattcaggctcttggtgaacccaccttcatgaagccctttgctgcggtacttgtacaatctatggaaaagaatctaaaggttacaaacccccttacaagcttaaagcttctcagatggtcacactatcttctgaaatggagtcagtttgccacacttacaaaaggcgcctttaccagactggccaatgcacaagcagtcttatgtcaagtccttatggatgggtccttccgtcggcgccggacttgcaaacagttattcattcatctcttctccgaggtaattattggcaatggtaaataaatttagatcaaatcataattgtctcctacccatatcttatctagttccattttccagcacagtggaatatataagatgtacatagaggagctcagagatttaaggatttccatgagagattctcctgcatttttgaatc

SEQ ID NO: 198584 - DNA, 356 bp, Zea Mays
tcattatatggtaatcatgactcttcaacccattgatcttcattgttttcaagttcacagatcttctgaaccccgcaccataaccatcgggaaattttaaatctttcatccacttcatcacttcttttcgttcattgggtctcaaggcaaattcagcacgaggcttgcctccattttctctgagcatgagagttgggcggttacatatgttacctaagtccactcgagccttgaaattgtcttttgttttatctgggaaaatccatgacggtgttaaatagtgcttcacacatgttacgctcttggtgcattacatcgatgttgtgcgggagctgcaatgccctcatgtaagggag

SEQ ID NO: 198585 - DNA, 415 bp, Zea Mays
cctgaagtctcattgtctcaaccgcagtttctagataacaaggacagtgcaacaatggaatatccagacaccccgtctttgacacctacattttcacaaagcgttacacgggtgcaaacactgcatgttccacctccaccacctcctccatctcgaacaccgcctgttccacctccacctcctcgaacaccacctgttccgcctccaccaccaccttcatctcgaacaccgcctgttccatctccacctcctggaacaccacacgttccacctccaccaccacattcttctcaaacaccacctactccacctccaccacctccctcttcacaaagtttcccatccttaagtagaagaaatcgtgtggcagcccctcatccacctccgcctccagcaccactgtcatcccgtgtta

SEQ ID NO: 198586 - DNA, 278 bp, Zea Mays
tggaggctgatgaccctataacaagctacatgctgcaagtatgttagaacttgaaaccttgttctcaacttttttttgtcaatttaaatctttttttctcatttgatctatatgttcgcctctgtaggcatgggcaagactgtgtaaatgccttggtcaggatttcttaccatacatgagtgttgttatgccccctctgctccagtctgctcagctcaaaccagatgtgagtgtcacttctgctggaccagaagatgaaaatggtgaatctgatgacg

SEQ ID NO: 198587 - DNA, 291 bp, Zea Mays
attttattacaaccgacagcagaagtactagtaagtctggacagagcctcatgtccaggatggccaagacgacgatgccaagtagtggaggagacagtggcaacaagggcgcaggacattgtgggacatattggagtagcgagggtgtagaggggcccgaagctattgtacctggcgatcaagctcctggaacgaagatccgtcacagaaaggccaagagggtcaaattctatagaacaattgttatcagaagtaaactaacgaacgaaaataaggttttgaacaatatcg

SEQ ID NO: 198588 - DNA, 259 bp, Zea Mays
ctcacatcactcacaactttctttctgttcgtcggttcatcaccgacaattcttgttccattgagtttgacccttttggtttctctgtgaagagccaccatgacacctctcgcccgttgtgacacctcagggccactctaaatgctccgaccttcctccatcgacgcgtcttcctcgtccgtcctggtctccaccacttggcatcgtcgtctcgaccatccaggacccgacgtcatgactaatctcaccggtagttcag

SEQ ID NO: 198589 - DNA, 293 bp, Zea Mays
cacaggggacggagggaacagtggcctggcatcgactgctgatgtgtttgctgaggagatggcaccctttgaagatgactacgatgatgagatgttggaggagcagcttgttggagatgtgattcgtgcttacagtaatggcagaaacttcgattcagatggagtggattgggaggcagaggatgagatggagttcaatgacgatgctgacaatagtgattttatggatgatgctgacgatagtgattttatggatgatgcttatgaaggtggcaattccaaaccaattcaaa

SEQ ID NO: 198590 - DNA, 297 bp, Zea Mays
gttgtgattggatatgatgaagggacaataatgataaaaattggtcgtgaagttcctgttgctagcatggatagcagtggaaaaattatatgggcaaagcataatgaaatccaaactgttaacatcaagagtgttggtgcagacaatgaggttgcctttgttcaccatgctattatgatgtaaacttagtaagcttgttataaggtttctctgtggtccttaattgtttcattttttagatcgcagatggtgatcggttaccattggccgtgaaggagttgggaagctgtgatcttt

SEQ ID NO: 198591 - DNA, 349 bp, Zea Mays
gccattctcattttgctgctcctcgccctcaatatctccccctcctttgccgctaacttcgagggcttcgactccgacgaccttcctgtcgcggccggcggcctagatgctgacgatgacgagggcctcgacggcgtctacctcccgccccctccgcccatctccctctccacctccgctccttcacctcccgtcacgacgacaccggcgccgaaccctaacccggctacgcctacgcctcgggatcccaccccggcgctcgacctctgggacgaagacgagttcgagggcatccccgtgcccgaagcgatcccctctgacgactccgccgcgccggccgaggtcgacc

SEQ ID NO: 198592 - DNA, 400 bp, Zea Mays
actgcctccaggcctcgttgctaattgccataccactcaacataggtgtcagctgctagagacagccccaacctggcctgtgtggaggcacatcaactcggcgactttatgtttctcccccatagtagatcctacggagcatacaaaaaaaggcagtaaggagatgcatggtacacgcttatttgcatatggttcttcatcaacgtcgataacttcggcaaccttacgtttcttccccatagatcctacagaggagaggcacggatcctacagagcatacatttctgactttttttggtatgcttcataggatctactatcgggaagaaacttaaggccgccaaagttatcgacgttcctttttgctatcatatttgcgtttaactgatttttttggttc

SEQ ID NO: 198593 - DNA, 349 bp, Zea Mays
gcaataatacagctgctgagaaagtttgcaaatcaacaacagtgtcacgtccaacttctccatcgaaagaagtttctcgctgccaaagtttttcggctgataggctgcatgcccagccacttcctattcctggagtacgccctcgagtaactcgtgcagttgctgatgtcaatgtttcaaagcccatattggaaaaacgtggcaaacctccactgcttttgccacttcctaaacccaatccacttcaccggggacctggaagcagtgatattccttcagaaatagtggttgcttctgtctctagcaattgttctgctgatagtgaggatcgtgcagattctcagcttca

SEQ ID NO: 198594 - DNA, 1370 bp, Zea Mays
aacatgggcccgccagttatgagcagagaagaattcgatcccaggaaacctgaacataggaggagacgtgaaatggatcggttcaatgataggtgattggacacttcagatgcccctctatatttgaacaaattgtgcatctgttccatgacatttctagatccctgaagtcacgttctttttaagttgaatcagtggatggcaccaatttggatcatccaccatttttcaaacgcacaggcccataatgaccaaccaaatgtagtctaatttttgaggttaggataagtgagaagttggtctagaatgtcttgcatggaatcgtcaatgttccattttgccttgagcgttgatttcttccgctcttatggatgcatggaccgttttaaaccgcatcaccagtaaattctgaaggatatataagaaccatatatagagtaaactgcatccaatgtccctactccctaagctgtgctgtacaagttgcgcttagatgatatggcgtatcctgagcttgaccatgctatttgcgttagtcattcttgtggttgctgtctcgagaaatatcgctctttagtttgtattgttatttgcatttaccatccgttggtgctttgtgaagtctccaagtcactgcttgccaaaatagctagtctaggcgttagtgatatactagcgctatttatgtgattatgcccctaaactttgaaacactttatccatgaatgtctctccttttagattcactaaaagctcgtccacgacttgaatctcatgcctcagtgaacaactgctgaatgactgagagtctgaaacatacttgctcaagttttggtcctattatagctagctttgttgtatatgaatctaaaagggcagaaccacacgaatttagggattgcaagtgctattttcaatgtgtaatagtttcatggccttaccggtacgaatctaatgatgaaccaagtctacattcagtatctttagtcgttcgttcctttactgcgttgttttctcaaagataatctgttgagttgtgctcttgcagggaaagagagcgtgaccgttctcgagagcgagagcgagaacgggagcgggagcgttccttggagagggagagggagcgggagcgggagcgtggccgttctctggagagggagcgggagcgggttcgagagctggagcgttcccgcgagggtgaccgtgaacggcagcgaggcagggacagggacagggactcacgcagagaggccagagcatcaccaggggccattaatgatagttcctcgatgaggcggaatgatgtatgtcttttcctgtcaatctgttatcatgccaagttttgtactattatcggttccatgtggatc

SEQ ID NO: 198595 - DNA, 332 bp, Zea Mays
tgggcatatcaggttatttcaagagcgaaattgaggactacttagattatgtttacaggtaagcattaacccatggccatatcctttatgttatatattcatcaggagtagtagagcattatattcttcttcttaccttattattaacaggcactggagtgaggaagggttggcctatacgaagggctgcctggtgaaggacatcgatgacacggccatgggtttccgcctcctacgactgcacggctacgaccatgtctctccttgtaagtgctactactcaaacttgtgtgcagatagagcatcatccgtcatctcatggaactgaaaaa

SEQ ID NO: 198596 - DNA, 424 bp, Zea Mays
ggcgacgacgatgatcgtgaccgccgtcgcgaagtagtccactatagccaacgcgtccgcagaagtccacctgctggagagacccaccgtgaaggttttgtcgacgaggaacctcaccatgaggacgacgaacgtgagcgtggcgaacagcagcccgatcttcccgatgacggtcgcgacgccgttgagcttgacctgcagcggcgtctcgtcctcgcctccctcgctcagcgtgctcatcagcctgccccactcggtgtgcatgccgacagcggtcacgagcatcttgcctgacccgtcctggaccttggttcctgccaggatgaacggcttggctcgagagatgtacaccggctcgctctcgcccgacaggctggactcgtcgatcaggagggagtatccgtggacgtagagcccgtcagcg

SEQ ID NO: 198597 - DNA, 438 bp, Zea Mays
ggtcatgctgttattgatacccatgttaaaaccttgtatctcaacaatgtcttgtccccatgctcatcaacaaaatggccctgctttcacatagtagaggttagcctatctttgcttgcgcgtgcttcaatgccactaaaattttgggatgaagcatttgctgctgcataccttataaattgtacagtcatcaagttgcttgattatttattttcttttgagaaattatctcaataatatcttgactgttctttcttcaaggttttgggtgtgctggctggcctaacttgcgtctttagaacacttgcaagctgtcatttaggtcagtttgttgtgtttttctagaatacaacaccatgcataaaggatataagtgtcttgaagtattcactggtcttcgagatgttcttgatgaaggtttttttttttcatttgttg

SEQ ID NO: 198598 - DNA, 547 bp, Zea Mays
aagatgattctcatgatacttcaaaaaccacaaagagacctgaaacagaagaaacaggccgtcttgtcaatatcctcaatttagcccttccaagactgaagtcagctagcgatacaaaggctgagagtgaaaagatcatcaaacagacacaggcacttttcaggaaccagggacagaagaaaggtgtttttcacgttgcacagcaggtggagcttgttaggccaatgcttgaagctgtaggatggcctttgcttgcaacattttctgtgaccatggaggaaggtgacagtaagcctagggttgtatcatgcatggaagggtttcgtgctggtatccatcttactcgtgttcttgggatggacaccatgcgctatgctttcttgacgtccttagtgaggtaggtttatcctttgaacttcttcatatgatgcaactgcatatacttttcatatatcaatatgaatataatgctacccttttcgttcataatcgttttgcaggtttacatttttgcatgctcccaaggagatgcgtagtaaaaatgtcg

SEQ ID NO: 198599 - DNA, 4219 bp, Zea Mays
aacagattggttattcaaccatccagaagattctgtccaggaagatgtgcagcttgcacaagcgttagctttgtcacttggaagctccattgaaacacccaaggaggatggaagcaataagaatgatacagtcattgctgaagaaaaaggtgtatttgtgcttcctttggatgacatccttactgtatcgaccaagcttttccagtctagtgattccaccttggctttcccattgactgaccttctagcgacactgtgcaaccggaataagagcgaatactgcaagcgagtagtattgtatctttttgagcagttaagacatttttcgtcagatgccacggatatgggtgctttgtattctgttgctcatgtgctggctttgcttctgagtgaagacagtggcatacgtgaaactagtgctgaaaatggtgtcatctcccaagttcttaacatattaggaagtcttaaatcaaggacagaccagacagatcatacttggaattctatcagtgctctgttgcttatattgtataacatgctacaatttaatccaaaactcagtatggaaacaatggatggtatatccaagtcaatttctgatgcatccagtgctgacagcgaggaaaatccattaccaactgctgaacatagaactgaaattattgattcagcagatgatgcaagtgcaaatgtttttaaaaagattttagggaaatctactggctatttgaatgatcaagagagccaaaaggcactggttttctgctgtgaattcattaagctatgtgtgcctgcaacagttatgcatgctgtgcttcagctcagtgctcgcttgacaaaaacacacgcgcttgctgctctattctttgaaagtggtgggttagcatctctcttaaatctcccaggcacttgcatctttcctggctttgagaccttagcatctgctattgtgcggcacctcattgaggatccccagaccttgcagagtgccatggaattggagatacgacagtcattaagtaaccatggcagtcgtactccaagctcatttcttacaaatatggcaccactgatatctagagatcctgtgatcttcatgaaggctgcaacttcagtctgccaattggattattcaggagggagattgaatgtagtcttgttgaaggacaaggagaaagacagagagaaacagaatgttcctgtaacagaaagtggtgtgccatgtaatgagcctgttcgggtgactgctgaggttaagacggttgatacaccaaacagatgttcacggaaccacaaaaaggttcctgctagtcttcctcaagtgattgatcagcttcttgagatcatcatgagctatccatctgcaagcaaagaacatgggtttgatggttattccctgttgactccaatggatgttgatgaaccaaatacaaagggcaaatctaaagttggtgatggccaagaactggatggtgatgctttctctgagaggtctgccttgctatcaaagtttgcatttgtccttaagttgatgagtgaaatactccttatgtatgtgcatgcagtagggataattctgagacgggatacagagatatcagtgtcacgaagttgcgctcaaggtgctggacacagtggtttactgcatcatatattctatctgctacttcctctaccttcagtcaaaattgctgatacctcagatgattggattggtaatttgtctgagagagcttcctggttcttggtagctttatgctgcagatctgctgaaggtcgtagaagggttgtttctgaaattgtaaaggcacttaaccaattcattggttcagcaagcaacacctccagaggatctttaatacctgacagaaaagttttggctttctctgagcttgtgaattccatattgtcaaggaatagtcagagcaatttgcctgttcttggctgctcacctgatattgcaaaacctatggtagatggtggaatggtgcaatctctttctgttttgctgaaagtaattgatcttgaccacccagatgctgtaagggttgtcaacctgatattgaaggctttggatagcctcactaggactgcttacaccaccgatcaagtcctcaattcagatcgatttaccaagaacagattaccagggtcacatgaacaaacacatgaagctgatgacattgtaatccctgaacaaactacatacgattcacatcatcatactaatgacatcgaatctgcaagtcagcaagctcaagaactgtctcatgttggtggaaataataacgaaaaccttgaccaacctgctgaacaagaaatgggagttgatctagcagacaatagtacttctaatggcaatcctccaacaagagctgtgcagttcatgcgggaagaacctattgaaggtaatgtaatggctcctagtactgatattggtttggctttctcaatgcaacatcaagttgatggaatgggtgtggaagacgaggatcttggggaggaaagtgaggacgaagaagatgaggaaatagcagctgagggagctggtttgatgtccatagctgacacagatatcgaggaccaggagaacaatgcaattggtgatgattacaatgatgaccttatggatgaagaagatgacgactttcttgagaaccatgttatagaagtaagatggagggagagcttaactcgaatggattatgatcatcatctgagattttccaggggtcgtgcagactccagtggttttattgatatatcttctgagtcatttcatggtgtggggacagttgattcatttaatctgcatcgttcgtttggtcttgaacggcggcgccaaatcggaagtaggtcgcttcttgatcgaccaaggaccgatgtgaatgcctttcttcatccactgcttgtcaggccagcacagtctagggagggaactaattcagcgtggccctctggaggaacttcctcaagagattttcacatgctgtcttttgacatcccctcgtacatgttagatgctggcttttcaccagaaactgctcccccagtgtttggtgaacgtgttgtcagtactgctccaccacctttgatagatttctcacttggtatggattcccttagaattaggcggggccctggagataatttgtggaccgatgatggtcaaccacaggcaggtaatcatgcagctgctattgcccaggcagtggaggatcattttgtgtcacagttaactgtggctaataattcaaatagtgctcctcaggtgcggcctgaacagactggcaacggtgcgaatgcgcactcagagttaccagatacaggaaatgctgaacctgttacaaccgatccactttctcaacctgttggtcggcatcagctagtttgtactgttaaccaaggacctgtccctgctaatgatgtcctctgtcctacagatgtgcacgtaaatcagcaccttgttgattccatttatgatagccgcgttgtagaaccggtgcagcaaacagcagccggtgatcctaacactatacctcagagtgatgaaatgatgtgtattgctggtacacagcttggtggtcatcctgaaagagattccttgtctggtaatggaagttatggtaatattatgcaaaatgagattgaagcacctcaacaagttcacttgggtaatgatcctagggaacccccatctgatctggagtcaagttgccatgcacttgtcacttctgcaagtgctgctcctgagctgagtgatgctcatgtagattcttcagcagtcaatgctgatgttgacatgaacatcgttgatattgctgaaaatgaagttgggaactcagctcctgcttctgatggcaatgatttgtcttctaggagatatgaagatgctcttcaagagcctcagacagtgcaaactaatgctattaatgaggcctccagcgctaatgaaattgatcccacatttcttgaagcattgcctgaggatcttcgggcagaagtccttgcttctcagcagaaccgttctgccccagctgcttcctatactcccccagctgcagaagaaatagatcctgagtttttggctgctcttccaccagacatacaggctgaggttctagcccagcagcgagcacagaggattgcccactctcaaccagctggacagccagtagatatggataatgcttcaattatagcaactttccctcctgat

SEQ ID NO: 198600 - DNA, 1112 bp, Zea Mays
tgctgccgagcagctccatactgcagtcatgtcagcactctgtgatccagagacaggagagtgccctgtacgctatgatgttgaatcagaggatctgccggtgctggaagacaaggttgctgccgtccttggctgcatgctggcgttgctgaaccggggaaggaatgaggtgctctcagggagatcaggtgttgcaagtgccttccagggatctgaggacagcactgctgataggatcccaccgctcgccttgttccgtggagacatgaagcgttgctgtgagagtatgcaggtggcgcttgcaagctaccttgtgccaagtgaacctagggggttggacatatggaggaagctgcagagattaaagaacacttgttatgatgcaggtttcccgagggctgatggttatccatgtccgacattgtttgcaaattggtttccagtgtacctttcgattgtgtcagatgattcaggaatggatgagctagaggttgcattttggaggggaggacaagtcagtgaggagggactggcatggctacttggaaagggattcaaaactattgttgatctccgggaagaagatgttaaagatgatttgtacctttcagcagttcaggaagctgtctcatctgggaagatagaggtggtgaatatgccagttgagattggaactgcaccatcagctgaacaggttcagcaatttgcagctcttgtgtcagatggcgcaaagaagcccatttatctctacagcaaagaaggtgtttctaggacgtctgcaatggtctcaagatggaaacagtatgttactcgttcagagagattggctgtccaaaatcactctctaaatgggaatggtaacatcctgacaaatcacaagaccatgcagcacactggcataccaagttcctctccgaatggagctgaaaatggtatgataacagaatctgataggaccatgaacaatggggaatcaagtgagatagacatagatacagctcgtcataatctggaggtcactaatgccctttgtaatgatcaaagcactcaacaaggtgaaatgcctgacaccgtggcagaactcttgtcaaactttaaactggagagtaacc

SEQ ID NO: 198601 - DNA, 577 bp, Zea Mays
cgggcctagtgaaggtgagatactagagagcaccggtgaggatgcgataggtggtggggtcacttacggaagcgttgtcgctagagagcttggcatgcgtgtccaccggggtcgcacagggtttagtctagcatgccagcccgcttgaggatgtacatggtgtactgtcgctgttgaggaagagtccatcggagtgatgctcaacgacgatccccagaaattgatgaaggggcccaaatccttcatgtcaaactcatgctgaagggcagtgatgatccggtgcagggagccgaagaggaggcaatgagcatgatgtcatcgacatagaggagcaggtacatggtgtcactgctacgctggaagatgaacatggatgtgttcgacttggcctcaacaaaaccatgggagagcatatatgtggcgaagcggctataccaagcgcaaggtgctttctttaggccatagagggacttgttgagcttgcacaccatatcgggatgagcaggatcaacaaagctagtaggctgactgcagtagatggtctcagtggaagtcccacaaagaaaagcattcttta

SEQ ID NO: 198602 - DNA, 275 bp, Zea Mays
gccagggctggtagacatagagattagagggatcccagaacatgcatggtttctgtctacagcgaagagtatactgactgattcctgtttgatcgctgaagtgcaccctgattctttgtccaagcgagagctatcgtcgtttgtagtcagagcctggtgctttaacccggagaatctccaacgcgattcagtgcttcacattattgagcctgggttacagatgttcgagaaaagatgccttacatacaagatccaaattagagtcctgcatgctg

SEQ ID NO: 198603 - DNA, 397 bp, Zea Mays
aggctgaacctcatcatgtagcatggtaagaaacaactccaaccctgcattgcattcaccattctcaaaatgcccagcaatcatcgcattccatgagatacaatccatgacggtcatactgtcaaacaccttccgtgcagccataacgtccccacatttggcgtacatggtcatgagtgcattcaggacatcgacctcctccccaaacccaaaccgaagaacatgtgcatgcacctccctccccatcctccagtctgggacgcccccacagctccgcagaacacaggggaacgtgtacacgtccggtctcacacctgcccacatcatcctgtggtacaggtccagcgcctcatccagcaaaccggacttcccgtacccgcccaccatgacgttccag

SEQ ID NO: 198604 - DNA, 669 bp, Zea Mays
gaaaaatggtgtggcggagtggcgcaaccagacagtgcttggcaacgctataagaatgctgacccctgaaggctaaggggatgtcaggttgtttgtcaggagaggtgatcgccacagtcgtcttcttattcaactgatcaccaatgaggagtgttaaagaaaatatgtcatatgaagcctggtatgatataaagcctccagttcacttcgttcatacttttgcgtgcatggcacatgtgaaggtgaccgaaaagcaccattagaagttggatgaccggagtacaacaatggtgttcatcgggtatgagccagggtccaaggtgtacaaagttctacaatcccaacataggatgtgtgatcatctcatgtgacatggtgtttgaagaaggaaaggcatgggactagagcagtgtcgacgggtctggtgcaacaggagcagaactattccatgttgaattttttatagtgacgatccagggcatggacatcattggaccagaacaggaagacacataaaacataacatatgtgttaggtccaagcaacacaatactacgtcgggctcactagggcgcatgagtggcatagcatcagtgccaggctcatcaaggacaccaacattaggcggaacatttgcaccagtgcttggtacacctccaatagtggcta

SEQ ID NO: 198605 - DNA, 500 bp, Zea Mays
catggtccagtccagcggtatctgactccatttgcttatcttcgatagccacagcttcaacagcgctgtcatccgtctccgaaaccaccactgaaccaggcaccttcggctgccttggtatttcgttggcatccacattgtgcatgcctccatcaccaccagcagcaggaacagcgccagagtctgtcaccttggtgcgatccaaatctcgagtgcctgctcgcagatctggatctctcctgctgccagtgtagtagcccctcgtcctgctcctgcttctacttctcctcctccgatcaactgtgccatcagccaaagcccggcgatcgttatgcgaataggaccttgacattggtggtctcttcagctcattgtagtcgcgtgtccggcggccaccccggtcaacgtcaccgccatcgttgtatttacgcctctcgtcaaagctgtggctcctcctgtcccaccccgacctcttggcttccctgttgtcgtcccacttt

SEQ ID NO: 198606 - DNA, 448 bp, Zea Mays
tgggagcgatttggcttctcatgtgaagaagataccattccaatctctagggatgatggagaatgctgcctctccattgcgccaccccaagaaaccttccgctgcctctccttctgagagcattccactgagagacgatggaagaattgtgaatcagcagactggaagcgctctgccaccctgctcacatcagacaactcgcgtaaatgtcttggttgagcctccctttcatccgtgagtgtgacagaagccgtttcacaatcctcgtacagtgaagaagagaatgaatcagttgcgcagaggcagcctaatgagcctaccgaaggccgagctggctttgaaggtgaatctgcacttcccgatgatgacaggagcaagggatcaccggtagtcatctactgcaacctaccaaccactgcatcattggaataaggaatctggctacaag

SEQ ID NO: 198607 - DNA, 415 bp, Zea Mays
aggtcatgaataagattcataatactttggagatcaattgcaatatttcaaacaaagtaatgcttggtgagtataggtatgaatcaatcaagcaatgcatggaatgggctgttgagtgtggagcaactgaaggatcacttgagcatttcatggctactcagctttttgttaaggcggagcacagggatgtatttaagtcattcaaaacaaatgaaggaagacttctatggttgaagaggcactgcgctaaggatggattatgttaggaacatctatttattttcgtgtgttaggagcatctatttactttcatgtctggaacatctatttattttcgtgtgttaggaccatctatttattttcatgtgtggaacatctatttattgtttatgtgtggaacatctatttattttta

SEQ ID NO: 198608 - DNA, 442 bp, Zea Mays
ggcaagcccgtcgacgactccaccatggtgctcaacctcctccgcggcgccaatccccgcttcagcaccacctgcgacatcatcgctggtgacgccaccatggacttcgccggcgccctcgacatgctcgccctcaaggaactgcggctggctgaggagggcaagatggtcaagtccactgccctccacgtctcctccacatcctcctcgtcatcctccggctgcacaggcccctgccggtcctgtacgtcgtctccccagcagttttgggtgcagcaccagcagccggggaagcagcagcgcggcggcgggcagccaaagcgcaagaagacccattttcgcaagggcggtggcggcggcaaccaacagcagcagcagcaccgtgcgcccaaccccactggaccatggatttgcatcaatccgtggggccagcagcagggac

SEQ ID NO: 198609 - DNA, 220 bp, Zea Mays
cgaacggcaagatcgattccaaggatttgatgtagcagcatgcggcatgtcccaatccattccaaaacccgcagtagccagcccgattgcagcagggcaataagttggaatcatcataaggtccagcgtttaatcataatactactaccagcggtggcgacggaataatggatctcttggcttgtgacccgggtttaattttctaatggatacgggagag

SEQ ID NO: 198610 - DNA, 784 bp, Zea Mays
acaagcatggacagtaatgacaggtacgatcggaagcacataagtgctatcttttatctaaatatatatacacactgcaaattattggaattgcagtatgcaattcaacgacattttagttgaattttttttatcgtattgattttattgttatttgttagggatgagcagcagcaacaaacccacggtctgcaaactagtgatgacaatgtcaggtacggactggaagagcatatccctcatgttccaactctccaagtttactagcaatgttgcagtatgcagttcaaaactacttcccctgcaattttgacgggttggttttcactgtcatttatcagtgaccaccaccagcagcagcaacaaactcagagtcctcaaactagcaatggcaatggcaatgccaggtacaaacagagcaatgcaattggattctggtctctctatactctttgattgatggatctgtttcttctctttataatccaccagcgatgagcatgagaagcaacaaaatccagcgctggagaaggctcgctctcttgtcctgctgctcgctactctcgcagcggcaatcacctaccaagcgggcctgaacccgccgggtggcctctggcagagcaacggccgcctctacaagatcggtgatccgatcctcttgaccacgaaccccagacggtacaaggcattctactactgcaactccgtcgccttcgtcgcctccttggtcgccgttatgctggttaggaagaagacactgcaccaccacaacgcgctggaggcc

SEQ ID NO: 198611 - DNA, 552 bp, Zea Mays
gttggagcctgtattttcttcctagtttgttgacttatatggatgatgtatcttgattgtttatgttcagtaagaactgcatcgttgttcaaccttccacttggtgtttatgaataggttctgattctgaatgaagagagtgagtcgcgaattgtaaagatggttttgcctatcgctgaatcttgccaaggaatggaacttgttacagggcttagtgacccaaataagcacagacaaagtgcccttgcactcttgttgaaatctggtcacatctgtttatatgatgattcagaaattgagcgctatctccttcactctcagtctagatcccctccaacacttccaaactgttcatatgtgaagcttccttatggtgattcaggcatcagtgttgcaaagttctatacaagtaaccctgcagcgttagcttctttggacgaggcatgtatatatttggtattttcttgcaaaaactttgaactctttgatcaagccgttccttcttctaatggtgtgcaggattatttttcatcagctaccaaatatccatgt

SEQ ID NO: 198612 - DNA, 333 bp, Zea Mays
ctttgttatcaccacctactctaccattgaggcggactaccggaagcacatcatgccgcccaagactcggtgccaatactgcaataaattgttctaccccaacaagatgaaggtgcacttgatgtatcactgtgggcctaatgctaaacgcacagaagctcaggctaagcagcagagcaagaggaagtgggacagcagcaaggaaaaggtgaaggagaagaggagggttcataagaagggtgatgaggtgaataaggattttcaagagttggctgatgaactgggcagacagttaaggggccaatctcctctgcattctgtgcggtgggagcg

SEQ ID NO: 198613 - DNA, 532 bp, Zea Mays
aaagaatctactgaaaacggatatgagaaaggaacagccgttcattgatattcttgatgtcaacaaactaaggaggcacttattatttctgtgttacttgtgggatcaacggctgaaattcattgcaaattcaggtggcaagtactgtgatgcactagctggtttacggattgggagtgggaattctgattttaatggtaaaccagttggtgcagccccaaagctagagaagggctcaaaggctacagttctttcaattgctaaggaagggtcgttacaacagagctcttgtccatctcatggtgaagatgaggggttcaaccaagccaatgaatataatgaaaatatctcaaggaatgctgcagaattgagcggcactgaagattccattgcaaaaatcaatcatgctaccagtgcagatgttaaggatcgactggataaccaagaatccagaactggtgtacgcagggttgtttctgatggacaatttccagttgctactgacattccagacacattggatgcaaaatgg

SEQ ID NO: 198614 - DNA, 213 bp, Zea Mays
agcctgtcagacaacctgtaggccatcccaaccaggcaagcctgatcaaggaacgatcctctacagcaaccagagcaagcagtacagctgaactcctggccgttaatcacgctctggcccacaggtcatgactcatcaaccaggctaaagtgcttgcctccttattaatcaaggatgcaacggtacgatcctatagaacagatcctgttcaag

SEQ ID NO: 198615 - DNA, 483 bp, Zea Mays
ctgagctcattggttgttgctcatcacttgccatgcccacctatagaagtagtcgagcattgaactactgaaactgaagcatacacaaagccacaaaccaaagagatagagccatagagagatagcagacagcacagcagccctggcccaccaagttaggcacaagcggccggttgcactggcgaacggaattgatggtgcagggactgtgtgcatggcggatggacgacgtgggcaactgggcgtgtgggtttgatggatggacaacacggtgggcaacactggaggagggacaagcggccacaccggctcgccgtgagcagcagctaagctctcgcatcggtgaggcgtaggttgggcggccgcggtgaggaggtaaatgtgtgggcgaggcagcgcgtcgaggggagtctgacggagtcaaatgaactaggcttctcaatctagggttattggatgtcgtgctcaattcctatagcgtcc

SEQ ID NO: 198616 - DNA, 424 bp, Zea Mays
cgcaggtgaaggacctccagattagactgttttcaggagggcataatgttgggagcatgaatggtgcgacggtcgcgtcagctcccggaagcgatatgctgcccaagaaaaaagccgagaagctcaggcgaagcaattcagtgcagacggataggggagctccaccacctatggccacagctgtcgccccacctgtttccagctctattaactacacgtcctcgtttaaacaatgtgccaaccttctcaagtcccttatgagccatgtatgggcaagcccgtttcttgttccagttgacattgtgaagttgaacatccctgactactttcaaatagtcaagcagcccatggatttgggtacgatccagaaaaggatgaaggcaggcatgtactctacacctccggaatttgctgcagatgtgag

SEQ ID NO: 198617 - DNA, 540 bp, Zea Mays
ggcaccgggaggccagcaaggtgtccgcggtggcgacctgatgaacgcccgccggagggtggcccggagctgcgcctgcacagattgagagactcaagccaacggtttggttggtcgtttgcctcgtgaaggttgggattcggagaaacgtactcttagatcagatcgagcggccctgagccgagcttcgcggtgaatgatgcccgcggatgccggaagtcggagaagacgatctccatcggagttgctctggttgcacgaggcttggcctgcgtgccacagtcagtgccttagtcctagtgtaacatgatttttgtaaattcgatgcatttggaaagcttttgcctccaaattcagagccaatttttggaacaccgtgtgcgcttcaactgttcatgaattggttcgagtaaactgtacttgcttacttgtgttctctttctccacacatggctacaagggagaggggttacaactgctaagtggaccagaaaggcgcctgtcctaccctatattaaggtcccgtttagctccttcaat

SEQ ID NO: 198618 - DNA, 252 bp, Zea Mays
ttcacttccatgatataggcaactccattcagtttactgatggtacccagcaggaatgactcagtaaaatcagcgcaaaaagcaactgactaagactaagcaaacacaacaggatacacatcagcaaaatgaagacacctaagacaaacaggaagaaagaggatccagagaaaaactctctggacactcattatcaatcttgcacagctatgactcgaaacacccccaagtgaatgatgggaggcaatctta

SEQ ID NO: 198619 - DNA, 589 bp, Zea Mays
cattctagattttaatacttcctctagatctgttcttttctttatagaatcttcgagcatgagatctacttcttttattctatgttcaaagaatttgcttgcctgcaaagcactactctccagttcttgaatatgtgtcttataagattcatgtgctaacgaaagctcttgcctgagttttgatattatattggcactattttccttgtccttttgaagcttaagaacctcctcctttgcagattctaactggttgtggctctcttcaaataatgattttacagcttccaatttgctctttagtttcataattgtaatattactgtcttctttttcctttatcatcctaatggtttcatcattatatgtagttgatttattcgcatatgcattggctgattgatctcttccatcaatcttctccttcctcgaggtaaccatatcatctttctccttaatcagcaaaaccatttcttccttctctttcatcaatctaattatatcttccttatctttcagcagcctaaccatatcttccttatcctttgtcaatctagctacatcttccttctgagccatcaagcttgac

SEQ ID NO: 198620 - DNA, 380 bp, Zea Mays
cactcatctgctctccctgggattcatcaaggccaagagtgacacatctctgtttgtctaccatagaggaactgacacagcttatttgttactctatgtcgacgacattatactcacagcatcctctactattctcctccaacacatcattcaggccttacagctggagtttgctatgaaagatttgggtgatctacatcactttctggggatgcaagttcaacgacgagatggaggcctctttctttcgcaacgtcaatatgtgttggatattctggatcggtctggtatggcagattgcaagccctgttctacacccgttgacacaaacccaaaggtttctgcagctactggtactcctgtttctaatccatcggatt

SEQ ID NO: 198621 - DNA, 461 bp, Zea Mays
gttttaccatgatgcacggtgtccttatcaaattgccatggtctaccaaataacatagagcaagcttgcataggtaccacatcacaatcaatataatcatggtatgaaccaattgtaaattccacacggaccatacgtgttaccttaagcttaccactgtcgttgaaccattggatgtagtaggggtgtggatgtggaagcgttttcagcccaagcttctctaccatggtggtgcttgctaagttgttgcaacttcctccatcaattataatacgacaagatcgttccaaaactacacatttagtttggaacaaattgtgtcgctagttttgttcagctttaataatttgggcactcaagacacgtcttacaacgaggctctcatagtgttcagcatgttcagccccaatatgctcttcatcatcattctccttttcagcatcttgggcagcaagcatggc

SEQ ID NO: 198622 - DNA, 1032 bp, Zea Mays
catacagagcatccataagagggatgatgaaaccaatggccttgaggaaggcagcaaggactttccctcggtgagatctgatacccttccacaaaggcttcaatacggtatcaaaactttctataccatatggtgcagcagcctcagcaagtgcagcaagagaaagggcagtaattgtccggactttctggttttcatcgctcagaccatgctcaatgatctcgactaatgacttgagatgtggcaaaacagcacaacccatgagaatagcaatctgctgcacgattttgataccagtgtgcctagcttgccaagacttcttactctgacagacagccttcaggaatggtaaaagggcagggatgcccaaagcagaagccactacactgaatgccctagcagtggtgtttctcacatactcatcaatgttatcaatatccggtcgcatggcagcaatcatagtagcaagcccagctgctttactaagatttgagatgatctccctgccttcaacacgagcatagtagtcctcatcaatcaacagtggttcaataaccacaagaatcttgtgcacaaaaggtcggaccagctcatccagcttatacagtaccctatcaatgaccttcaccagaagatgcctctcctggtcctccagtgttggctgcatgagtaagggcaggattttgttgaacagtggtccagcaccgaactcccgggctttgtctgtcaattgccgaagtgctgttttacgctgtggaggtgtaccattcttcactttgagtaacagtttcatgattttcctctccttctgctcctctggcgatagctcctcctcctcttcttcattcagcaaagttccaaagtattggtaatcctctggcttcatgagaggcaatccaccaggcagctccttaggcacatcaaaatgctgcccacgattctcctctggaatagcataaagtggtgtccccagaggtgttggtgtcgcaaggagcttccttgctggggtcctgatgggctggtaggaagccg

SEQ ID NO: 198623 - DNA, 368 bp, Zea Mays
ccccaggtcagccttagtcagcattacatcgttcacggttctgtgtcaaagcagagcggttgtaagcgtagcgtgacacgccgctgagggaaaacacgaaaaaggccatatacaataggaaactgcaagatacgtgtgccgtgcttgtgtcgtgcacttttgctgcaaatgtaaaggttagaaggtacatgaagccattccattgatcaggttagcggtcgtaagagaacaaagaattaccccaccattgctccagcagaaaatataaaaacagaagtccaaataaaataccaatgtaatatcgtaatttcattccgagacatgccaaccaccaaagctcatatagaaacaaaggaagcgaacaactg

SEQ ID NO: 198624 - DNA, 448 bp, Zea Mays
acacactatccatgctctttgcctttcaaattttatcgcacaacaagaatcatccccttttgctaatgacaccaataatacctactgacctatggtttaccacccgagcacagttacacgccgcacattagtttctaacatgattctcgcataactcgtaattcaactactcgctagccataaatcacgcacgaccactaccacatcgaccagttaatttatgtggacaccgcctagcgtaccaccagtatcccgcattttggctcgacttataaacatagaggaagtgatacacgaccaaacatttatgtcgagcacaattattcatgtccacatttatcgactagacaagtgaaacactaaccgattattcgcacctctcgtccttaaacacaaatcacatgcctcataatttatatcttcgacccactctatcctacaccacgat

SEQ ID NO: 198625 - DNA, 607 bp, Zea Mays
tatcttaacttgtttattcttgctgtaacaattttttgttcttccatttgattgcgtgtagactgtgaaatacttcaacaatgaacaatttgaagttgagaagtacgacaaatatttaaggagtgagttcatttattccttaaatcttggtggaagtgtcattgtagagtagatgtgcacaaccagatgttcctcaaaacactaatttcagcatttgatgttacatcgtgttcatccgtctaatttgttgttgttgatgtgtatctttgacatcttgatatgttgaacatgctctctaattgtaaaaaagattagaattgtttccttgaaatgatctttttcaatcaactagggttcagaatgtagttgttctgaaatcgcttaaacatgaactcaagttatgtttcatagatttgattcgtcccacctgtcttgtaacactggcacacagcataaattgatatgttaaagagatctaatctattaattatttttgttacaacatgatttgtgatcagattatgaggatgctgcattgaagacccaaagtagtcttgcctacctgaactttggccaaaatgttatctttagctcagctttatctaca

SEQ ID NO: 198626 - DNA, 294 bp, Zea Mays
cctatgcatcattcagaaggaccttaataacttcaatagcatgggcttaactaaatatggatggcaacaagtgtatcgcagcttcagagagcagactggtcttgattatgaaaacaaaaaactgcaaaacaaattgaacttgctccgaaggtctttccagcattggcaatacttgcagaaccatactgggcttagccttgaatcaaggactggtgatatagcggtagatgattcgtactgggggacccaggaaggggtacattgttcatgaattgattacaagtttttttttat

SEQ ID NO: 198627 - DNA, 377 bp, Zea Mays
cagatcctgtgatttcgccacggagcagacacttgtgctgcattcgcctgagaaaaaaacagatcatgtttcaatagatactgaagtccatcttgcattgacacctcttgagcctattgtattttttggtttccacaaaagaatgagtgtaacaggttactctcttagcttggcaggttaccttttgtgtttgcttgggaggcttaaagtgatcctccatttggttttgtttttacaggttgtatttccacgtgttaacctcttgttttgttctagttgtagggactgttgatggagggagaccgccaacaaaaataaagactgatcttaaaaaacccattgttaacctggcttgccatccccgcctccctgtcttg

SEQ ID NO: 198628 - DNA, 844 bp, Zea Mays
gacgaggtacacacaaccctgatcaatcgcctccgatggcgatctgatgttcaccttttacctttggttcgtattcgctgagcatccgatcttcttcatctatcgaggccagcattttttgtttctttttttttcttgctcggtttgctttggatcgagggacctggggatccgccgcccttcttcgtgcggcgtcatccagtttttacccctcgaatacggcttgcaggcgcgtcctagccatctcgctctctgcataatcctctgcgagacccgggctcgtatgccacattcgtcgttgtcaaactaaacaaaaaaaataggcttttgtcgcgaagatcccagcagagaggtgcgctgatgcctccctaacaatcataatcttcgcagagaaacgctcatgatccgtggtttcgtggatgtgtgatttggatttttgttccattacatctgtttccacggcgacattttcatgattactgcagcgaactgaacgagggacctatggatggactgctctttgtccgtgttgtgccgtccaagtttgccttcggatagtaaaaccagcaatctggtcacgagatctcgcaagccttttcatgtttgtgggaatggtgtgccaatttgccaaattttgggtttctatcgttatcttcataggtcgtaattttgccaggatatagcgccggaaccccatactgaggtcgtcgttattgcagtcataagcgacgatgaaactttgaacagaccagaatgttcttgcagtcacaagtggttgtctaaatttggatattgaacagaattacttccagttgaacctaccgcttcaacaattggcatactt

SEQ ID NO: 198629 - DNA, 570 bp, Zea Mays
acttaccagcaccaatgttctattgttcttacttcttaccacttgtctgcactctgcaccaatgtttatatttcttagctccttagcagcacgccagcaccaatgttcttaccagttaccaccagtccagcacatatctagttatctactgcctagtagtgacttgacctctatctgttgacatgttcagagtttgatggtggctgtggacaaagaggtgctggtgttgaggtcatattccctgggtccaatgtggttggcagtagatgcagaacaacaacaagaacaaccaccaaaagcaactacagatatggaccaagatgaatctgaatctggaggaggggaagctgctgctgctttttgcttggatgctaatctgctctaggtagcagactagcaggcaccgctactgcattaccattactacaatactgcttgagtgcttgtactgcattaccatttcagttatgctgctagtgctagcctgctactgctatatagcctatatttcaattccaatccaatttcagactttcagttctgctgcttcactgcttgtactactactct

SEQ ID NO: 198630 - DNA, 296 bp, Zea Mays
ctgcagagaagctgtgatctggtgcgctaacatttgtagcacctaccaaggatgagacgtcttggctgacagggacggtgccctcaaagaagtcatcttcagctccatcgggcaggaggtcaccaaatagatccgccccaccagtgctggcaccaaagtcgttccactgcacttgcttgacggcggtatggatgcctttctctgaccctggggacccaccctctgtcactgtggcagtatcaccagcattggcaggaatctcctgagcttcaggcttagtatgcaccggtacagat

SEQ ID NO: 198631 - DNA, 636 bp, Zea Mays
ctcaatcatctggttcaacaaatggtacttgcagttatggtgtagattaccttcgtcaagcaggttatactaaggttgtccagaacacattcattgaagcttctctaagattagattcttccttttggaagcttgaaatatctgattcccaatttgacattggtacatgtcatgacacaacttatggtcttattggtttgggatctcaactccagcagctatatggtccagatatgcaggatgctttagatcatctgcagtctaggtggaatagtgttcagcaagcaaacaagcaaaatatggctgctgatgcatcagacaagtctgagagcagtttggagattttggtcgattctggggattaccagtcagatggacttcttgatgatattattgagaatgcttttaacacagaggattgcatggacaccaatttttgggagaacaattaccatcacttatttagtagcagtgagacggatgatggatttgagctgaatgcggccacttcacatgtatttcctatatctactccagaaggcaatgttactcaaatatcactagaacagaacgtctgtcctgatcaaatcattgattcatattgtgtgcctgaatttcatcaatcattatcaactc

SEQ ID NO: 198632 - DNA, 242 bp, Zea Mays
gtggagggcttggtgtagcaacgccacgccagcaaacgtctcggcccgcctacttgaacgccatggtgccggccgctaggttccatacaatgtcacccagggtggccatccagtgtgtgcccagcaccacgtcgtagccagccaggggcatgacatacaggtggatgtcgaactccatctcgtcgatgagtaccgcggcctagcggaggaccccaggacaagcgacgcgttccccgttggcc

SEQ ID NO: 198633 - DNA, 557 bp, Zea Mays
aggtgtatgatcatttacttattcatgggatgactagcacatacactagatgggtacatcatggagaaccatttgaggctgaaattaatgaaaattatgatcatgtagatgaatatattggtatcaatgaggatgacggtatgaacgagaatgaagaagatgagcctgataatagaattcctgatatgattcgggagttgtacccaactaatgaccaaggtagagggaaatctatgtttgcagctttattagaagaaatgaagcatgaactttaccctggagcaccttacacacgtttttcttttttggtgaagttacttcatatcaagtcattttatcgaatcagcaacgttgcattcactgcaatactaaaactattatcatcagcattcccagattgctctcttcctgcatcttaccatgaagcaaagaatgttattaatgcgttaggacttggatatgactcaatccatgtctgcccaaacaattgtgttctatttcgaaaggaatatgcaaaacatgatgaatgtctggtttgtggtgcatcaagatggaaa

SEQ ID NO: 198634 - DNA, 795 bp, Zea Mays
tgtgaaagagcctgttccacaacagttggagcaaattgcagcagagattcttgtaccattgcaagtgacattccatcacttctctgacaaggtattatgtttctgcacactgtttttagttaaatgctacagccagcttgatactttctgttgaacatttatcgtgtgtgcaaataggttcttttgtcacctgatgggactaacttggaatatgagcagctcctactcatcacatgcaaatgcatgtatttcactgtaagcactgtttttatttctttttttttgtcttaaaaatatcatcacaacattttcttgaatcatgacaacaacacaataaaggcgaagaagaaaaccacaaattggtaccataaaactaagtatcattctcacagatgtatttagttattaaaaaatctgggatggtaaattaacgaaatggcgggttgagttgtttagcttcatgtatgtttgtgatattattataggattgttatattgggcttggctttacccatttgttttgtaaatccattagttgcttctctgtgcattgaaacttatggtgcagcactgcagcttatcaattctgtggcatgcatgctattaagtgctaactttttatcatgggtatctaattgttactcttgcaggtgaggtcatacatgccatctagggtgaaacaaattttgccttccttttgcaaagacatgttccgtatactagattctttgaactttaatagtcttattgaagatggatctaccatgaagctcaagattgcaaagagatgtctca

SEQ ID NO: 198635 - DNA, 245 bp, Zea Mays
taagaagcaaatgttgcaactttagaacagctagaaggcataagttgaactgcctactaaccgtctcgccgcttcgaaagaaaaaccttccaattgttcggttcttcaaatgatgagccaacgtatacaaaaaatgagccactatctcctctagggtcatattgcgtgtggcctttagcccaccaacatctctaagcatctcacacaaaataaagaaagttcttctatccatacgtagctcacta

SEQ ID NO: 198636 - DNA, 219 bp, Zea Mays
atcacctaatcagagtgtgttcttaaaggtagattcatccaggacaattttaagttggttcaacaaacctcaagactgcttcaccaacagaataaggctactttgctctacaagttggatattactaaggctttagactcggtttcatggcctttcttagttgaagtaatgatgcagcttggttttggacagatttggagggatattatttgtggtttg

SEQ ID NO: 198637 - DNA, 1136 bp, Zea Mays
tgaggctcggggtggttcaggtgataaggaaaggtagtggtaggaggatagatggagaggaaacggaaggagatggagaagggcaagtctgagctgagactggccatggaggagctccgtttgtgcggttcaagagatggggcggaggaggaggaggaggtgcaggttcagcaggtgaaagtgcaggagcagcacaagtcatccacaatggacctcctctatgtctccaagcagctcatccatgtccttggttcgtaactcattatgctctgtcatacatatgcaagttctgtactgaaaaacagctccattttcagtccagttattatttttttgaaagatccggttgcccggctttgatttgtaataaggaggtctagcgaccattttcagtctgggttatttcgatcgattgtcaggtagtttcagactttcagcaggtctagtgttctgatcaataaccatcaattgttttaccttgttttgttcatatacagtatgttcttctgaggggacttttcagtagatgtgatgttattattctgaatcttgctttgcattgagcaaaggggaaaaaaatggttgtttctgtatgcaggttctgtgtgcaggtgttgtgggtcaggtttagcattcctcaacgtgttgtcatatatgggatgtgacaatttgcacacacactttgtgccctgttggattcttggagggaatggatacctcaactaaataagtggccaagaggcatttaacctttttctgtcatggatcatgatgccaccaaattggacatgtgctgatatatttcttttagcctgacaggcagtgatcagtgatgtagtgccatagcgcttcccaaatgatttctttttcagacatcatagggcttgttattaaaccttttttttctgtagtggaagtctttagtaaaatttcctagaacagtacattgagaagatacaaagttttgtaaaaagcaacatattccattggctgttgctttttcgtgtgctactctctccactatatatctctctctttctgaaaaatcagagtaaactgacaaactctaccctctgttggatgaagatgagattggaccaactctgctagtcctgaggcaggacattcagcaaaat

SEQ ID NO: 198638 - DNA, 275 bp, Zea Mays
gtgtgctgagcagccggaatgctgctggtgagtcgagtgatgaggatgacaatgagataacagatcggattgcaatgtacactgacaagccaggtgatggcccgaggagcacaaaaggtgtattcagtgggataagtaacaggggtcctgccaccagtttgggggctttcagtgatggcagcaggaacgttgaggatgatagagatgatgatgatgacgaagaagaagagaggaaatgggaggaagagcagttcaggaaggggcttggtaggagg

SEQ ID NO: 198639 - DNA, 236 bp, Zea Mays
ccgcgacggatgctagagttctcagagctgcaatgaacagtggctttcaagtgcccccggggaagttttatttagtagatggcggttatgccaacacaccatctttccttgccccatatcgcggagtcaggtatcatttgaaggagtatggggcaggtcgccgaagaccacaaaactacaaggagatcttcaatcatcgccatgcagtgttgaggaatcatattgaaagggccttg

SEQ ID NO: 198640 - DNA, 268 bp, Zea Mays
actaactacggatcaccgactaaaacatggaggaaacacgacccacaccgctgttttaagccagcaactcatcgacttggaggaaggacaaggccttggcaccagtcatggaccagagcaccgcctcttccctaaccatcctaagggccgtgaccaagctgggatttttgtattggtcttttaagaccaccccttttttctgcttaatatataatggggcgcagttctcctgcacgttcgagaaaaaaagaacggtgttggttttcta

SEQ ID NO: 198641 - DNA, 1046 bp, Zea Mays
ggcagctccaatgttttatagcccccatcaagacagtggatccaacaaatctagtctaggtgcaagttcaggaactcctacaaactatgtggcggaaccaagagctgggaacacagcagtgatgacacaatttaattcgactcttcctgccagaaaacctgcagttcaggcaactgcatctccggatacaggtgtgccggttcaacccaccgtgattcctttaccagtgtccagtgcacctgctccagatggagtatttgtcggtcattctcctcaggctggggctgaagatcctgtcaggtaccagcagcaactattctcttatagcatgcagccagcacaagttctagtgaatggcccacaaggcattgatgccagtgcatacaaggattcaaatcatccagcagcggaaccgctgagagaatatgcacacaatcttcttcatgactatgccagagctatcgatgttcatacgcaagcagttcatttgggtcctattgcaccaccagaatctactgtgcatgggaagccttctacttatggtatcattgatcatgccaaagttggaaagctacctttaaatattgatggtagttctatctacaaatctcaagctggagggtatcatatagggattacaaatgcctttgctgctcctgcattcaaccaagaggaaaacatttccaggcacagtgagaagccacgttatgcttttgatattggtacacaaaatgtccatcctgacataatccagcaaccacccaatctggctgtccagagcaaccttatagctcccattgaaccacctggttctaatgaaaaggttactgtgctaccatctaactctggtgctcaggttccttctggatcacctgtacagcgtcctaaagaaatggccaatcacttggtttcaattccccccaatggcagtaacaaatttccattgcagtctactgttggtattgatcgtgttgaaggtacacaggaaccggcttatgcagattcacttttctcaaatcaggatccttggaaagcagtgggcaatg

SEQ ID NO: 198642 - DNA, 592 bp, Zea Mays
tctgtgtggcacaggagagctaggaatcgatcctggtagtccaccgtggagcggaacgacaggcgtgccacctcgcccaacgtgttcgtgcgcagaggaggcccaaaacgctgctggcacaacgtcttgaagtgtggccagtgtagtgtgggcttgtcgcgccgtagcatgacagaccacagctgtgtagcgctcgtgagatagtacgtggccatccagactttatccacctccggcgtcccttgattgtagaagaagctctcacagcggaacaaccaaccaacatgatcctctttgccgtcgaatgtgggaaagggaaggttgtggtggtgctggttgggagggttttgctgctgtgggtaagcggtatggtggggttcggaaaatcctgggatgggtgatggggagtgtgggaagggtatctgatggatgggtatgggcatggtagatgtgggtggcagcaaggctgaggttggcggtggaaggttggttgaggtggatcggagtggagcggctgtggtggtgatcggcggtgatggtatgggtggcgcggcggggtttgacagaggaggtattccgccataacctgaca

SEQ ID NO: 198643 - DNA, 393 bp, Zea Mays
gttaatcacttgggattttgactttgtcgctatttctttagtagatgatataaatgtattactagctaggaacctggtcagacaaactacgtaaaacatttattttcctacaaaagaaaatccactgtgccgtcactaaataaagaaaaaggacgttgaccagtgtaattggacagcagacaatttaaaactatccatgttgcaatgcaaccagagacaggaagccagtagtcaaggcttcctctctgcaagtggtccctgttccactcccaaagctgcaaaccaaaccatcgccttcagtttccactgtagcttgtaccgcaacgatacgccgcgggtttgcagtgcgccagtgcgtaataacaatcgaattaattacagctaaaaaatggg

SEQ ID NO: 198644 - DNA, 229 bp, Zea Mays
cgcacatttgaccatccatagtttgggatccttcacggacggcagcagagcttgctgttccacttctgcagcttcctcaccgtactcaatatgagtggatcgtgcgtatctctcccgcacttgtctctcaatctcatcaatatcctcttcctcatctctcataggaatagaatgacgtcttgagcccctaacaacatcctcatcaggaaggtcggccccagcatcatta

SEQ ID NO: 198645 - DNA, 751 bp, Zea Mays
tgggaattgtctattaggccatgtatagtcaatggtatggtttaagtttcaatatttttaactcatataaatcttacagctttcattcagttcatctattgctaaaatcttgtacgccgactgcttttcatttttatacctttttgtgtttcttaatctttgagatgactaacttttcttattattggatcttttttcttgaaattgaacaggagagtttgctcaaaaagaacaaaatcacaccacaaatgggattgtacgtgcttatgttgtcaaggtggataaggaatgggtctggttaactgtatcaagaaatgttatggctcatttatttttacttgatagttcttccgagcccagcgaactgaaagaattccagcagcgctttagtgttggccaagcagtgaaaggtcgtgttatcagtgtgaaccaggagaaaaggttacttcggttgaaggcacttgataaccaatgcacacaaccgaatatagatgaaacacaagaaccaaagtcctctgtgtttggacaaacaaaacaaggagatatcattggtggacgtgttcaaaaaattctacctggtgttggtgggctcgtcgttcagattggacctcatctccatgggagggttcattatactgaaattgttgactcttgggtgtctgaacccttgtctggattccatgagggccagtttgtgaagtgcaaggtcctgtctgtgagccgctcatcagaaggatcacttcgagttgat

SEQ ID NO: 198646 - DNA, 216 bp, Zea Mays
gcgtgttgaggagaatccactacttgagatgccacacttggaagctgcttctatcctacttataggtcctactttgaagaagttcaatgaccgaggtatgcctgaacatctttccactactattcactttgcttgattggctgaatttgtaatccgaaatattcatgtgaatgccttaaaaattttgggcttattatggatagaattagaatcagg

SEQ ID NO: 198647 - DNA, 215 bp, Zea Mays
ggtaaaaaattgtgtcccatacccgcccgttgcattggttgggtcgggtcgggccgagttttttttgagcggtcgggtcgggtggtccatgattaggtctagttggaatgtagggtcacttacaggtaagttaagggagttatatgagactaggaggcatgtaaatatcctatgtttccaagatatttaatggaagggttagaaggcgaaggagg

SEQ ID NO: 198648 - DNA, 1515 bp, Zea Mays
caacaccaaacagtaaacgacgcttccctccgccgccgtcagatcggagctcgactccgtgccccgcttctccgccgcgatggcggcgccaccgcgccgctccctccttgtccttctctccgggctcctagtcttcgcctcccttgttgccctcaccacagccatctacgaggaccaggtcggcctcgcggactggtacgtcaactcgctcgcctagatccgatctgcccttagcttaaggccagcgcgacgtatcgggacttcgagctcctagttgagatcactattagggttgtgttgtgaggagctgtgtgcggtgttactacagatttgttaggtttcaccgaatcagggtgtggttttacgagcgtacaactgaattctgcagtagtagcggtgggtgttgtgcattagtcctgtcgtgctggtagaaaagttcttttagctatttagcgactatgcagtgattgcatcctagttcgaaattctctgtttttttagctatttagcgagtatacagatggatgggcatgtgcttcatcattgaaataaagcgcagtctgcaggagctagagttagtttgtgttttatggatgaggtctaaggttatgttttgtaccatggatattagtgaactgcattccatgttcgatgtggagtcccttttggcaagtatggcttctgattagtccagtctgagtatcgcaacatggttcacctatgtatgcatgcagtgcaagtagtcaattcttggttcatgtattgcataagataattaagattaaattaggacttaaactttacctttagttaatgtattacttttgtatattttcttctaaatatatttagtgtatcggatttaagtttcttactttagagataaaatttcttaataattatcacgatggaagaatgcatttctcttttttcgtaaatgccttcctctcagttcatggtctcccttgttcttccttgaatcctcgaactccttaaaacctctagtatttaggctgtgccagcttgtacctcgttgtacagtagttatcctgttattatccacctgaagtctgagaatacatcacaacatgtcattatctgatttgctgaattgcttcagtctccatgattccccctctcttaataaggtttgtggctgccttgacatctactcttcaattgctcacaagctgtgctaacccattaagaagcctatctttgtttcatgatgtgtcctgccgtgttgtgttagttctatgtatgagaaaatcaatctttggtaaactgctgtggagttcgctattttgatatggaatcaggcaatctgttattgctagctgctgcacctcttaacatcaattgagttgtacctacctacatgcagtcatttggagtaatccaacagcaccattttaatatgttgatgttcttcacaggcatcagaagtacattggcaaagtaaagcaagcagtttaccacagccagaagagtggaaggagacgagttgtggtcttg

SEQ ID NO: 198649 - DNA, 627 bp, Zea Mays
tcttgattgcctttaggcagatgctccacaagatttacattatcaggctgcacagcatgagtcattccatgtctgtgtgtgtcaacaatagcagaagcattcacaacttttaacttcacagaggcattctttgggccctcaagatcaatatccagatctttgtgcatacctttctcttgtagcagcttaagaagccgaatctagcacatcctcatctgtttgacgtgtgacatcaattttttctttgctaaacgaatctgatcatatccagtagtaatgcactgaatagtattcacaacgtccaagagagtagctgtcagctcatctcctgaaataatctcaatgtttccttctgcggtagttcttttgccctcaacactgagcttcttgttgcccataaaatttctaactttcagtgggacattcgacgctttgagatctttagtgacattactaacttcagatgtcagcgcctcatctcctccatcttcactgcacacaatttgcttatttgccctctcaccatgagcaccagaatagctaattagcataacatttgtactgcatgacttcatgaagtcaaagattttctcttcaatcgtcaccatgattgcattggctgcagca

SEQ ID NO: 198650 - DNA, 762 bp, Zea Mays
gcgccttgaggtatgttcttgtttttatggttcatattcattatctgaggagtgcatgaacatcctcaagtgttagtctgcaaccatttcattggttttgatgtttaattttcagcatggaggtccatgtgagttagaagttcttggaaagaagggtatggtccaattaaatggaaggtccataagttcaggcacaaaagttccccttacaggaggggatgaagtcatattcaattcatgcggcaagcatgcttatgtatcctattatcatctctggttcattcagtcatacaatttctctgaagttacatctctttcttcatgactgtagtgataatggagaactgtatgatatgtgttacctgtttttcctttaccgactcacagatttttcagcatcctttgagtgacaaagctcctaaaacggtgccatcatctgctgttagtcttatagaacctccggttgctagcgtaaagcgcatccgtacagataagagaacaggagacacttctgctattgctggtacagagatgttgccatctacatctaatcaggcaaaggatgtagcagcagcacctcccgcgttcgccggagagaacagccaaagagtaatgctgccaatggcatcatctgcgtctgataaatcaaaagggcacactgtgagccctgataaggaatttgagaatggggaaaatgctaatgaggttaattctaacattgaagactctccaatggatgctgctgcagcccccatatctcct

SEQ ID NO: 198651 - DNA, 893 bp, Zea Mays
attttgggttctcaacttgtacctgctgctatccaacatggaggtgcaatgtctttggcattacaactttcttgcagtgttctggtatgatacaaggaagatatgtattagtacctttgctctggctattttactttgaatgaatgaaatttctagtttctaaaactaggcggctagtatatgaaaatgtgcaatctttctgaaaacgaggtttggttgaccagaagtatgttctcatttcaactgcagctattgctctgaaactaataacttgcatgattcatttcagctttcaaaattagaaatgtttcttatattattaaaaacataagtgtatggtttgatgaaacatgctttgacattcatgtttgtcaacaatatttagttgcatgggtgttgctttgaggagccacacataaatatgcaaaattcccagtgttgatatttgtttatgttaaattgatttatgttggacttcagtgcccattttctctgtagaaagaaaaatgacatccctgtgttattcattctggtatctaaatctgtgccgtgactatgccttctcaaaggctagtaatattgatctgcatttgcaggtaattgcttgtccttgtgctcttgggcttgccactcccactgctgtactggtaggaaacaaatgatattagaaattcaatttttctattgaaatatacatcacatcaatatttatttaggtgtcattttgtcaggttggcacttcattaggtgcaacaagaggacttcttttacgtggtggggatgttttggagaagttctctgatgttgatgccgttgtgtttgacaagactggaactttaacaattggtagacctgtgataactaaagtaataccttctagaggcatgggcgat

SEQ ID NO: 198652 - DNA, 268 bp, Zea Mays
cgagaaaaagacagcgagtggatcagagatgcaagtatgtgggagcggtgccagaggtgttgggatagcatgcgcgctcgaagacgctaaggtgctcgtaggaggaggtcatgccgaagagggcaaagaacggagtagccaagagtctagagagaatgtcatgaccaaagtggtcaagacaaccatgccaagtggaggcagaggcagcaacagcgagggcgtagggtgtggtaacacaagataagggaggtggggcaggcaagcgaat

SEQ ID NO: 198653 - DNA, 514 bp, Zea Mays
ttccatgtgcaattagcagtttcatccctaattcaggttgtaaggcatctgggggtaacttggcagcaaggtttaggagaccccatctaggatgaataaaatcaacaagaggaaagttgacaataaattctggcctttggcacaacagaaacgcctccaagacactgggtcggggccactctttcaatttcagcatcaacaagtggccatctcctcctttgctgccatctgagtagcctttgataaactgtttgagctcgatatctacctgagcatataaaacaagataggatatataattttgaagataagaggtacaacaaacattttccacatacagaagcttgtaattctttacttccacaaattgttcacttctccaaaatgccacttgtagtacaaatagtggatggccaaaactcaaaataagttagcacaggtggtatcacaatgaatcaatgatcatgcattcttttgagcaatatatacctctaagatctaacagtggtatgtt

SEQ ID NO: 198654 - DNA, 270 bp, Zea Mays
gttgattgcttctccaagtatgcccaattcatcacgctcgaccacccctacaccgcctctctgttgttcgggccttcttcgccgagatcgtacaccttcatgggtttcccacgtcgataatcagcgactgtgacccagtgttcaccagcactcctcccgctaatggagcatgaccgcctgccgcccgtaccaccgaagatcttgcgcgcccagctccatcgtggcgtgtggcatgtgttagtgcattgggttggtgtggctgaagcatat

SEQ ID NO: 198655 - DNA, 249 bp, Zea Mays
gccagccgcactgcccccacccacgcagccacctgcgccactccctccactcgcccggcaaccaatttcttactagtacggcatgccgatcgaccccgggccttcatccaccgcatcaccgaccacagcccccatccatatgatccgcttcccaccatccccatcccccatcccatcttgggcgcagggcgcgcctacggtttcaccaccagtgtactctgaggcactcccgcgaccggcgctcacgac

SEQ ID NO: 198656 - DNA, 250 bp, Zea Mays
gtggtccatgcgtttgagctaaacgatacaggactggctgtagcggactcctgcagcttgagccgaaaaaatggtgtctgccggctaaatccactgtcctcttgcaaatcccatctccctctcgccgccgccgctgcctccgctccgctcccctccccgtcctactcccgctcccactgtcccacccaccacccgaaccttaaacccccacgaacttcgcccaaaccctaaacctcgtcgagccgcagcc

SEQ ID NO: 198657 - DNA, 710 bp, Zea Mays
atcccgcctggcagtgtcgctgcttcatcgcatcaccgtcccccacccggagcggtggctgtctccccagtgattaaccaccatcgcatggtcacgcgcgccaaggctggcttccgggtgccagcattgttccacgccgcccctctatctccaattccgaagactttccgtggcgctcttgctgatcctaattggcgagctgccatggaagatgagtatgctgcactattgcagaatcacacatgggatctggtacctcgaccccatggggccaatattgtgaccggcaagtggattttcaagcacaaatttaatgctgatggctctcttgaaaggtacaaggctcgctgggttctccgtggatttacgcaacgacccgacattgattttgatgaaaccttcagccctgtcgtgaagcctgctactgtgagaaccgtcttatcattggctgtctctagcagctggccgattcatcaacttgatgtcaagaatgcttttcttcacgggactctttctgagactgtttattgcagccaaccctcaggctttgaggatacagccagtccacaacatgtttgcagactcaataagtccctctacggactgaaacaggcaccacatgcctggcatagtcgctttgccactcatctgctttccctgggattcatcgaggccaagagtgatacatctctgtttgtctaccataaagg

SEQ ID NO: 198658 - DNA, 655 bp, Zea Mays
ctggaaaatgccctttgaattcagcgcccaccctaaaagaaaagacgaaatgtttacttcttcatcatcatgatgacagtcaggtcaatttaggaagcgcagccggctttccattcatttcatttgtctcgtgattcatgtgatgtcatctgttccacttcattaccggtcgttgcctcgtgattcatgtgagttgggttcatacaccgtatccatgtggttcacacaccgtcccaataatgcacagaaagatccactaatatcctgaaaaacctgaaatatctggatccttgagatccatgaagaaagagcaagtcctgtgtttaatcaaaggaagaaaaaaaactaaagaatgaaactaaaactttatccctccccccatggccccatccatccttttccttccaaataatgtacatcatttgtagctacttcaaaaaaaaaaaaaaaaactggccctcatgctagttgttgagttgacactagcttgcatgtttttccttcctcctgtgtagtgtgtactactgtatttacatctatgtttgtatgtatagactctaacgaatgctttcgctcatcgatctgctgcgacgacgactgcgacacctggggtgggtggtgactgcgaatagtccgcacgctgcgtcgtgctgtt

SEQ ID NO: 198659 - DNA, 252 bp, Zea Mays
gctaaagaaaacttaaatcttcctctggatacaccagtgaggtatgctttatttggaacacattactatgcatatatactgttatacacgtgtttcttcttggagttctcatgtttccgattaactgtacaatttgcactatgttacaataactgtgaaacagtttggagcacgatatccatgattcagatgatggtgctgatgaaggagcaattatctctactgagaaaacatcaagcttcaatactccgg

SEQ ID NO: 198660 - DNA, 1746 bp, Zea Mays
ctggtgtcgtcgcggcctgtggaggcggtaggggacagcgacatctgcagccatggacgacagcgagctccatgaagaggagaacccaaccaatagtgccgtaggtgagcttgacgatgcccaggacttcatcacaaccagttatgcttttggtttggtgttggtgcaagtgccgatgtcgggccgattagggttgtcaaatagctgggctctgatgtgttgggtgtgctatgttagctagtgtatttgctgggctttgtgcacggatctgtggtgcctgtttacaaatgggatttgataagccgatggcatgctgtttggtgctatataggattaaatgttctttttttatgtgtggaaaattttagttgctggagctacaggtagcacccatgtaagatgaggtggttagcatgctgatctgctatgggcttgtaattgtgaagttgcaacctttagagtcaggctttgagaaccataaaactgcaaaatggttttgagtatgaagatgatcctctgcagggttaatggttccatgatggtcttctgtattttatgtgacgtgttgaaattaatttgatgaaatgttggttgaaactagcattgcgattctccgatgctgcattttaataatactgaaaacatgtaaccctctgtttgggaatgcattatgtcatcattaaccctcagattcttagttatcttaacaatttcctgaggtcactccaaaactggactcatttgaagctaagtgcaattgattgattgaaactagcaatgagtttgtttgaataaccccatcttacttattagttattactgttgtcatccttacagatgacgatgacgacgaggattatgaggagcctggtggaggaaatcacttattggggtttatgttcggcaatgtagatgattctggtgatttagatgctgactatcttgatgaggtagacacttctttatctgtttttgttgacatgcaaatgtcctgttttttgttgtttttattattttatttcatgtgtctgtctctaggagatgacattcattttattcgtttcaccttttcaattgtgtggatgtctgatatctgtatctgtttttgatcttagtgcattctcaattggtcatgattttatacagatttaacttctttgttggttctctttttcttaacattttgatccttagacttgtgttttagggtgctcggttgctttataggaaccatcatcactataagaaccatattcctctgattaaattaatttaatttgagttctggaaatgatgagatagggaaattcaatgcgacgaaaccaaatttctcagtccatgcattgtaattttctcgtaatttggatgttttttgaataatagttagtagaactcactaaattttagccagaataaaggttagttgctaaaccttagggtactttggttttattgtttttccattgtctgcaggaaacaaagtcattgtttattgtttagttatgtttataatgcaatttggatgttgcatttatttatacttttattttgcttaactcaggatgcaaaggaacacctttttgcactggcagataagcttggtccatctctcaaagacattgacgtaagttatcttatgcgtatagttaatcttacttatctatttcattaccaaacaagttaatactatgttgtttgctaattagctaatgaagtcttctccagcaccaactgatccttccgaac

SEQ ID NO: 198661 - DNA, 1059 bp, Zea Mays
aaaatcttgcactcttcttcacatcattttttaaggtaaggttgtccctcgaatactagttctccagtagaagatcaatttagggtagtagaccaatatttgtatggatttgtagagtgttctctaagttctgtaactaaaatgcaacacaccatatttcagactgtactttatcatcttatgttgcttgtcattttatacactaggaaaagaacaaatagagaaatgacaaagatactccataaaaacaaatgagtctccaattggtctaaccccttccctttcatgctaaatgcagaatcacatgcgtatactggaaacaactcaagaaaatattgctgctttgcttatgggtctcgagtaccttattggaatttcatatgttgacgatacagaggtttttaaggtagggatgctgaaatatttttgtcacagaaatatgctgtaagaccatcttacaacattggataatttacaggccttcttatgaaactttacaggtgtccttggattactggaatgtatttgtattagagctatttgaagcacacaatcaaatggaacctgcagtaactgtaagcatgatggggcttcaggtgcttttatttaacttttggaacattgccttaataaacgaataatgactttctacttatcatacattgttgtgacgtttcttcagcgtcctttcccatttgggttttatgatagttttagttgctcctatgtagactgcctttctttgggatctttttttttcttagttcgatgtctctacttagtgttttgttctgactttgaattttattaaaaccatgctgtaggcgcagatggttcctggaatggtagatgggggcacagctgttaaacagaggagacagctttactctggcccactctcgaaactacggatgctgatgatttgccgtatggcaaagcctgaggaagtacttattgttgaagacgaaaacggcaatattgtacgcgagacaatgaaagacaacgacgttcttgttcagtacaaggttagtaaaaggattgcctaatttcgtaccgccc

SEQ ID NO: 198662 - DNA, 299 bp, Zea Mays
ggagcagaatctgatggaggagttgttggctgcctacattgtcatcttcgcgaagccaaggggcctccctccagcacgccgacatgaccactggatccatcttcttcctgggacagcgcccacggttgtgcgtccctatcgttaccctcagctcctcaaggatgaaatcgagcgacaatgcgacgccatgcttcggcaagggatcatcagggagtgtacttcggcattctcctgcccagtactcctcgtcaagaaggcggatggcacatggcggttctgcatcgactaccgcgagctca

SEQ ID NO: 198663 - DNA, 471 bp, Zea Mays
ctcaaagaaaccgccaaaaggttgcaggcttggagcgaaaagaaggttggtcacgtgcattctcagcttgctttgaccaaagaagttctccacagacttgaaatggctcaggatattagagtgctcagtcaggctaagatttggctcaaaaaccggctgaagaagcaagctttactgctttcctctctcaagcgcaccatggctaggctcagatctagaatctcctggttaaaggagggagatgctaatacaaaactgtttcaccttcatgctcgtcatcgcaagaggaagaattgtggctaggctggtggatggggatcataccctaacaagtcatgctgaaaaggctgcttgtgtggatcgcttctataccaaccttattggaaaatgtgttgatcgtgatagggtgattgatcttgaagccctgggattgccttcttttgagctgtctgagcttgatgcccccttttc

SEQ ID NO: 198664 - DNA, 267 bp, Zea Mays
gcaaccaaccgaactgagtggacacccacacgaagaagtgagatatgtcggttaatatgtctgacttatgacgaaggggaaaggcctacaagcagttagagaagtcatccatgatgaccaaatagtacttgtaatcgaaaatgctcaatatccgggatgcccaaaggtcacagtggatgaggtcgaaggggcgagcggttctagacatggaagaggggaagggagagaatgctgggcgccatgagcgtctgcacgaggtggtgcacc

SEQ ID NO: 198665 - DNA, 391 bp, Zea Mays
gcatcagattctgcaaaggctcatccagtcatccagatcagcttccacagctagctctccagaggcatgtctcacaaagataagtatcgtcatcgtcgacctatcagcatcgacagaatcccgattgtccttagtttgaagaaacacccctccggctctgttgctggaaggagcatgcatcttgagataaattgctctgctggtgaatcctatagtagtggcggtaaatcatacagtcttggatataaagttgtaggcttacacgttgaaagctagccagagcgacacattgtgtgcgaagcaacaaaacacgtacggagagggagggggaggaaagagggaggtcgcgacaaaggacgaggtcaaggactgtagcaaaaccaagcggtca

SEQ ID NO: 198666 - DNA, 278 bp, Zea Mays
cctgattggctttttctatagaagaatccctgttagaacatttggaatccttacaaccacagcctgcaccgcattgtgcacctgagcctctgcactcgcatttgttggtcttgcatgaggaggattttgagcatgaacagccgtctgatgaaatatatttgggcaaaatgcacttttcatctgagggcttctctggttctgcattgccttgtgtattttgacaatccaggttaggatttgaatggctagacactcttctctggtgttttttggctttc

SEQ ID NO: 198667 - DNA, 277 bp, Zea Mays
gttgaattgtatcggtcaaaagattttttgccattctattcagagcgtatatgactaaagcgctcacaagatagacagactaaatatgatcctctaaatggtagtataaaatctgggagaaagaaaattccttattttgagatgtgtaagtttgtacatgcatggctacttgtcctcgattggttcgatcagactgtattagctacaagatttttttcttgtaattgtagtagggtgtatatgactaagacactaatataggtgtacgaaggactag

SEQ ID NO: 198668 - DNA, 922 bp, Zea Mays
aaacgtgagaaatgtctctcggtcacaatctgtcgccgcgatagtcttcatctcataaatggttaggtgcacaaagctagagatggtgctaggctaactgattggaatacgactcccaacatatctgaattttttttttaaataaaagaaagaaagaaagaaaagaaaatagcagagcaaattgagggtcgtatgactgaagatcgaaacacacgcaccataataattcaaaaccaactcccggcctgaattttctcctccacttgggagactttaggctgcagacatgaggcgccatcagcctggcagacctccgctgtcagcctgccttgagaagctttgcagattgtcaaacctcaagtaccaaccagccaaccaaccactgcactagcgtgtcccttaatctgtacaagtggcgatgaacaagcacgtacacccgttcagcacagctgacaagtccatgaacaccgagtcaacggcgtacgagttcctcgagtttgaatccgtttcatccggtcggtgtagcttcgtgtcaacttcacttattgatgcccatccatgttctgcccgttgcaacgactggtcttacatctctgactgctggtggctctagaacaagaaccgggaactgacaatagcattgctcactggcagctgttattagtgtatagcttgttcacaatttcgagataaaagatccaatttcgaatagcgttggaattgttctgcaagtgttttcctgatgatgcctgtgcctgtgtgtgggactgggacatgggaatgcagcagcagaagaacgcgcacgtgcccaagttcggcaactgggacagcgacggcaacgtgccgtacacgctcttcttcgagaacgcgcgcaagggcaagggagccggagccgccggcggcaggatgatcaaccccaacg

SEQ ID NO: 198669 - DNA, 323 bp, Zea Mays
ctgcggcccacgacggcggggccacctcctctgacaccgtgggcggcgtgtacggcgtctcaaccgcaccacagtcagaaccgggccacgcaccatccccacggtgctctggcatgacccgactgacccgctcgtgtctcagctccaccttcaggctgggagtgtccagaacattcgtctcatggttcctgtcgtcctggagccagagtcgccgtcctacgcacgctggcgggacttgctcctccttacccttcgccgctacgccctggatgaccacgtcctctgcgaccccaccggcatggcgccgactgccgcgtgggtcc

SEQ ID NO: 198670 - DNA, 658 bp, Zea Mays
tccgtaatcgtcgccttcgatttgttgctgctgcagctgctggccaggccatactactagagagggacgccctcccttcctctcgcttggcttacacttctccccatcccccaacacaaacccaacacaactccgccgtgtcgcctacacgcactggccacgaccaaaccctaggcgccgccgcccccggggcccccaggtacgcctctcgcctatccgccgccgtgattccgcctccgcgccgccgtcgtggcgctcagcgactgagagatacgcactagggttcgctgcgatttcgttggtaagggtgatttttatgttttatttttgttccggtgtgtgattggatcagggctgtcgtagggaggagaaggaggaggagatcggtgaggagagaaggggatttatgtcccagcgaggggacaggggcgaggggcacgccaggagacccggccggtccagcagcttcggcggccaccgcggaggcggagtcggtggcgcgggcaagggcggcgcgggctcctcaggccagcctcctctctcatccaaccgcaggtaaattactgccatatttgattgattgccctctgcctctgcttcgcacgattggttgatctcgccagggatgatagggttttgatgagaactttggatcttg

SEQ ID NO: 198671 - DNA, 354 bp, Zea Mays
ctcgagcttgctcatgacgcgctggatgtcccccctgacgcccttctccaggttgtactcaccatgaagcagcatggagagcttgggaagaagggcgcctagcgctccagttgcgaactccatggctagctagctcccaaggttgcagacgcatgagatctagcacaagagactaaaagggatgagatgttttgttggaattcgaatcagctgcttaccttgctgtgctcgcttatttgacaagaacttggtggccggaggatatagagattagatcaaacagagttggacggtggcaagatttcagaagtagatttcatcttcatccacagaagaatcaactaaggaatctct

SEQ ID NO: 198672 - DNA, 324 bp, Zea Mays
atgagatacgccaagaaaggagggcgcaacagcagcagctgcaacagcaaatgcaacaacagcaacagcagcaacaagtgccattgcctccaccaccaccaccagttccacctcgtgataagcaccgggagtttatgagtcataagccaccgaccttcgccagttctccagatccacttgatgcagatgattggctgaaagcaattgaaaagatgctcaacattgcacaatgcactgaccgagagaaggtcttatatgcttctggacgtctgactggtcctgctgctgactggtgggattcttatactgctgcccatgatgctg

SEQ ID NO: 198673 - DNA, 346 bp, Zea Mays
ccggaagggatgagcactttgccgcccggtgtccaaaacagaagcatcgcaggcaccgagtaggccgccggcaggaagcaacgaggtgggaggtagagaggcaattgtagcaccgacctcggaggtccacacgggaccctggacgagggagatgctcaccccgagacctctgcctacgaccaaccacctgccagccttcctcacccgccgggagggccgcaggagagggactgacggcgcagagactcgccgagggagaaggggtggctgcgcaaaccgagctggagaggacagcctctttataggagcgtggagaagaagaggaacctccagccgaggagtcgcc

SEQ ID NO: 198674 - DNA, 438 bp, Zea Mays
acgcgagaacactgaacacatgcgcgcgagtcgcgcgaatcatggagcaaaagagctctggacacgaacacatcatggccaattcaacgacggatagtagagcaaggttttttaccgcgagactcgagtttcagctgtagcggtaccagatcactcgaaaaccatagaaaaccgcaaccaataagaaaacgccgatcgaaaaaggggaaaccaaactccatgtgacacagacgcgagtgaagaacacgggaattctcccacaactcgaccagctccgatgaacaggacccatctccgcccgatccaaccagaatccccgacccactacaagctccccgaaacggctccccactccgtcgaaattgggaggccgacttatccgaaccccgcccggccaggccagccgcccaaaaatggaaacgaggccatcaaacccga

SEQ ID NO: 198675 - DNA, 216 bp, Zea Mays
gggtggtgctgaatacctccatatcacatcaacaaacgaatgtgaaacaaaagtggtagagaaagcgcaaggcacctcctctgggttgtattactcaagaattaaaccacccccagaatttgttgcgatgtctactatatttaaaaattctgagtcttttcgagtatgacatgaaagactaggacaccctggattaaggatgatgcggaacatcat

SEQ ID NO: 198676 - DNA, 356 bp, Zea Mays
gacatcttgatctgtatgccctcttgcgtattcttcttcaattgctcctgggtaactaagcatgttgccttttgttcagtcatagcattttcaactcccccaaaagctttctgcagcaatgccatcgcttggactacaacttcattcggtctgggaataaattcctcttgtggcttgacctgttcaggttccttagcagcttgcttcgacgtctcgtgtgccactgatccctctgcataccgattacctctctccatgtaaccacgtcctgcacctcctgagaatcctcgtcctcgatttgtattctcccacgttcttccccttcctctgtatgaggaaaaccttcctctggcgcg

SEQ ID NO: 198677 - DNA, 356 bp, Zea Mays
cagcgtcatatgatgatcacaaaaatattgtactattggcctttgaaattatagaaaagattttgcgggaatactttccatacattactgagactgagacaacgactttcaacgattgtgtgaattgtcttatcgcgtttactaacagcaggtttaacaaggatataagtcttaatgcaattggatttcttcgattctgcgcagcaaagttggccgaaggtgatattggatcctcaaggttgaaggacaatccttcaaacagtaatccaccctcgcctcatttgactaatgatggaaagcaggaatgcacagttcttgttgacaaggaagaccatatacacttttggtttccttta

SEQ ID NO: 198678 - DNA, 446 bp, Zea Mays
cgccgctgtcgcaccctcccagagccctgcacgccaccgcttactctccagtctaaggcgacaaggacaccttgctgctaatcagtgccttaccgcttaagcgtcgcttaacgaatgccttaacaactatgtccagcccaacaccacgatattaggttaacctcactgttccacgaagccagcagccgccagttctccttccacgcacaattgcctcttcgtcacagcttctcgctcaccacagccgccctgcgtgccgccgccgcgacccgcgccccgtcaccacctctttcctgcgccccgccgccgcctcttccccccgccttagtcgtgcaacaaggcaacaggacgcctttcttgctcccgatcgccttaccgcttaggtgttactcgccttaataactatggtagcacccccacgctagggctgccgccggagccacgcc

SEQ ID NO: 198679 - DNA, 688 bp, Zea Mays
tgactgtcgccatcatcaattcacatccatcatcattgatctacatgttgtcattattgatctacatgaccaagccatcaatctacatgccactgttgttgattcgcacgctaccactagatctgcgtgggaggttgagagagagagagagagagcacaagtagatgagggataaagatggaaagggaatagatcttacctgcttttagggttgataatggtctttgaccagtggcgaagctagagtaaattaggggagggtgcatataccttgagggtgcatgataacaatttacaggtggtgcatatatggtgaaaatttggtccaaaccactagatttccaatttttcgtgggtgcatgtgcaccccctaatttctacgtagctccgcccctgtctttgacatgtcaacgagaagggttggagggtgtgtgtagggcaaaaaatagctcgaggcttgcaggccggctcaagctccatacgactcgctcggtttatagtgactcacaaactctgaccgagtctatcatgtttctcaagtttgatccatgacttagccgagtcagctggctgtggctcgtgaactaagtccaaactggcataacagagaacaagagcctaagatgttgtctaactagacaaagcccaagacagacccaaactagcctaacaaagcccaagactgacc

SEQ ID NO: 198680 - DNA, 211 bp, Zea Mays
cttgaacaggatctgttctataggatcgtaccgttgcatccttgattgataaggaggcaagcacttaaacctggttgatgaaccatgacctgtgggccagagcgtgattaacggccaggaatggctctgatgccctattccagtgctgtagatgatcgttcctcgccagttctaacctagctagggtggctcatgggttgtctgacaggtt

SEQ ID NO: 198681 - DNA, 237 bp, Zea Mays
ggagagggtaccgtcggtgctggagtacgtggtgatggagagctcgctggagccggagtcgtggctagattgcgtggtggcgaagagctcgttgtagccggagctggagagcgtggcgctggagtcggtggagacttgggggctggggtaggcctactcggagaagggtcgcctactcccccagctcccttaaagtggacgtactcgatggtaaagtcatcatacgtcggagtcgtg

SEQ ID NO: 198682 - DNA, 298 bp, Zea Mays
gagattggtaaatttgctcacatgtcttaacatttggccttttattttggagttaacatcagtggtctgagcttgccttgtagaagttaatctcaagtcatcaagttacattagttcaggcttaaaagatgtactgcttgccttgtattggttacagggccatttctcaaatcagtttacatccatgtgaaatgttagtgtagtatccatggtaagggatgaacgatacctatctgagcctttggagaggtgtcttatctcatatacccttggcatgccagcagtaaagttggggaga

SEQ ID NO: 198683 - DNA, 411 bp, Zea Mays
cagccgctccactcccataaacctcaaccaaccttacaccgccaacctcagccttgttgccgcccacatctaccatgcccatacccatccatcagatacccttcccacactccccatcaccaatcccaggcttttccccccaccatatcgcttacccaccgcagcaaaaccctcccaaccagcaccaccacaaccttcctttcccacattcgacggcaaagaggatcttgttggctggttatcccgctgtgagagcttattctacaatcaagggacgccggaggtggataaagtctggatggccacgtactatctcacggacgctgcacagctgtggtccgtcatgctacggcgcgacgagcccacactacactggtcgcgcttcaagatgttgtgccaacagcgttttgg

SEQ ID NO: 198684 - DNA, 571 bp, Zea Mays
gccgggaaccgcagggggtatagtggaccagagctgttacatctgaagatctcgcgccgagtgggtagatccttcacagagcagccaaaaggatcaaattcaacagagcaattattatcagtggtaaattgacggacagaaatcagatccttaatgagggagggggaaactaaaacattgtgaagagaaagattatagggaagacgggtggtgccagtggaggtaacagggattagatgaccgttgccaacgacaatatgagcaggaagatgctgggaagaggggggatgagatattataccagcgtcagatgtcatgtgactggaggcaccagtatcaaaatgccactcttgttgaggcggctgctgaagagtgacagtttggaagttggcagcgagggtgtgttgatcccagacgggtgcaggcgtagaaggatcggcgtaggcagggggcggcccatatgctgcagcgggaactgcccactgaccaggagtgccggcgacgaaggcatgcggtggtgggggcgaggcagcaggtggacgaggagtcgaaggtggacgttggctaggcc

SEQ ID NO: 198685 - DNA, 330 bp, Zea Mays
aagatctttgcaggcaatcaaaccttattttgttgaatttggggtctaacatgcttacaggaaacattcctcgtgggatcactaactgtaaaacattggtgcagcttcgtctcagtgacaacagtctgacaggaagtttccccactgatctctgcaatctggtaaatttgacaacagttgaactaggtcgaaacaaatttagtgggcctattcctcctcagataggcagttgcaagtctcttcaaaggctggaccttacaaataattatttcacgtcagagttgcctcgagaaattggtaatttgtcaaaactcgttgtcttcaatatct

SEQ ID NO: 198686 - DNA, 327 bp, Zea Mays
ttcatcgccgtatgaagcatgttgaagttgattatcactttgttcgtgaacgtgtggcatcgcgacaacttgatgtgcgcatcatttcttctagtgaccaagtggcagatattatgaccaagcctctagcaggaccggctttctctaagatttgtaccaatctgaacttaatttcatattgtccagattgaggggggatgttaaacatagaaggtcatgtatattaggaatgggtcatgcgcacttaaatccgttgattgaggctcggttgattgaggcctcctgtaatcttggcatgtcaatcacgacattgctgccatgtaatcc

SEQ ID NO: 198687 - DNA, 788 bp, Zea Mays
gatctggagctgcagcctggggagaacgccacagtcaccttcgttttcttgccaaagttgttaggctcttcatcagctcatctagttgtgcagacaaattttggcggatttattatacatgcaaagggcatggctgtcagttcaccctatcagatactgccattgacagggatagatgttcttataggtggacagctagagaggaacttatcgatatacaacccatatgacgatactctctatgttgaggaagtgtctgtttggatgtcttcattggagagcacaaggtattcttctcaccttgtctgccagctgggcccctttgatggagcattggagctatcctcttcacgtagcaactggtatacagcaagcagtgaagaatttagatggccagtggtcaatatcaggcctagtgaacaatgggaggtgcttccttcaaagaggaacactgtgattgagttaaagctgcaagctgtttctgaaggcaaggtgtttggtgctatctgcttgaaactgcgcaattgcactcttagtacgactcatgcttttgtgatacctattgagctagaggtgcatacacgaacttactatgattccagtggcttaattgctgtcacatttgagcatgtatggacttgtgatgaaactgggccgatcttttcgctttccttacggaatgatggaccaaagttactgaggattatagatattactgagcatgccataaagggcccaatgatttttcaggttaaatacctgaatggattaatactctaccctgatac

SEQ ID NO: 198688 - DNA, 1864 bp, Zea Mays
caggggctcttctgctaaggtggcagtgggttcttctcaatttccagaaggatctgctgaagtggatgatggaaacagcgatgaatgttatctttgtggcatggatggcaacttgttatgctgtgatggctgtccagctgcatttcattcgaaatgtgttggggtggtggaggatcttttgcctgaaggtgattggtattgtcctgaatgtttgatacggaaggatggatctagaaatattgcaaatccaatgagaggagcagagattctaggaactgatccacacggtcgactatacttcttcacttgcggctatcttttggtgtaagtcaccttggactccttacatgtgtatctctctgaacgatcttttgggctctggtgttttttttgaatgcccctctgctatatgccctcctgtatttttcaaaaaaatctaaatgcgacgattatgttactctggtgcactaccactcaatttatcaagccacctaggatataggtaggatgatgtaaactgttgcatttttctcttgtctatgagcttcacctaggatgctctatttgtcttgttagttccttagagcaactcaaagaagaagtctcatatttaagccctaaatatcgtttaggacttgatttgatttgttttaggaccttgaatatatcatcatctccaacaactgggccttaaacgtctgtttttcaactaatttcaccttcccaggccacacacacgttgtatcctgcgctttttcccttcgcgcgcccagtctctttggcatatttaagcaaggtgtggagttgtggaccaagctggccgctggatgtgggactcgcgcgacgtggaaaaaaaaagataggactcggatggccgggtactatatttaggaccctagacttcgagccctaaaccggtttgatgaaatttggcaaaataggacctctgttggatgctgtttttctcccttgagccttataattttttttgagggggaaaggctgtaggggaaacccctacagcacgccaggttctcggatcaatagggtgaagggtcgaggaacggaaacatagtacatggtaaggtacttaaaaagatattatcagtacggggacaagattgttcctgcttggtatgcagagaagtgtactatttatattgcagaagtgagacatgatttatttacttttggacctatcctgtgtgtatcaaatgattactccttgctgcattaataaacaaatcaccttctgaacttgcagggttgactcatgtgatggttactcaccatgctattattatggtcagatcgatcttcatcatcttgttgcagttttgaactcatgtcatccttcgtacagctcaatggttaacacaatttcttcattttgtgatactgcaatcaagtcacccaatcttaacagtcgttaccagagtagcagggaatgtagtacatctgatgctgagatagactcaaaacatttatcattattgaagcaacctagtgatcatgatcagtttaaggtagaacaaagaagctcctttgaacacttgaattctggaaaaatttctacctcaaattctgatgatttggatcaagatttgtcacagcatagcattaaactaagatattcacttatgtctcgaagtggaattgttgctgaaggtgatttgaatcaaatacctgaaaatagatcctctagtgccaagaatgataactgcaattccccaaaagatattgtttattcacgtgctaatggttctcttgcaaagaaccagaaagattcaccacctaaagaaaaaccaagagattggcagctccattctgatcctgctaggtacataaactattacagtttcgg

SEQ ID NO: 198689 - DNA, 413 bp, Zea Mays
gctggacagggtgcgggagctgctaaatagggcagtcaagcaggaagcctgggcagttgactctgttttggccaagtacctcgcggcactatgcaagagtgggaacatggaggcggcatgcgaactgcctcatgtagcaagcagcaagagccatgtgggcttatatcgctatgagtcaacatacaagaacctgattcgagcattggtattgactaagagggtggacgcgctgccaaggcttatactgcaaatgcaagaaatggggcacatcccaagccggagcctctatgtgtcagttgtctgttctttgtgtgaaatgaataggtatgccgaggttcttgatctgttagacaaccagttaatgcggaatgagatccatcccgttgtgtgctacaaccacttcatttctggtg

SEQ ID NO: 198690 - DNA, 273 bp, Zea Mays
gcagcatacactggtgccatctgaacaaaaacacgcgacgacgaactcgttcgtaaacaaggactggaatactggatcgatcgggagccagccaacggagttgctaggtctcggagaaagaaaggctcgtttgtcttgttgccttttgctgctgagcgagcgagcgagcttaattcgtgctgtctgtgtgtagcagtagtagctggtgggtcgatgcagcaggagcatttataaccaccgatggagatcgatcgagcagggttaaacaacgct

SEQ ID NO: 198691 - DNA, 549 bp, Zea Mays
attgttcgtctattgttggagttggaacctgaaacagatccagtgtggcattatttaaatattcaggttcaattttaatctaaatatgcgtgctggcttttcaattctgtgacttctgtttgtattttctttttatttataccataatatttcctatcagaatagcaggattcatggattgtttgaaaagtgtactcaagatcatgactcgagaatggaagttttgcaaaataaaattcgcgaaaaagtgctctctgattcgaagtggaggcagctgcaacaagattcaaataaatctgtgagcatattactttctgtagttcaacatatcatatttacattctattttgtgtcttccctatgttgatgtagacctttttgtttagctggaagttgattctaccattggtgattctcctcgagttgatcagttgtcaacaaactttatggctgaggaagctgatagtttaagggccacctacattcgtaggctaacttctgtactgatccagcatgttccagctttctggagattagctttatctgttt

SEQ ID NO: 198692 - DNA, 212 bp, Zea Mays
aaaacatttgatattctgtaaaggtacaacagataagaaatgtccactcaagatgatacatatcgcactctggaatgcatgctatgtgacaaaaaaggaaagccattgagtcttaagcaacacttcttggaaagaataacaaacaacttctccgaggacaaccttgttggccgtggaggatatggagaagtttacaaggtatgcgataattt

SEQ ID NO: 198693 - DNA, 506 bp, Zea Mays
cttttgtggtataaaaggtgatctattgttttgaattctttatattccaactttttagcaattgtacggtggaaaaaaggtgccttacaaccttaacctatatttggacagttctctcacgcaatttggctaaatttcccatggtctttattttactttgagaaatagtgtggcataatgatgtatggtgttatatttgagtggacataaacaccatctaggtatgccttgaatagaggggattattggaaacctggtatcacaaaagtcattagctagcccaataacgtcttcatccactagttgcactctaataccctctcgtgcgaatatagtgccctcaaaatcatagaaacgtcatttgtggtttaaaaggtgatctattgtttgaattctctatattccaactttttagcaacgatatggtggaaaaaatgtgccttacaaccttaacctatgtttggacagttctctcactcaatttggataaattttccatggtcatt

SEQ ID NO: 198694 - DNA, 519 bp, Zea Mays
attcatacttgaatgatctaaataattatggctggggtgacaatatgaaaaaaaaagatatagatcatggttgtttggaagatcatttcggcattgcaccattctatattcctaaaggccattttccttgtaagcaacaggactttgaaataatggcgcccacgaccagtaagaatgtcttgcgagttttgcgtggtatgcaactacctaaacctctccttctggaaggtagtcctggagttggaaaaacaagtttaattgtagcattagctggattttctggtcatgatgttgtacggataaatctatctgaacagacagatatgatggatcttctaggttcagacctgccagctcaagggggaaatggaatggaattttcctggtctgatggtattcttctccaggctttaaagaatggaagctgggttcttttggatgagctcaatcttgctccacaatctgtcttagagggcctgaatgccattctggaccaccgtgctgaggtcttcatacctg

SEQ ID NO: 198695 - DNA, 307 bp, Zea Mays
acccaatactagcaggtctgtactattcccatctccatcacattcttctccaagccccagcagcagatctcttgagagtaatcaatctaccccaatgagtggccatcatcattcatccatcagagcacagcagaataggctcacagataaacaccatgagagggccagatgtccacctagcccaaattctgcagtactgagcttattgtcaggtcatggcacacatccctgtccagagaacggtcataattatgttgggttgggtctcagcaatgtttctttagcctcagactctctaggttcttcc

SEQ ID NO: 198696 - DNA, 341 bp, Zea Mays
cctcaattcctgaagaaacaggagcttgtctgcatcggattggggcccgtagaccactgtaatccaccactctgtgccgtccgctttcatggtgatcatggctgtgatggcgttgtcggaagtagatacgttagagagtgtgaagaagtcttccgacacagcaagcagaatgccccctctggtttggtttgctggccgagcaacatagctagtaaggaattttgaccctaaagtgcgtgcgatgacatggtggtctaccatcgacagctttgtttcttggagacatacgattgtgctacctgtatcacgaacaagatcatgcacggtgtcccttctcgccc

SEQ ID NO: 198697 - DNA, 462 bp, Zea Mays
gctttctttgtacaataataagttgaatggcattttggctgatgagatgggtcttggcaagactgtacaggtcattccttgcttattcttgtttactttctgtactcctgttattcatgatattttttattatcgtcaatgcttcctcttttcattcgaccaatggccaggaacttatttgtatgtctatgctatttgttgtaataggtcatggcattggttgcgtacctgatggaatttaaagggaattatggccctcatctcataatagtgccaaatgctgtcttagtcaattggaaggtgcatcttttgtgcccctcgtacattgaggatttttttagttttcctttttctggtaagatatttgttattgaaactcacatttttagctgattcttggttcagagcgaactgttaaattggttaccatctgcatcttgtatcttttatgttggtgcaaag

SEQ ID NO: 198698 - DNA, 242 bp, Zea Mays
gcggcccaagtagctgccaggaggccgtacgcttcttaccctgacccagcttggctttagggtcagtctcccttgctttctctgcccagcgagccctcgccctctagctcttcctgctagcgccgtctccgtcccgtgctctcctgttcatcgtcgatctcagccatctcaggagcacccgctcactcccagacgcccgcgcaaaggaatcccccacgatctccctccaaactgcccactcc

SEQ ID NO: 198699 - DNA, 470 bp, Zea Mays
gttgatttggacagttccatctcatcacagtaggacgcactcgaaactgaaccacctgagcagcaatggtactcatcatcatcactctcaggagcctcttcagaagcttccttgacagaagaactgggagaagtttcctcaaagcgtatgtcaccaacatgcttaggcgaaagtgtcgaatcttcacaatcaccaacatcagctgcagaggcagcaccattgccctctctgaatttagcttcagatccatcagtcggcttcctacagcgttgcctgtgtttcttgcttttctttttgctcttccttcttgatggccttgcattatcactcggcttggtaaagctgttgactaagaaatctgaatcagacatgctattggatgttgtgggcttatcttccagtagccttgatgaattatcctgccatcttctgtgagatacatcttgagcattaaggtgcaggaacaaaat

SEQ ID NO: 198700 - DNA, 393 bp, Zea Mays
cttcgatgcccgggagaccgcgtcggcccctgccaagccagtgcgtacgtgctccgtggccatggcgaaggggaaggtgggaagatggtgagaggaaggggatgactgtgggtccatatcatgagtggagagagggcagtcagaggggtccagtatcgtttcaggcgtagaaaatggcatgaatcgggtacaaagacaatcgcaatggcaagtttccaaatagataaatagtaacgacatatgtcagaagtttgaaaattgtaatggcatagacgaaaagaaccctaggtcctaggatgaaactcattagaaccactctgctactgttctacccttgatgcatctgagaatactgggtgtcttgtgctaaaggaaatctgttttggttgctgc

SEQ ID NO: 198701 - DNA, 488 bp, Zea Mays
gtccgctcagtccatctctccagaaatccccagatgttccacagcaagtcgctccctaggcccaaggacacatcggtggtggtggtcgtccttgagacgacagaagtgtacattgtgatcagcttgtcgacgaggagagacacccaggtcgtatacgtcgatccgaccaccggcgccctgcgctacctggggaagcatggggaggacgtctttgattcggaggcggcggcgctgaaccacatcaccaacggatcaagggttctatccaagagcactacatatgccaaggcagtgctgggatacgcggtgttaggaagccatgctctgctcttggtcgcgacacagttgagcgcgtcggtccccaatctgccgggaggcgggtgcatatacacattggcagagagccagtggataaagatccagctgcagaatcctcagccccaggggactggagaacagaagaacatacgtgagctggccaatctaga

SEQ ID NO: 198702 - DNA, 325 bp, Zea Mays
caagaatacactttgataatcttgtcaagagatggagggcagctgttctcatacagaaacacactaggcgtcgacttgcagctaacatgttcaatgatcaactgaatcatgtcattcttcttcagtccggtaatttagatgataaaagagggcatactgacattaccctagagtagtgcatcgatctgatgatgtgttgtcatatgttactgcagtgacgcgtgggttcctggccagaaggaaatacaagtgtctgcagaatgaaaaggagtcaaaggccagtcacagcatagttcaagggaacacaaggaagaataactcagag

SEQ ID NO: 198703 - DNA, 704 bp, Zea Mays
cgacgaacatctcgatggacaccacaatctgtgagaaccgtgatggcgccacgcgcagaaacttcttcacgacccagaaatcgtcgatcgtctcgcccaaaatcttgagatttccaaccagattggtaattctcatgccgaaatcgtcgacagactctccctccttgaactgaatgttctcaaaatctttcaggagtctttgggcattaacctccttgacgcgatccgcgcccacacgcatcgtcttcacagcttcccacgcctctttcaccgtgttcttcctccccaacgtctgccacatctccttcgggaccgagcgcaggagcacactcatggcctgtcgatcttgtgcccgcttcggcttgtcacctggggtgatcacttcccagatttcaagcgcttcgtaattgcactgcatcaacatggcccactcggtgtagttgtcgctcgtgagcatcggccacatgatggaactctccttcacggtagacttggtggatgtgtcgcccatggcggccgacagtgatttggcggcggagcttgggatctcttcctcggttcactctctctctcgatggaccactggatccaccgtatacctctcccctcggctctgataccacgtgttggaaccagccgtcgaagatcgacgccggcgagtccgcgacgccggccggtggtgaccgcggacgctggaaacttag

SEQ ID NO: 198704 - DNA, 436 bp, Zea Mays
cttgacttggaagccgagttgcaaatggagggtacgctgtacgcagtacagacggggttttgaattgaacgggattaaccagcgcgtggaactgtcagtgtgaaacggtggggaaagggggatttggtttcggtctttatagtgcctgatattaatgcgagtgggtggggggaattgaatcggaggccgcccgcacctaaccggggcatcgcaggtcaatgccggtgggcccgagtggtttagtggcaggcagccccccctcagagcccaccatggggcaagggcagagaaggggtggtggtggtggcgttgttgcgcctatgcgtggtgtcttttctcgatacggtccggtcagatcaggtcagccatgggggctgagagtgctgggagccggcttgctaccagaagtgcgccttcctagtgctttgtttgctat

SEQ ID NO: 198705 - DNA, 416 bp, Zea Mays
tggcctcgcgtgagctacaacacacgttttcatggccgaacaaccaatttagtgtccaaaccatagtacactagtgtccgaaccattgtacacgcatttggccccggaggccggtaaggctatttttggcctcccgcgacacatgttttcgtcgtcgaacaacgatttcatgcctcccgcccaaactctaaacacagagccccaaaccctaaagcccgaaccctgaaccctgaaccctaaattgtgaaccctataccccaaaccctaaaacgaaaacccgaacaccaaaacacaactccaaacccaaaaacacaacactaaacagtaaagtaaggctgtttttggcctcgcttgagctacaacacacgttttcatggccgaacaaccaatttagtgtccaaaccatagtacactag

SEQ ID NO: 198706 - DNA, 1377 bp, Zea Mays
tggggaggtgatggtcatcgagatgaatcccagggtgtccaggtcgtctgcacttgcctcaaaggcgacagggttccccatagccaagatggctgcgaagctctcagtaggctacactctagatcagattcccaatgatattaccaagaagactccagctagcttcgagccttccattgattatgtggttacaaaggtattattccaatctgtctcttagctttcttaattgtgtgaatgaagtttttcctgcaaatatgcatctgcagtacatatttaacttctctatattccttttctcacttgttagttgtcagccatatactggtaattgttgtttttgcaagtataatagcctatcctgttcaatttgtggtaattgaacaggataagtctgtccaattgcctatcctgttcttcatacgttgtctgactgttgtatatgttggtagactgaaactgtggtatactggtttatgctctggtatataatatatgcatactagtttatacaacagtggttgtttatatcatgtataattaaaggcaaatgcagtagcatttgtccagttataatttgttttgcatgctatttttcccacctttgcttcattctcatcatgttaaagcagagcaacattttcttcatgtatttgttaatagaaggggcataagcatcacaataaatagttttttctattgttatgagcttgtgtgaagatttgtatgttgactatttcctacctttctctctttaaagtatacctgagacttgtcacattgtctctacctgtgaatttctctagatctctttgctgtcttcttagacatcatcatacattatctgcagcacattactctgctactcagtttccacctagacatttaaagttcgaatatgctctagcacaataaaatgattttttaatcacttacaatccagtctagacacattctttgttctgttacaaacccatacttatatctttgtgtttttttttttcatttggaatttgcacttacacttctagcagagctaatttgacatgcttttctaatctacctggcatttactatgcagataccacgttttgcttttgagaaattccctggctctgagccaatattaaccacacagatgaagtctgttggtgaggcgatggcattggggcgtaccttccaggaatccttccagaaagctgtccgctcactggagactggttttgcgggatggggttgtggccctatcaaggaacttgattgggactgggaaaagataaaatatagcttgcgggtacctaatccagatcgtatccatgctatctatgcagctttcaagaaaggcatgagggtcgaagatatccatgaaattagctt

SEQ ID NO: 198707 - DNA, 497 bp, Zea Mays
gacgcgtccaagaacatggccgccttcttcgacggcgacctctggagcatggccagatcggtgtcggcgctacacgcggcggatttggccatgaacaacgcctagtctagtgttgccgtagtcgaccaacagcaccgacatccatggcgtacgcatgcatgccgcaccactagctacgtactcgaacagcaacgacgtgcatgtgcgccactgcgtcgtacgtgttgcatggccgccgccgtacgtgcgtgaataatccctagggatcggacttggagacgtgcatccgtggccggacaggagctgctgctgatgtatgtccgtccaagtccaaagtccaaactctcaaaattaaagtgagctgagctgagctgagcttgagctcgctcgaggtgtgcagtacgtaagtcgatcgatctatgtgtgtaaaattaaagcagagcacgaagaaaatcggcggggacgtagcaatcaaaggacatacagtacatattttt

SEQ ID NO: 198708 - DNA, 607 bp, Zea Mays
cgacttccaggccctcaaggtgtacgccggtagcgcgcggcactctctcgcgcgccgattcctcggtagcaatagcaagggaaagtctgaacagcaacctaaacccaaaccccaggagcagcagaaagagcagcaacatatacttcaggccccagccttccctccgccctcctacccaccaggtttgtagctagcacgatgcagcacgagctctagatttggaataaattaatctacgtcagtcacattattggtaatgttatcttgttatggtaggattatcctgtatggagttgatgatggctgaccttgaagccctgaaactgtacatcaactactattcggccatcctgactacgccgctcccccagcattatgatcctgacctccttgcccagtacttcgcctcacgtccgcatatccttgcctctcgcgtcattcaggttaactatgagctcttcctttgcttttagtactaacctacactctcttccagctattctatctaattggtccatttgctgtcaacctttgctctgcagatactcttcacatttctctcagctgtggtgaagatgcggatttcaaaaagagctcagttaaccac

SEQ ID NO: 198709 - DNA, 388 bp, Zea Mays
ctcctcctactgcgggtaccctgggctggccatcgactgcgtggacgacgagtaccccaccatccagctcggcggcggcagcagcacaggctactcctacaacgtgacggacatcgactatcccacctccaccatctacctcgccgacccggacgtcctcgacgacgcgagctgcccgcgggtcgaccacaacgtcaccgtctcgccatcgccgaccttgtggctcaacctgtcggactacaccgtccgttacctgctcttcttcaccaactgctccgtccacgttctccacgttcccaaccagtctgacatcagcccgatcgcgtgcgcgagcggctctgacggggacgactactctttcgtggttccttcggagatgccccaccag

SEQ ID NO: 198710 - DNA, 519 bp, Zea Mays
attgagtgttccagctgcactcctgtagttctggacttctggtgcaaccaacgtcttatttcttgacccctttgctgccactaaaactgatctgtttcaggcaggagattcgctctgccacgagctcaatgacttcagttccaaagccgctgaaattcctccgcccacactttggaactctcaagtcctatttcgaaacaatgccagagtccgagctcaaggtatctgtgatcacttcgggccacccagctgaggtatgttgtatattggtttggcacagtgttgatgccggcatcttattgttttgcagaagtacatggctgacatactgtcagtgttagctttaacaatgtccgttgaaggagaaagagtatgtgcccaccacaatagttatcttcatattgccattattttttttttgtttaacaaaaaatcaaaccttcagctgttccgtgaatctggaattgagacatcatcttgtcgcaggagagtctgaaataccgtttgctgggttctgaa

SEQ ID NO: 198711 - DNA, 271 bp, Zea Mays
ctaacagcagattgtggatgccgtcgcgcaaaatgagcgctcagtcgtccggtcgcgcttttttgcgcgttctctcctctacaggagaggatccgcatgcacatccacgagctgctggatgcgttcacttttcccattgcacaaacagacgttgatgcgggtgatgcacatccgcagccacgaactgacatagccttactagttactactaggaaatttgttttgagttcggtcattgtaggccttcaaacttccctcagctttcaacttc

SEQ ID NO: 198712 - DNA, 592 bp, Zea Mays
tatggaggaaatgaatgcaggtgacccccaaaatatgaacgttgttagagccgacaacctcaccgatctccatagccagttgtactcctcgcctcgtaaactttctagcttctgaaggtacttcatatcccacgcttgaagtttcagtattttcatgcttctaagaacttccgttgttgccttcattctgttgtctttggcaaccatgattttggcttgcaacctcttttgcattctggttagtggaatattgcaagccattattgctaatgtcgctgctaaaccagcccaggccccgacccctaagtttgtatggagcacataaacagctagagaaagttgaatgggtagcatccagatatagtttgtataccatataacatcagttatcctttgtatatccacactcatgtagtttatgatctctccactagtatgcttctgccttgaactgcaggataagcgaaggcccttttgatagatgtgggatatcaaagcagctcgcagccgcatcccaagctgtcgagctccaaaaatccactgcctctgtgctatggtctccacaactttggcacttagaaaaacaacagcg

SEQ ID NO: 198713 - DNA, 459 bp, Zea Mays
gacaagcgctgatccagcaagaatttgagactgtagtggtcagtccgaacagaaaagtggcgcccccacaagtacgggcgccagtgacggacggcctgcacgaggccgatgagctccctctcgtaggccaccaacttaaggtggcgggctgcaaatggcttgctgaagtaggcgagaggtctcgcgccctgatgaaggacagcaccgaaccctgcacctgacgcgtcacagtcgacgacgaagagcttggcgaagtccggcatctggagcactggacccgtcgttagggcatgctttagggcatggaaggctgttgtcgcatcatcgtcccaggcaaacgcgtctcgtcgcaagagacgtgtcagcggggctgcgatgaggccgaagtctttgatgaacttccggtagtaccctgctagtcccaagaagccgcggaggcctcgtgcagaccgcgggggc

SEQ ID NO: 198714 - DNA, 333 bp, Zea Mays
ttcagagttaagtacacttggctggagcattctacagtgaatgatgatgaggaaaaatggattgataataaacttcctgtggcttgtgggaactttacgttaggaaacacagaggagtcacaagatcccctcatgttttctcacatggtttcgtgggttaaaggaagaaaaaggggttcttatgtaatatatccaaatataggtgaggtttgggctctttataagggctggagtatgcagtgggtctcagatgcagacagtcatagatcctacgagtatgaagtggtggaggtcctttcaaacttcacagtggaagctggtgtgactgttatc

SEQ ID NO: 198715 - DNA, 316 bp, Zea Mays
caggagttccacaacctgtcccagggcgatctctccatcgacgcctacgcccagcagatgaagcgcaccgctgatgcgctccgggaggtcggccacactgtctcccccgcgcagctcgttctcaatcttctgcgcggtctcaaccctcgcttcgccaacaccgtcgacatcatctccaacacgtcaccgctgcctgacttcaagtccgccaccaacatgctccgtgtaaaggaacttcgcctcggcaccgagaacaaggaagcttcggcatcgtcacttgctgtttccatcgccccgtcctgcacgtagcccgcct

SEQ ID NO: 198716 - DNA, 296 bp, Zea Mays
cctcaatgtaccaggtcgatgaccgtgagacgaaaccaaactgcttgcaatcaaacagatctcatggatcactgaataatctatcaaattcggtcctggagctgaagaatgctgactcatactccacatccaactattccgccaaggatgccatgtttacgcagtgctcaccgaggcatgatctcagatgcttcaatgccttctcggccaaattcatcaagaaaagttccctgtccgatctagtctccagaggaagcatgagcaggaaattcaagacttccacagccagtgatgat

SEQ ID NO: 198717 - DNA, 580 bp, Zea Mays
caaatttgaatacacatagagccttgcgtgacaaagaaaatcaaaagaaatggacagccattcgtgactttgctgagggtctttgttgggagatgctgtcacaacaagatgagacaattgtatggaaaaagacaaataaaagggactgttacaattcgaggtactatgctgcttatcaacacctacaagttttataataataaatgtttacctgtttagactagtaattaacttacagagtcgttttacagaaaatctgggcctgagctatgtggccatgatccagaatcaccatactaccaaccactaaacccctgcatatcaggcacaagaagtcagcgttggatccccattgaatatcgtaccacctggccatctcaggctagacaaaactcaacagaattggacatacatggtaagtatttgaccacatccacatggtacaattggaaaaacaagcaaacaaatcaacaaagttaaaaaatatgttagtgtcttaatgttcaaatgcttgtctgtcttgcattaacaaccttataatttaacaggtgtgcatcctgaagtctttgctgatgatacc

SEQ ID NO: 198718 - DNA, 806 bp, Zea Mays
atgaaaacacgaacttgcttttcaatagcagttcttgacagatctattagtttgttatctaatgccatgtctaggccatggtcttgcttctcaacacagtactgagcaacacctggacgaatctctgaagctggtttcaagattagtgagagatcaatgttctcaagtttctcattagtcttcactacttctggatcaacctcaagcatatcagaacgtccaaccatttcagtaatggtgcggaacccaaggtttgccatgatttctcttagctcctcagcaagcatgaaaaaaaagttaatgacatgctctggttctccagcaaacttttctcgaagcactgggtcttgagtagctataccaacaggacaagtgttcatgtggcattttcgcatcataatacaaccgagtgtgatcagtggtgcagtgctaaaaccaaattcctctgcaccaagcaagcaagcaacagcaacatctctaccagtcttcaactgtccatctgtttgcagaacagctcgaccacgaagcccatttgctactagagtttgatgtgtctcagccaacccaagttcccatggaagtccagcgttcttgatacctgtccatcttgaagctcccgtgccaccatcatggccagatataagaacatggtctgcatgtccttttacaacaccactagcaacaactcccacaccagcctcagaaactagtttgacactgatacgggctccaggatttgaattctgcacaggcaagaatatcattatcactgaacagcatttgcaagttggagattcgcaaacata

SEQ ID NO: 198719 - DNA, 908 bp, Zea Mays
tttgcacatccttccgcaatctgtgcaagtgtaatgagcgcagcatggtgcttctgccactcagcagaagacaggtactgtggtagcagctcagaagcaattggtacaattgcgttcccaccaatggcgatggaaaggcggtcaaggcactcctgcgccactccatagttgttcccttcccctgcgtcctcatcttcagtttcagcagagtgccaagcagggtcatcctcgacatcaagcagcatctgcatcagcactgcaaacagcctaccaacaaactgcgggagtcgccgcatcattcctggtgcacgctctctagcctcagctagagtaatcacaaactccaccgccaagtgtctggtcccatcttccagctgtgtagcctcagcaacttgcaacattgcccctaccacatcagcaatctgcctcctcaggaaccttggctcggcgccagcgagctccaccagcagctccagtgcctcctgcgcagagacttcctggccagagtttaggcaatcagtgagcgccctcatcattgctgggagcaaatcctgcatcttatccctgtcggagttggttggcaggcactgaacaaggttgactgcggcacccagggccgcaatccgaacatcaggagacgtgggatgcgccagggctgaggcgaggaggttgtggatagtcatgagatggtcgaggagagattctgcgatgtaatccgccagcctcgcgaagatgagcagcgctgactcctgaaggttgtgcgcatcaggccccgacgcggcgcggaagaggaacggcagcagctcgggccaggcgttctcaggcagcagcgaggccgcgagctcagagatagcgtcgcagaccttcttggcgatgggcttgggaggatcggactggagcgcggagag

SEQ ID NO: 198720 - DNA, 205 bp, Zea Mays
gccgcgcctgcctgctgcgcggccgcggtggcggcgtacctcggcgcgaggcagcaccctccctttctctccatcccctctcccgaccgcacacgtctcaaaaaccaaccaacccggtatgagtacgagtacgacacacttccttctactttctcgccgctcgcacgatggcactatggcagtgagagagataagatacgaccac

SEQ ID NO: 198721 - DNA, 562 bp, Zea Mays
gttttggataatcatgcaccacagccatgcaacccagaaaatattgctgggcgagatgcatctgaaacaactattcgtcctgaaaattttgaacagtgcagctttctgtttgctcctgaagaattaaaccaatctgagttgactagtctttataccttgaaaggaaaaggccatgatgtaataactcaaacaagtctgaaccatgacattcctgaaggcagaagtaaagagaaactatcatctgaccctttcctgctagataatgttgttgcagctgattattttgattcacaggctgattatcaacagctggaaaactaccaggactgtgagttaagagctcaagaatttcatcgcatagcactcaacctatgcatgcaacaagaaccaacattagaagggcataatgctggaattgatgctttgctattagccgcagaatgttatgttaatccattttttctattgggattccagtctaatttagagcctctggacaagattgaacgtattcattcagagttgatgcaagggaatgcttcctctgtatcaaaaaatttgc

SEQ ID NO: 198722 - DNA, 283 bp, Zea Mays
gtcatcagatcaaaatacgttcatgttttgctaaatcaagacatgagtttttttgatacatatggtaacaacggagatattgttagtcaagtgctcagtgatgtattgctcattcagtcagctataagcgagaaagtaagcctaaatagtgaagtaaccatctgttcctctggaattatgatcttcagagtgaacctcatcacttttagggtcttgtaacaactgtgtttctttgtaggtggggaactacatacataatatggctacatttgttggtggtctc

SEQ ID NO: 198723 - DNA, 351 bp, Zea Mays
gaaccagacacttcggcgacctgggaggacctcgacaagtttcgcgctacatacccagattttcagctcgaggacgagctggacctcgagggggggagagatgtcatgtggggccgcacctacacgcgggcccgcgacgtcagaagggctgaggctagggcgtttaagggaggcgccaacagcagcactaccaaggaaggtccatccaaggaaagtggctagattagtggccaaattgataggccttaattagaggggagttggtttccaaataagtcatttcctaaattagggtttccaaataagtcatttcctaaattagaagttacctagttggtcgggccagtggcc

SEQ ID NO: 198724 - DNA, 441 bp, Zea Mays
ttcggttcaactaattttctcaggtctcatcagtaagtaacacaatttttatttgtattaagagtttcgtttttttttgttttgagagaaatatttacctttcttatgagacccaattaccatctatgtttcatgataaattggtgtcacaacagtgaagcttcgcgtgttcatcgttgctgtcctgattgtgatcaacttgggcacctgcatggcaaaggttggatcttacggcacaactgtgtcagcgtcaccgaggcaaatccgagtacttaccgccgcaactgatggaagaaatggacctcccagcaatgatcaccagtgcccgctcgggacctaccccaattgttaagcaatggatgtatcaaaacactgaggaacagctcaaatacgttcacgaaaattacacccgtctgtgctgttaggggagcatgaatatca

SEQ ID NO: 198725 - DNA, 860 bp, Zea Mays
caagaacatcatcaataccttagtatttggtcagcgggagaaagagtatgtcttctcttaccaagattattatttattagggaaatatggtacccattgttggtacttgctaggccagggctaaaactaaaataataccaattctgctctgaacacaccatcccaaatcaagggctcaaatataagtgatgcatttagtgtgaaagaatgaagatatgataaactgaaactctggccttgagtcttcaactgtcatgcatgcagcttttaatgaatttgtggagttactctattgaacttaccctccatattagtgaggtggttccttgaagcttccacatactttattctcatatgatatcagccattttgaatgggtaatagtttcaagatgctgaaactggaaagagttgtttaatatgaattggagggtgtgattatcacaagggatggaaggggggtgggggctttctaggattttctttttgtatatttaaccttggtgtgtaacatctgtttgactgaagttcctttaagcctcgttgattttctttccgaataaccatgtgatgcctatttcagtgtcctagtacagattttcacagttgttgataagcatatagaagaggaaactctgataacgggtctcaatatgaagaaccttcctgcactgagcaagaagtttgttgaattacttgagttactggtataaatcttatcattgttgttttaggtcatgttcatggtggataccttctaactgtatctatttcttgagtgcagcaaaaaaacaaggaggaagacttgggtcaggtagttattttgttccaagatatgctcgaggtggtcacgagggatat

SEQ ID NO: 198726 - DNA, 747 bp, Zea Mays
aacgagtcatgtaaacgagaacaaggcaataatatattgtcaatatgttttgttgatgagaccagtataatgaaagatgatcaagtaggcagagagaatgttgcagcttccaaaaagggtgaagatgcgacatatgatttacctgcagaaaaggatgataccaaactaccagtcactagagctgatgcaatgaccaggaccaatcaagagcatacagatgagagcaaacagcatgggaaaataaagcaaataacagataaagactacaatgatgctggatatgagttcttgatcaagtgggttggaaaatcaaatatccacaacacctgggtttctgaatccgaggtaaaaatattagcaaaaaggaaactagaaaactacaaaacgaagtatggaacgagtttgataaacatttgcaaggaacagtggtgccagccacaacgagttattgctcttcgagcatctgtagatgaagtggaagaggctttaatcaaatggtgtggtctttcttatgatgaatgcacttgggaaagattagatgaacctacactgatgaaatatagccacttggtcactcagttcaagaattttgagtgccaggctttggataaagatgtggtaaaagattatgcaaacacaaggaaccgacatgagcttaatgtgttagctgatcagccaaaagaacttaagggcggcatgctcttccctcatcaactagaagcattgaactggctacgtaaatgctgg

SEQ ID NO: 198727 - DNA, 950 bp, Zea Mays
gtaaagtgcctgctgaataatgacatatctttgtgccagagtcctactagaccgacaaatctcagcaatagcagtaattggtctttgtgtcagggtcctagaccgacaaatctcagcaatagcagtaattggtggtttgagatacatcacaagagaatcagaatgtggagacatgaaatgacaaggaatcagaggcaggtagcaagaactagtacatgagcagagttcagaggtaggataagacagagcctatacttggtcctgttccatcccctttgctggcatatgctctgaacctttatagtttatagcaagcataacactaacccattttgcagcctggtccgtgtcaggcccatttggcagcccaatccatgacactttcctttaaccctattatataatgtaaggaatgctgtaaccaaggtcatgtacaagtagcatcacaaccccagtatcagtagccaacttttctgcagaacgtgtcatggtaacttctcttgatgtgcttaactagggggtacattgaaagatatgtactgtatatgctactgcatgacacacacatatacaaattgatatatttgccatggagctacaaaaggcatagcacctttttgtgtgggcattttgatccatattaatgttgtaaaaagctccctttggcgattcttttttaactgcaaaaggttttgtcaatcaatttgcattctatagtacaactatatgcctatattgttattattacataatatcctatttatttggactgctatgaccttgaatgtcctttatgttcactcttgactgttacaagtgtcatctaccaaagacgctagtagtggttggtcaacgagtagtggcaccagccagctaggtaatgacagtgttcaccaaccatggttactgtatgtccctataggtgaggccgggttttttgggggggggtt

SEQ ID NO: 198728 - DNA, 934 bp, Zea Mays
cttcccttcgcagaaaaagagaggtgaacaagaaggtcctcaaggtgcctggaatagaacaaaaggtgagggatctgtgcgctctgcaccccttctcatccacgatcatgttcttgggggcgtttgtttgttttctgttagtattactttaccttgccagttgttacaagaaggaatagttttgacactccgttattactttaccttgctagatccttgatgccacaagcaacgagccgtggggtccacatggatctctactggcagacattgctcaagcgacgaataactagtatgctatttttttctcctgttttttggttggctacttgttgaacagaaaccagttttgatggcgctaatgtggcctgcatgtccgtttgcagtcatgagtaccagatgatcatgcacattgtgtggaagagggtcagtgacactggtaaaaattggcgtcatgtttacaaggtaagattgtcctggcgccacgaatattcaaacattgtgttttgggaaatatgcgaaaacataaataattacatcattattttgaacagttggatctgattactctctctgtcgtgctgtagggattgattgttttggattacctggtggcgcatggcactgaacgagttattgatgacatcagagaacatgcttatcagatatcagtaatgctaactgccctcttttatgcattatatttttaataccatctttgggtttggttctggtattgggaattcttggatcttgtttgtttggtgcgctaacactatgcttcaaattccaggcactagctgatttccagtacattgattcttctgggagagatcaaggtagcaatgtacgaaggaaatctcagagccttgtcagtttagttaatgataaagaaaggatacaggaagttagagagaaagcactctctaccaag

SEQ ID NO: 198729 - DNA, 490 bp, Zea Mays
gggatctccgtacaactgtaaccccagacccaacgaatcaaaaaacatctaactgtaacacgggaccaggcttcgcttgctgttgttggcccaacaccgccacttcgccgggaaacccatggtatcagacgacccaaagcgcagagatcatcccgaaggcactgaatgaatctctccggggcggggcggggcgaacccatccgatacgctgccccctgaacatcaacactccctcctcagcgaaggtcgttgtccatccaccgatgcccaccggaaccatgcgcaacccacccgccccagactgaaatactgaatgagcgcaacgacgtaccgaaaaggacggcgggcggcgctgaaaggaaggtgggagagcggcgctgaaaggaaggtgggagaaatcacggattcacgggcgagtgcggacgcggtgagcctcgccgttacctactaggcggatcgagcgggcgggggcgctaggccagaggcggag

SEQ ID NO: 198730 - DNA, 889 bp, Zea Mays
agggggaaggagttcaggctgtccagataatgcaggagctgctggaactctttatgaagcagtaccaaaaagtcttattgtcagtaacaacaatctgagtacacaaacagacactcttcttttggagtttccaaatcaaccactgtggacaaatgtttttgtaagaaatcgtgccaaagttgctgtccccttgctctggagtcgcgttcaggtatgtggctttgtaatgctatcttgattaacactctaccaagtaccaaccatgatgtcttttgtaacatttaattggttttctgacattttcttgttgaggtctatagtcttatgctttcctgctcttcagtctatcgtcaaattatatatcctttatgaatacatatatgcattttggttgtaaacataggctgtacgaatcaatgtggcaatgtctcaatggtgaattacggaagtgcatgtggtgttcacaatgcaaagtacgaaagtgtagatgtgatgttctcatataatgtcgaacaaaaaagaaacctcaactattttacatttcaaatctgatgactatatggctgcacatactggagtcttgatgttctatttattttttgtactctgttgtaactgaagctctttacatctccataaatcaatgtcacatataagttgcataagtcatgcatggtgcttttctataatgagaaataagcctattgtggagttgcttcttatattagggttgatcatgttttctttctaaaatttgaagtatgggacttcttatttataattttcaggtcgaagggcaacttagccttctttctggtgctattctaacttttggtctcactcgttatccatactcggagtttgaactgatggctgaggagcttcttat

SEQ ID NO: 198731 - DNA, 534 bp, Zea Mays
aaattattttgcatgataaatctagcagcatcagccttatgctgtaaatttaattagacttttaggtattggtgctcaaagctaaaaaaattgacttaggacaaatctaaaccatggaatcggaggtacatggttggcagaagcttctgatatcaggttccgacgaggagaaacaccacatgctgtcgtcctttttgactagcaggaccggtgaggagaacgtcgacgtgctgcgctggatcagcccttgggccagcatggtggagcattgtgctccagcttgtctttgtggtggaatattggcacaaccatcggcgctgaccctagaaccagactgatgcagtagtcctggagcgtggcggcggcatgaaagttggctcagcaaagacgatggcaaactcgtggagcagaaccatcatgaggttgttatcagagcaggcctgtagggctgggctggccggacctgcgattccccgctagcagaccttgtggtcctggtgccacaaggacatggtgtgggcgctgaaatcccac

SEQ ID NO: 198732 - DNA, 386 bp, Zea Mays
cagacatttccggtgctgcgggcgctgcgcatctcttgccacccaggtgggagtttgtgggccagtccgtttgaaaccgtgacactgtcgtcagggcccaccgccagtccaccttttcctctcaccccatcccatctccggatctatcgccctcgccatcggcaatcggcatcgccaccggtagtgggagggagcaagggggggacccaggccaacgccgcgcacctttgccctcttatcatcatcaacatcaccacgggcgggggagacggccctcgaagcgtacccgtccccatcctccttttccgaaccaccggagcgcggcggcgcggcgcgagacccttcccggcttctactcctccgatcctccgcaccggctgacgagt

SEQ ID NO: 198733 - DNA, 445 bp, Zea Mays
cgcatcattatcattcttagtggcacctgaatctcttcgatcaaccaccttttgtttcactgtttgattctccatactggtattacattctcccagctcagcatggtgaccttttggagatactgcactgctcactttccttgtatagtgagcaataatatctcccttcctccctctgcttcctagtgcagtctcattcgtggtagttttgcataagcttccagaaacttctctctgtctaactgtagctgatctcgtaactcgcttctcaaaccgtgactcctcttcacatgtcccctgctttgcctcacatgattttctacctctccttgtaaaaacaatgtcatgtgccgaaatatcattggtttcgttcacagggctgcccctctcctcctgcttagtgtacccagttcgatcagtgtggttatcagctgcacatcttcca

SEQ ID NO: 198734 - DNA, 206 bp, Zea Mays
gctatttgcggtgctcatgagtatgctgctcgatgtccaggatgaaccggcatggcatgccgcagtgtcagaggaggaagacgccggagagacgggaagctatgtttttgcacaggagtgtctggaccggctgtcaattgctgttggtggtaatacgattctgtccgtggcagctgagttgctcccatcgtttttctcctctgaag

SEQ ID NO: 198735 - DNA, 257 bp, Zea Mays
ccgagagcgagcgaggagacgtacacgtaacgtaaggccgccggtcgaaacgtagaaactgagcaaggcggcggccagggcttcttcctttcctttccttgtgtcgtttgtgcaacgacctggctatcggtttccgtttcccggtgtgtgtagtgtacccctacgcacgtagcacaacacctgtactacgccacctgtcacctgtgtgacctttgcttcgagatgtacaacatggtacagcagacagtcaatcagag

SEQ ID NO: 198736 - DNA, 391 bp, Zea Mays
gtgggcggcgacccttcaccgcggaggttgacccccaaaccgccgtctcgcactctcccgcctccctataactaatctcctcctttccactccccgccgcgcgaaaccacacgcggcggccgcctcctccaccacgccgatggcgacccctcactcacccagacccagctgaacaactccctccaccaagcacacgcaagcaggagaaggagcaggagcaggagcaggagccgagggcggcgacagagaatagaggtagaggaaggcgatcgacgaggagctcggtctcacctgctagcggcggcgaccatggaccggatgctgctcgaccagctggccggcgaggccctgcgggaggtgctgcacgcggtgcagggcaccctgttctgcc

SEQ ID NO: 198737 - DNA, 493 bp, Zea Mays
gcaaaaagaggcaggacatgtggtaactgtgcagcgaaacggagcacgccaagagcaaattcctctctcacggcctgctgttgatactaaaactgataccagtcatctaggccacaaagaaggtattattgattagttagacacaattgtaaggaagtcagactcattaacgtacccacattacttgcagcaccacaattagtttaagacacctgtgatgaaaatgggtaacaagaagtataaacctcttatgcagaattcacgcaaacagaagcaggacatgtggtaactgtgcagcgaaatggagcacgccaagagcaaattcctctctcgcagccttctggtgatactgcgaatgattcaatgcaccttggccacaaacaaggtagatctgttaatttgtataaactatatcaacagaatatgcatgcttgcattggtaagatttttattttcttgttacagatattctggaagatataatggcgccctc

SEQ ID NO: 198738 - DNA, 362 bp, Zea Mays
cataactcaaattctggcaccacatacgagacaagttttatggggctatgaatgtgttccacatgcattattagctggtattggaccaactccagcagttcatcgtccgcatccgtaaaatacgcccgtccgtgggtggaaacagttggtttgtcctcctccccttgtcagcagcatcctgataacggcccgtgtcgctctccccttcgagcgacggttgctttgcgcgccaccaggtggagctccgtggccaagcgtcggtgcccgtccgaggagccctcaccaccgccactgacgcatgcgcaacaagggaaaggactcggacccgtcctcctccgaccacccttcttcccctaccccca

SEQ ID NO: 198739 - DNA, 661 bp, Zea Mays
caaaacactgtcacttttttcattgattgaaccaatttatcagtctgacttgctacttttgcttaaaagcagaagactatgtgtaatggtataagtaacaaagggtgtaccttcaccctatagtaatttgtccgcgcagcttgtcaaaagtagacagtgggaattctttgcttacactggcttaaggtcaacacagatggatacggtgaatatgatcaagcgaaactagagcacggcgatccaatttcacgcttgtcatgaaaacccctcctgctctcctacattaaacctgaggcctcaatgaggctgctgggtctgatctaaaccaagctcccacgccaatcgatcagcgcggccgcccagccagctcagacgtgaaacgcgcgccaaaccgtgatcgaacgacagcggagatcaaaacagccggtctccaatcctaccacggcctacagctagatccagcagagcgcagagcgtgacgcgcgcgagcggggccgggggagagagaccacgactcgaggctggattcacgtagatccgggcgagaaggccagaggcggtgaggtagcagggagcggcgagagagagggaggggcactcacgtccttgaactggagtaggccgagctcgccgaggtaggtgacggcgaggcgcgagctct

SEQ ID NO: 198740 - DNA, 295 bp, Zea Mays
actggcttcggcgcggtgctgcatcagggcgccgacgtcatagccttcttcagtcgcccctttgccccgcgccatctgaagctcgcggcatacgagagggagctttatcgacctagtacaggctgtccgtcactagcgcccatacctctggggtagacgcttcctcattcgcacggaccactacaacctcaagttcctcctcaaccagcggttgtcgacaatttcgcagcaccagtgggtcagtaagttatttgggtttgatttttctatagagcatctgtcaggtcacctgaac

SEQ ID NO: 198741 - DNA, 307 bp, Zea Mays
actaaataagaagggcagagttgtactcactattttatattgtgtaatgtagtttagcaacagatgtgaccatggcctgatgtaatactcacccctatgcagaattagaaccattgtgcaatactcaagccattgtccatgcagagaatttcaccagctttttctagagatcctccaacatgttgtaacaagcatatgcatgtacataacttcgaaatttcagacagaaagtggattactttaccaacagaagaaatgtatggcagtgttaaacgtggaaccaagaaaatagctaggacaatccctt

SEQ ID NO: 198742 - DNA, 380 bp, Zea Mays
aatagatgatgggaaggatttgccagaagattatctgagtgcgctgtatgaccagattgtcaacaatgaaatcaagatgagtgctgattcttcagttgcacaaaccaagcaatccaatagtgtagggaggcttctaggcttggacaacattatcaactttgtcaattggagaccagcagaagacaaggcagtaggagcaaatgacttgctcattaagcacatacaggaaaaaatcaaagcaaaacgtgggaaatcagagtaagatctccattctatcagaaagtacttatggtctcggcaacattttattaatttgagcttttatgtaatacaggtccacgttttatgttgttgctgatgcaaccattttaaggttcatg

SEQ ID NO: 198743 - DNA, 235 bp, Zea Mays
tgtgattttaccagtgacttacgcgtacacttgggagaatcctactggtcttgcaagaacaataaaaagctggcttggggatggtcagaatcagccatctttgtatatactggcagtagtgatatatatggcaccaaacatacttgcttctatgctatttcttttcccatttatgagaagaatcctagagagttcaaatgttaaggtcataacgatcatgatgtggtggtctcag

SEQ ID NO: 198744 - DNA, 367 bp, Zea Mays
cggtattctctgctgagggtgctgattgaattgctgctgcataggtttgggcgaattgccataagaggatatgttcatatatgcttctggggcagtagtcctgtttgttagctgcatatttgacccatgcactcctatgccaccattcatgtggccatctgataaaccataggcagatgagttgtccagcaagcttgaatgtatcccagaattattgtgtcccccaatatgttgaatttgattgctattgtggttgctaggaaattgtttctggtgctgcatatgtggcgccacagctgactcaccgttgaagtatccagttccatttgaatagtcaggatttgaaggtacattctgttgattactg

SEQ ID NO: 198745 - DNA, 406 bp, Zea Mays
gaactggtcagagctcatgtacacttctgcatcatctaggcttgtagctagtaccttgcaaactctgctttcttcaggcttcatcggtctagcttatgttaaaaaaaatgaaacaagatatacacgaacgtactatattctataataatataatgcgacagaaatgatatgctaagtttctaagcgaggaaggaaaaaggtgttctatctcacagcataaccacctgcagggacgtttccttcaacctcggtctcaacggccgaatgcccgctacaatcgggaacctggcgcagctcaccacgctgtatggcgcctactacactactctccattttttttccgaccctgcttttccttgtccgacgtacagagcttaaaactgaactatatacttctcaggatcct

SEQ ID NO: 198746 - DNA, 543 bp, Zea Mays
atccgaaacccgtttctgcacattaccgttgcattctattgccatcagttctcattctctttcacttcgacgcagcttactttgggaaacattaacaggaagagagcatgtaatgttttatgggagactgaagaatcttaagggcactgaattactgaaggtatagttctgtaattggtatgttttaatataagttcctatttaccttcactgtgaataatctgaggtagacttatgctatgttttttgattctatattgcagcaaaaaacctacatgtttatgaagacatgtatacatctatatatactgagcttacaacattctgtactgcaggctgttgatgactctctgaagagtgttaatctgtttcatggtggcgttggtgataagcaagtgggaaagtacagtgggggcatgaaacgaaggcttagtgttgccatttcattaatcggggatcccaaagtaccaccctcacttctgtttatgttttttagtccagaatatacattggcatctgcaacttataatttgatacctttag

SEQ ID NO: 198747 - DNA, 727 bp, Zea Mays
ctcctctcttacaggatacgcgacactcttctccgtcgtgcgagcgccttctcctacatcccgacaacgccctgcacctcccttgtcacgcagacgctcccctccactaccctacgcaacatcgccatcaccttcaacctggacattggtgccctaagtgcagcccctggccctccggcgggcacctccttccactatgactagcacgactctaacgagttctaggcctcggactccactgtgtcgtcttgtctgcaacctcgttcgccccgagcaccgtcggtaacttccacccctgcacgaccacgcgcacgcccactggcgtcttcggtgctcccatggttgcgcgcctgcttagcatgtcggcgagccttccctcatctgcaaccccagtagctcccgatttcccccgcccgcacgcggccctgactattcatggcattccttttgctgtcgggggccctgcctttgccatggccgctttccctagtagcacgaccctcaaggacgatgcgagccttcttgcacttgctccctcgatgcccctccttcactccaccgtgtctcccgtgtctccctttacgatggccagcttctctgaggcacactcgcggtgttgatcgggtcatgatctctgttctccgtgactgcatcgaggtccacccataggagggccgccactctactgggttgcttgtgttccccagcgtcgcgatcgcctccatga

SEQ ID NO: 198748 - DNA, 219 bp, Zea Mays
cctggagcaaaagaaggactgagcgagagctgatcaagacgcacctgccatgtcttctctacagccctttctgactgcacaggcacctgctctgcatgtgcaggctctacaacctgtgccttgtctggtattgtggcacggttgtcacctgtgagttgtgcatctggagcacactggcattcaatgttccatcgtgaaacattgtctgtcacctgtgag

SEQ ID NO: 198749 - DNA, 272 bp, Zea Mays
attgcattcaaacacaccagcatccatcatgttttaaccaacatcaggtcactctaggccatcatattaatacccgttttaaccaacatcagcatccatcatgttgtaggtcatttaagtagtaactttgagaaggaacaaatatgcatatttagacaggttactggaaagccctggactttagatgagtttatcaactatgtgcaacacctacaaaaccaagtggaggtaaatcacgaatcatgaatagttaaatattagtgctaaaattg

SEQ ID NO: 198750 - DNA, 290 bp, Zea Mays
actacggtagatccagtatttaataaagttctaaaggaaaaacaaacataaatcctttcatgtaggtgctacttttgttgtcgctctttggggctgctttcacgtggttgctagccatcgtcaacccctcgccccagtctacccaccatgaaagctaaaacatcagaggggggtaacggcgaggaaataatggaggcataccgtggttcgacacagggacaaacagctacgcactatggcagccccacaaggtcttcttcgcgcggtggtagagctgtgtccgcccaacg

SEQ ID NO: 198751 - DNA, 226 bp, Zea Mays
ctcaatcaaagctaagaaccctcacgtataaaaggaacttcagacatcaaagtaatcttgaagcttatagggaaccgaatgaaggggaagaggagcttcaacgcctttggaactgtctctggagaaggtggagaagggaggtgaagaaggtttccaggaagaacaaaagtcacacacaacactataaaatggcataattgtacctcatgtgtttcctctctcgtat

SEQ ID NO: 198752 - DNA, 423 bp, Zea Mays
agacaacggggtagcgcgtggcagaggcgacagacccgcatgcggcgcaaaagagggcaggagaaggggaggaacgccgactcaatcgacatcgagggaatcaaggtcgggaggagctagcaaaggggaaacatcctcatcaaatgcaacatgacgagagatgatgatgcgatgggtgagaagatctaggcaccggtaccccttgtgatcattgtacccgatcgtggtgaaagtttgaggagcgtggcagaggtgttgggatagcaggcacactcgaaggtgctcataggaggggatggtgtcgaagagggcgaagaacggagtgggatggggaccgccttggagggaagacgattgaggaggtaggtggctgtgttcagcgcctcaacccagtaccgggcaggaagaaaagcttagaaaagg

SEQ ID NO: 198753 - DNA, 1265 bp, Zea Mays
cctgaatatgtcttattagttttccatcctgaagcacaggtgaacttttgctcacttcttgtatatcctgttcatggtctgaagtaatttaagccccctttgctatttatgctcttatacatttgagccacaggaaaacctgattgtaagtggtggaacatgctccctagatgcttctaccaatgacacacatgtggtgcaaatagttacacatccaggaaaagccttatgttctcaattgattcttgcggctaaaggtttaggcgaagctataatcataatccaggatgttggcctttctccaagagcaactactcattctttggtacatcactttggcgcttatcttcctaattctcctgatactttttatacttgttacaattcaatcaagtgacttctgttgcatactatgtttatactgttcaaatggttgccaacatcccttgagtcatatctttgtatctgtgctttgtctagcattaatcttgggataatgataacttttgaattttgatatatatctgtcatccctaatttacagtcaacttctatcagactacccctcataataaagatgtgctaatcttccttttgaggccactgatatcaaactgacagtagtttttgtggtgctgttttcttatctgtttgcaggttagagttgcaaatgttgactggattaagataacagcagaagagcaaatcagtcttatggtacgaggatctccatttttattatgtttttttgtattttttgctgattttttttcatttataggaaggaagcacaaaagatttccaaatattagctggcacccaagatggacaaatatttggtgattctcaggtttgtgcttggatgcattatgtatctacttcatatttttctagcatgttggttaaatttagcactattcatttacaacaatactctggtttaaaatgtctaaactttacatttaatatcctttaaactcctttcagagatttttattacccattatccttttcaactgtattcaatcagctaacaccaattctatgagttcttcaagttatcatgttggttcaagcctggaaaatagggttgttattatttgtctcaatgattttttttcctttccaaatcttaatgctgtgacaattgtttgctcttgtctttgctcatttgattggctatactgtagtttttctgagtttgctaatttctctccatctttgcagttcaaatatatggacattgagttgcatcttgacgatga

SEQ ID NO: 198754 - DNA, 634 bp, Zea Mays
ccccagctaaacaccaaagacgaccttcatccataacagcttgtgcaacactttggacagcaggcctagaaccctgaaaaacgcaggcattcctatgtttccaaagctccgaggcaactaggaccactaaggaattgaaccccttcctctcttccttaggcaaagaagcagaggctcggcactaccagggatgatcctgttaagaactaagctccatacctccctagcaaacacacaggatactagaatgtggttgatggtttccacatcttgatcacaaagggcacaagcggcctgatgcggtagtccacgtttgaccagtgagtccaacattgattattaatggccaaccaaatgaagaacttgcagtttgcagggtcccaagttttccagatcctcctccaagctaggaatttgatggagccaatgaacatcatattgtatgcagattttctgctatactgacctgaagatgaaaacttccaagaaaaatgatctgggacattaggatgtagaactataccctcaacaagctcccaaactttgaggaattctatgaaaacctgaactgttagagcgcccttgacatcaaccacccagcctctgttggataatgcctggctcactgtacgct

SEQ ID NO: 198755 - DNA, 377 bp, Zea Mays
tggtacataaaagagtaaatcatggagaatatgccacataatgcatgcctatggaggatatgctgatacaaaattcatgtcttattatgctttattggataataactgtgagagagttggaagcgtgtgtttgtatttattgatgaagatagacagcacatgtacaggtatatataggggaggaaggtgagaggtaaaaggaagccttctacacctaaggaaagatctagagtacaatcagatcctcaatcatagtgattgagatcctcaatcagatcctcaatcatagtgattgagatcctcccctaatcctctctatctatatcagacaatacttccatatagggcggccggcatatctgccaggcgacagccag

SEQ ID NO: 198756 - DNA, 257 bp, Zea Mays
ttctgcagcgactccttaaggtgcagggatgcctgccacaccttctcgtcttcccatgttctcatgcctctgaaataggtgtcacatttgttgagccatggcagcggatcagactcaccatcatactgggggaaattgatccttggatgaggggatgtgtcgtcttcaaatcattcccggtggctactggctgggacttctagtgtgggcgccattgaagtccaggttggcaccgcatccatgggggacagatcctg

SEQ ID NO: 198757 - DNA, 678 bp, Zea Mays
tgccattgttcccactgcttaacttgttccccagtcaaagtaacagagggactctcttcaatggtagctatgttggctttagagccaccacgacctctacctcgacctccaccacgaccaccatggcctcgaccatagctcccacgagtaccacctcgacccccacgagatcctcctcggccatcatttcccttaggattgggacaattgtaactgaggtgtcccttttccccacaattatagcattctctatcttcaattgtaacataggccgacttcacatgatcatcatttcccatcactcgacgtctgctctcttcatcaatcatggctgacacaacctcatccatggttggaagactctcctggtgacaaaaggcagctctcctgctctcaaactcaggatccagattcttcaagaagtgggtcactcttctgtcatttgcccacttatgaacactctgtgcatcctatggacaaatcatttggaggggagcatagtgatctagttccccccacaagtactgaagctcactagcatattgttccactggtctccccatttgtttcacggcatctgccttgctctggatttccatcgtcatcatcacatttccctttcgagagtatatgttactcaaggtcttccatatctgggatgcggtgcgcatagcttct

SEQ ID NO: 198758 - DNA, 355 bp, Zea Mays
agatgctctgagcagaaagagtcaagttaatatgttggccactcaccccatgccgtatgagctagcaaagtaatttgacagattgagtaccggatttctgaacaacactcaaggagtgactattgagttagaacccactctagagcaagacatcaggaagggccaaaaggatgatgagaagatcaatgagatctgacagctgatcatagatggaaaaggcaaggattttcgtgaagacgcagaaggagtggtatggttcaaggatagactgtgtgttcccgacatcaaatcgatccgggaactgattctcaaggaagctcatgagacaacatattctatacatcctggtagcgag

SEQ ID NO: 198759 - DNA, 698 bp, Zea Mays
gcccgtctgagcgtatctgcatcgctaccctcagagtcacgcctaacatattccacccaattgcactcaaacaactcctcatcctcatcccgcaggcgcaagttaggcacaacaacactatcacatatctgcttcattgcttcaggactcccaaataaggcatggtgcacactctcagcaactgtagtcaagaaccttatcgcagtaacagcaagctgtgcacgggatggagaggtggtctgcgccatgaggagcccccacacggcctcaacaaactccttcaggtatcccctaaactcctcctcgtacttctccatataaagctgcaggttatcacagacagcagcacggagcgcatcaggggcaccatctgcctcaacaggcggtgagtaggatgtggtaacgaaagttcggaactctgtcatccactggcgcatgttatcctcgaagaattcaggcaggtcgatggagttaagcgagtagaagatctcgcagcagaggcggaggcactcaaacacggggcggagctcgagcgggttggccgtggtggcggtggcctgaaggcggcgggaggcgaagaggaagacctcgaggagtggggcggcaaagatgtcaaggcagtacttgaggtcgaggcggagggcattgttgtcgaatgcgttgcggaagcgggagaagagcgacaccacggcggtgag

SEQ ID NO: 198760 - DNA, 354 bp, Zea Mays
ctaaaatttacataactattggagttactcttacgaactgaggtaagtagaagatgcagaagacatataaatggtaaccttcgatgaacaattacgacgattcgtataggtacgacagtattgcttatggggggggcaaaaaaaagggggtgtatttttaaatctgtgcccctagttcagattcaaaaatcccaaataaaaagggagtgcatccactaaacggaaagcacaggttgggctgtaaaagaagcaaactttgcctattaattgtaccctatccggaaacgaattatggtagctcatgatggcttaccagaagaaaaaaaggaaacgtcccctaatcatgcaatttgc

SEQ ID NO: 198761 - DNA, 791 bp, Zea Mays
ggatgtcatactttttcaggatgcactttctacccttttctctctgtacattcgtgatcttggccctgctgttgaatttggagatgcacactggcttggaagacagggtattgcattagcgctccactctaccgctgatgttttggccgctaaagatcttcctgttgtcatgacatttctcatctcacgtgccttggtaagtaatttgtttttatggatcttatcattgcagatttgcagtgccacttacatagttacatttaacttttaatgcttctcatgacgaatctacaggctgatccaaatgttgatgttcgtggtagaatgattaatgctgggatccttattattgataggcatggaaaggaaaatgttcctttgctatttcctatttttgagagctacttgaataaaagggcaagtactactttcctattaataattgtactagcattattcaatatactacgttcctattagtaactttactaatatattattattgctccttgttttttatttgctatgcaatccatatgtaacaggcatcagacgaggaaacatatgatcttgtgagggaaggtgttgttattttcactggtgctctggccaaacatctatcaaaggtgtagatggatactgaactatcttttgtttacaagatacattcacagtactaaatatagcatttgtaacaggatgatcccaaagttcatagtgtcattgagaagttgttagatgtccttaacaccccatcggaggcagttcaacgtgctgtctcagattgtttg

SEQ ID NO: 198762 - DNA, 228 bp, Zea Mays
gacagcgatagcccttgtgggaagatgggtatccgaggaagacacaaggagtggatcgaggggcgagtttgtgaggggaggtggtagtaaggttcggatagcagagacatccgaagatgcgaagggaggcgtaatctgggattgtgtcgtgaagtatttggtgaggtatttggttttgtatggaggaggaggggcgcctattgaggaggtatgttgctgttgtgaggg

SEQ ID NO: 198763 - DNA, 202 bp, Zea Mays
cctctcgcccccgtcagtcgtcttcctgccagctagccagccatcctcccgctcgttcgttgctcgcccgacggcagtactcccgcccgcttgttggccagcacaccagcctgaatcttcttctgcccgcctgcagaccatacgactgcatgccagccatactgctcactcttatatgatctgtaaaaaaactactttcgcc

SEQ ID NO: 198764 - DNA, 307 bp, Zea Mays
ttttcatcaatgttttccagcttagaaccaacagatgcttcattaatatcagcagcaaacttcaggaaactttgagcatcctgctcacagccggcggtaggatagcgcacatgctccttcttaaacttatccagagcttcaaaggctagatgaagcacaggtgaatgttcaaacttcgaaaagtcgctcagaaggaaatcaccaggatctctcattgcatctcttagtgccttgaaacgtagaaccttcggttctttgacttgtgtaacgataccaccttttgtgtaaacaccatagctacttgtgt

SEQ ID NO: 198765 - DNA, 957 bp, Zea Mays
caagcctgaagatcctaccgaagatgatatgccaagcacctcagggaggcaaatgtatgaaaccgaatcatctgcttcatcttcaaaagtggtaagggcatcgtctctggacttctgtactggatagatttgtcctttgcttcccatgttttcttttgtgctggcctatagtctgcaattaatcttagtgcttttataatgggctactcacattggataagaactatgtcatgcttgattctttatgtattttttgtcagtaatccttcgcgtccaatcacttttagtaccttttccaccgctttctgatttcctttgcttcctgtgcaaacgatttctgtcaatggagctataatactggttgaagaccggtaaaatcattttaagcctttcgaaataacataccatgtgtttttattctttaaagctctcatgtgacaatttttcctccaagttattgcaatcagtatcaattctcatcttgatgttgaacattaacagtatctttatcatctgtgtttttctcagcactgtagtctgtcaccactgccagcatatgagcctgcatttgattgggagaatgagaggtctttgatatttggccaaagggtgccagaaagtataccagcaataagcaacaggttgcttcagcccacagactaaaccaatgcatccatcatttctctctccccaccccttcttctggtgatcaatgcttattaattaatcccgttttaaattgttttgcactgtttatagtggcttgaagataactgtcaaggtactatctttgtcattccaagctggattagttggtgagcaaaactagaatattttgtgattgcttcttaacttctttactgtaatttatctcatttacactcaaccgcacaatcttaactttctgttttcacgatctatcatgtgtgtttagaacctttcagtggaacgatttgc

SEQ ID NO: 198766 - DNA, 573 bp, Zea Mays
cacgtcttgctataaattaggatgtcatcaaaaaataccagcacaaacttgcgtatgaatgggttgaggatatcattcatcaagctctagaatgttgacggggcgttggtgagaccgaatggcatgacgaggaactcaaagtggcctcggtgtgttcggaatgttgttttgtcaacatcttcggggtgcattctcacttggtggtacccactccgaaggtccagcttggtgaagaatctggaaccatggagctcatctagcaactcgtccactactggtatggggtaacggtccttcacagtcttcccattgagctcccggtagtccacacagaatcgccatgttccatctgatttctttactagaagcactggggaggagaatgcggatgtgcattcccttataattccttgctgccacatgtcctcacattgcttctcgatctcatcctttaagagctgggggtagcggtatggccgcaccgctattggcgctgtgccaggtagtagtctgatgtggtgatcatggcgtcgggctggtggtaggccacgaggttcttcaaacagatcttcg

SEQ ID NO: 198767 - DNA, 1231 bp, Zea Mays
gttttgctatctcaagattagttattcgatttctttggttaactgcagtttcaacatttgtaacctatctctatgtgtgagtactcacttagcttttgtaccttatactgtcaatgcacattaatgctgtctattcacttaaatgctgaatattgaacaggaaagtcctggaagagagagacacaaggaattcagattcgacttatttccgaatttatggtcttgttcttggtggttatgctgctgttcgaatcatgtttgcactgatggctaagatcccagcttgtcataggctctcaagtttttctgatcggtctcagtttttccaatttttcaagtggatataccaggtatgatgtcattgttcaacataacttggaaatatatttcgattacttatttatgcactgattatgtttttactaatttgttttcaggagcgatattatgttgggcggggactttatgagagtattagtgattatgccaggttctttcttttaccttaacgatttctgttatattatcatattgtggcacccttagtttattatgaactgtccaggttaacatctggagcagattttttttttaattttcaaatcttcacttcagaataccgatatctatctctatatgaaacctgtaaatattttcttgagtattgcatgtgaactagattttggttgaaaattaccaaggaattctgcttgtagtttcttttgtttcagggttggtacatgtgtcacttatcgcgaagcctacgaaattactaatttggaattgcgttaaaatagcttgacatacccttgttggttcatttacatgttgatgttaacagttagtggcaattgctcagtgtgattacttccagcctttaacagttactggcaattgaccaagatattaccatttagtagatttttgattacttgccataccgtcatttatatactcaccagacatcagttctctgaatagtgactagttctcacttattgttttcaagtgtgttgtgttatatgtttgtgacaattttttcttaagcagatacgtgatattttgggtcgtcatactggcatgcaaatttacttttgcatattttctccaggtggctctactaacaacttgcagaaagtttatgtttgttctatgttttgtatgatgataaaaaatactcataccttttcttacacgtttgcagattaggcctttagttgaaccaaccaat

SEQ ID NO: 198768 - DNA, 442 bp, Zea Mays
ctgccaatgatgcattgcttgatattgttcgagcaagttcagatccatctgcattagaaggatgcctcaaagaaccaccttttacatcctctagatctccataagatggtaaagttccgtcggcagctatctcctcgaccacacgtcgcctttttttctcaataacagaatcttcgttagaatgagatccatccacaacaatctcatcatcagtttgcattttgatgcatccgtctgccaggttctcagaatcatactggcacttgagatccataggactagattcggataaagatgaaacagcgtttgagtttgtgtccacatgactagcatgatgagctagagctaaaaacggagattctggtggtatagctggttttccagtccacaagccagttgcatcatttcgagtatataactgaggtgacgcataccattcatg

SEQ ID NO: 198769 - DNA, 270 bp, Zea Mays
atctgactgaaattgggaagtcactaaaaagacttagattgcttgagaggcgatctgtctcttcttggttgttgaaaacagtaagacaacttattgaaggaaatgaaacaacggctgctaaagctaccaattccataagcattctttctttgcagtctgatgacaaaacgacatccaaatggaggctaggtgatgaagaactactgtcagttctctatttactggatacatgctgtgatttagtctcttgtgcaaggttccttgtatggt

SEQ ID NO: 198770 - DNA, 390 bp, Zea Mays
tgaggatgaagtgttcctgttgtggactttctttcatcgagcattgatttatttgaggtttctgtgtgcaaaatatttcctagaaatgtaaaaaccgtggcagtcctttctttaagtgaactgaataatgaaacatcatctctatgtggagcaactatgttctctgaactaacagactgctctgatctccagtcctgaaatctgcacatataataaaccaaacaaaacaatcatagtcaggacaattgttgcatgtgaaaagttccgcaaatcaccaatgaactggtctcattctttcccggcaccgtaattggatcccggtgctttttactttttttggccggaaacacagctctccatgagctgattggcagggcgtgaaggctggct

SEQ ID NO: 198771 - DNA, 540 bp, Zea Mays
gaagcccattgatgaagaagaactagtctcctacatccttgcgggactagatgaagaatacaaccctgtggtctctgcccttgttgcacagaaggattctgtctcagttggggaggcatactcgcaactcctcaattttgagagcaggatggctttgctgtatggaggatcccagccatcggctaatgttgctgcccgtcgtggtcgtggtagttctggcccgcgtggccggggtcgcaatggccggtttaatcctggtcgcagcagcaacagcaatgcgccaggaaggcgtggtggtccaggagggcacagatctgatggtaacacaataacctgtcaggtttgtgacagaactgggcattctgctcgcaagtgctggtaccgatatgatgaagacaactattccaactcaaattccaagagtgcagcagcagcaatgcacagctatggtgttgatacaaattggtataccgatacagctgcaacggatcatcttacgtctcagctggacaaactgaccactcatgagaagtacaaggg

SEQ ID NO: 198772 - DNA, 747 bp, Zea Mays
gacagattcttcagaatttgacggatccaccttcactgaacatggcttgggagaagaaagcaatagctaccagaagttaacatgcccctatgtttataatcccagttatgcaaccatggattccatctttagtaggtggaacagcgacaacagtgggaactacagtgtcgatgttgaggctaggttaaccgtcaaagacgaaaatagacatgatcattcgaaactgggggcttccacagggcggagtaatgtgaggatggaatgccagttgatagggtcatgttttagtgctactcatgctgaagacacaaacgatcctctagggatcagatcatactcctctaaggatgttactgatagttgtagccatactgaaatggttcagtgcagcagcaagtcctttcattttaaatcagggaggaggaacataaaatcaagtaaaacaccaagctatgttgatttgactgcgtctaacagagtgagaggttctaataggcacaagaacaatggaaaagatagttcagcagtgtggcagaaagtagaaaggaatgacaagatggtatctaaagcaggccatccgagcgatacacctgttcatgataagggtgcaaatgaagttggtaagaagggtgtacaggaagatccaacaagaattcgggcaaaacataatccgaataagaaagtgtgcaaacagaagccttcaaatggagcagttgaattggagcctgccaaaggagaagatgcatt

SEQ ID NO: 198773 - DNA, 547 bp, Zea Mays
ccaaccccgttcagcatcaacgcaccaaacatgtggagatcgacattcacttcgttcgggaacatgttgctcttggcaatgtccgtgtcctccatgtgccgacaacttcacagtatgctgacgtcttcactaagagtctgtcgtcttcggtgttcactgattttcggtccagcctcaacgttcgctcaacgaacgtatcgactgtggggggatgttagacaacaatattcattgccttgtatataggcgtgatgcctggcttctttaagcagtcggccagccttgtatagcaggttaggatagagagagatttggggaagagtccaggatggtaaggatcaattagggtcctgttgtttccttgtctaggaggtttccttttacctctggctcttcccctatatatgtaacagcactcttctctatcaatacacacacaattcctgcattctactttacttacacatttttccatgttccatgaaataatagttgttccataaggagattaatttgcaagaattgtgtgggttgggtcaggccacca

SEQ ID NO: 198774 - DNA, 313 bp, Zea Mays
tgtgaagcacaatttaaggaacgcctaacgtgtaaagactcgacttataattatagaggaagtgatgactacttatggcatgtcatcacctctctacataagccaaaacaatttctactatcgaccaagagttctaagtattaaacacactgttactttccacacgcaaatcaacctcaacttaacactagtgaccccgatggattcttactaagctcatcatgcgcacaaccttgtctcgcatacaaccatattatggcgtgcactcgagacacttcaatcaatgtggcgcgaccactaatatatgaactcc

SEQ ID NO: 198775 - DNA, 1848 bp, Zea Mays
gcgagtcccgcgccctcgtcgagcgcctcgtgcgcgccgccgacgacgaccacgagcgcttcctgctcaagctcagggagcgcatggaccgcgtcggcatcgactaccccaccatcgaggtgcgctacgagagcctccacgtcgaggcgcaggtgcacgtcggcgaccggggcctccccacgctcgtcaactccgtcaccaacaccgtcgaggtacaactgaactacatacacatatgcatgcatgaatatgatcgatccattcaccacaactaacacttcttaattaattatatacataaaatgatggtttattctcttattaaagatacaagtaagtacgccggcgagtatatatatacacacactatgccgtcaacgtacggggaatccatgcgcacgccagggccagctagctagccagcccggctgcatacatacggctctgtttctctatgtctacttggctttgtggtcgacaccgacgacgtacgccgaagcggcggaagcgttcttactcggtcggtagcttcggtaggtgagagcgaccagtgagtgacgacgaccctttccggctgtgtagctgggtctctagtctggtcgacgacggagcaacggatatactagtgtgtctagtgtgtgtatgttaatgctagtcagcatgcgagctaaccactttgagtagtgttattgtgttaacgccaccaaccacgggttgagccattcaaacactcaatcatcagctgcatcaagttaaccaacgaccttttccccctttttttggggggggtagagggaataaaattctctgcagcagtgatgtacagagtcacccgtgcggcaccacttcgatgaatgacatgtgtctgtctttacatctcaaagccgctcgtccagacgtactggctctttgcctcaaataacgaccggctcgattagccgtgtcatcaatggctcgattagctagcatcattagctattgattttggacgcgtgtcattcatcaatatagtgccgcatggatgatggcatgcgtcagcgttgtagagaattttattccgggtagaggcagcttgaaatttctttacttcctttattttacaacagaagggccaatattctgttacaaacaactccaaccaggcccagtggcccaccgacctgttttcctccaactaacgtactataactgcctccaaaaacaaaaccaaaaaaacgcagaaagaaggcgcagttgattgattcccccgacctctcccgccacaccaaccaccaatagccgccgccgccgctcccgcttccccctagctgcggcgccccgcctaccccgctccgctcgctgatcgtctgtccctgccgtcgcgtctccatccgtacatcgaggagtaacacccaccatggcgggcactcgcggcgactccggaaaccggctctgcgccgttccgtcgagcaccttccgtgcgtgatcgacctctcgcactttgcttattgcctactcgctgcgattgtttcaccgcaacatctaatctatgtaacggtccgtactgaaaatggaagtctccttttgtgtctctccctccctcccagtccatcgggaacgcgctccacatcttgcccagcaggaagcggccgatgaccgtcctgcatgacgtaagcgggatcgtcaagccccggaggatgactctgctgctcggacctcccggctcggggaagaccaccttgctcctggcgctggcggggaagctcgacaaggacctcagggtctcggggaaggttacctacaacgggcacgggatgaacgagttcgtcccggagaggacagcggcctacatcagccagcacgacctcc

SEQ ID NO: 198776 - DNA, 248 bp, Zea Mays
caatcgtatcctgaacctccctttcggagaaaggagactctaaagcgctcaggtcaactgcacttctgtggcaattcggcaaattaagagtgaatggtctctgaatttcagcccccaaagattggagaagaaccatccaacacctcctgcatctggtcatgattagtaacaatcctgccctcatcctccaaatgagaaataaaattcctcttctttctaaaacaagcatgcatatggaaaaaccttgt

SEQ ID NO: 198777 - DNA, 551 bp, Zea Mays
cgccgcctggcgccgctgcttccaggatggagaggaggctctccatcatgcgctcccagaaggccatgaccaggagccagaccggagactgggaccacaaccgctggctcttcgagaccaaggggacgtatgggtatggcaatgctatctggcccaaggagaatgaggtggacgctgcaggcggcttgggtggaggtggagctgatggacagccggccgagttcaccaccaagccatggaggccgctcactcggaagctttccatccctgctggagtactcagcccatacaggtaaatgcatgcctttacctgcctgaaatgcattgtctttcttttcaaccgtgaatgtgaattggatccatcattcatgtgcacacacaagggcggtttgaatttggaatgcactgttgttctgcctgtgatccacttggtggtttttatttgcgttcacatatttaaaaaatatattataccctgattctgagtcaaacttcggttagacctggatttgttgattagtttccgttgttgtgatctgttgaacaaacta

SEQ ID NO: 198778 - DNA, 243 bp, Zea Mays
cggatttggttttagttgtaccgagtctaaaacctctgaactctcacaatctttctcctttacccgggcgtatgaactgctatgttgagacaacataggcggagttttaactccaaatgactaacaaatatatggacatcgatcaaattagtgagaattaagaacggaatggaacacaagaaattccatgtagatgtgatcttattgtttcattttttttctgatattaacttcacattcaag

SEQ ID NO: 198779 - DNA, 846 bp, Zea Mays
ggcatgtgcttgctgtgaagcaacagcctaggaaactccactggcagcagcttgtttctgttttgagttacctttctctcagattgaagttacctctttcgtcttgggtgcaacggctggtctttagttaccgtgggaagaaagatacgcgttatggtcaaattgatatgtttggagatgctgatgggaatgaactccccaaaggccctggtgtggacagaaatactattgatataatatactcagtaaataatcatgctgctgtttggtggggaatccatgaagctgcccggcactgcattaaccttcggcttcgaactcatctaggtggtcccactcagacatttgcagctctagaacgcatgcttttggatgtaacaaatgtattaatggtggaagctaaggaagctgaaggaaggtatatagggccagctgacatttgcttattgccaatgcgtcttctattggattttgttgaggcattgaaaaaatatgcttacaatgcatatgaaggttcctttgttctatcacccccaccaaaagcaagttccgtgtttttccatgcaaacaaacgagtttgtgaagagtggttttcacgaatttgtgatccaatgttgaatgcaggattagctatgcattgcagtgatgcagtcattcactattgttcactgcggctggtagatctcagaaacctggctgcatcatctctcagaggcaatagtcacatgggtggggctactgaaagtcatgcctttagagagaggttagaagcagatgttatgaaagtcctccggcatgcttccctggcactctgcagatgtcatgaaacagatgccttagttggac

SEQ ID NO: 198780 - DNA, 303 bp, Zea Mays
atctagttgtgggataaagttttaattttcagatttcgcctatccaccccccctctaggcgactttcaatcccattggcggcgcatggactgcaccgtgcgctcctggctctacgacagcgtcgcccccgacctcatcgagatcgcctccaaagcccagcacacggcgtgctccatctggcttggccttgaagatcagttcgtcgacaactgagaaactcgcgccttgattctcgacatcgagttccgcaccttcgtgcaaggcaacgtctccatctcagactactgcagtcgccttaaaaac

SEQ ID NO: 198781 - DNA, 595 bp, Zea Mays
ctgtgcatgacacttatccacaagatcaatgatctgcttaaacaaatgcattttctcaaacttagtcattgtttgccacccaggcttaatcagttccctcaggctagatccctcagagtgggattttgtaacatttccaccagtactgaaaagcatatggtccactctggccatacaatcatgaattgagctaggaatagtcggaatcttgtccaaagggtctctgggtcttgcattagcttgcacttggatctcctcccgtgcaccttggcacacaacccctttaccttttgatttgatttgaagtggtgatcgtagaaccctagatgagggtgccacagtcttacttctcatccggttaagaatcctatttgagaagctgcttactttaagagcattatcctgattagaccatggagacaagagaatctgctggctgcacatcatgaactcattattgacatatccaacatgactcataggtgcctcattgccagacgcattgttgttccttgagatgatattgctggcaaggctcgtcgccagcttttccatgctagaagcatcaccagccctcaagtttgcaatgtcgcca

SEQ ID NO: 198782 - DNA, 272 bp, Zea Mays
ctccaatataggcatccgggatctgagcacaggagaggatctctcattctcaacgacgtagccattgcagctaacatcggaggctgatcgacccaatcgatcccatacagagaccttcacggatccatccttctgattgtcatcaccatcagtcaccactggcgccgttgcatccatagcaccaccatcatgagagaaggaacttgggttctctgcttcaatatcccttgacgtagactgttgggcatggaattctcctggccatttggcct

SEQ ID NO: 198783 - DNA, 551 bp, Zea Mays
gtccgggagggggctgtccgcggggaggtggcggagctccgcggcgggagtcgctgtcggtgagcttcgggcgagggattggggtgggggaatagagttctgagttcacggcgatgtggtgaaactggtaggccaacctaattgctcgctggaccaacagagaggaagggagaagagggggacggcttaccggagaggaagacgacgacggcgcttccgcgaattggtctcgggcgagggaggagagtggtggctgaggctggtgcggggaaggaggtgctcggggcgacctttttataggcgcccgagggaaggggagcgacggagctccgcgggcgccggtgaggtgcacagcgccggcattaatgccgcacagcggcgacgacgagaccttacggcgagggacggtaccgggcaaggacgcggtcaagcggcgaggacggggcggtgccaaactctcttgtgcggcgaggggatgggcgaggggacgacgatggaggggacggcggtgagtcgtacgcgaggaggacgacgaagcggctgaccggtgg

SEQ ID NO: 198784 - DNA, 501 bp, Zea Mays
gtgcccccatgctggttggtgctgctactgttacagtggactgttgtgctggaataggaaatgacggccgctggggaggcctcgacggcttgctggtagttgatgtctggtggacgtcgagtgcctgagcccttcgttcacatgctcttgccaaacttaatgcatgattgagatcccgaggagccataagttcgacatcgatcttgatacgctctggaagacctgtcgtgaagagttgtaccttctgttccagagtgagtggcgtggtgtgggccagtaaatcccagaacctctcctgataatcctccactgttgtccggaatggaagccttgccaattccccgagtgggttgctgcgaagcggtggtccaaatcagagttggcatagctgcttgaaacgcccccatgacaggggtggttcatcacgcaggagctggctgtaccaagtccgtgcagcaccgagcatgtgatatgaagccaaccagactttctcctcttcca

SEQ ID NO: 198785 - DNA, 917 bp, Zea Mays
tcttgctctatgaccatgtgccatgaccatgtcttcattttcaggcttcaacctccgcaagttctcatcgtccttatttctcttgatatgagaatcgtccaaactttcacggcgattcaaaaccacatcaccacgctctctttgccgagatcccctccactcgccatcatccaaacgcttccgtgaaagatcttcatctctatcattcctatcaatgggcctcatcttatttctatgccttgcaccaccttcaacattgtactccagcctcaaatcttcttctttagctcgtcggctgtgaacaccatcatctctccttggcaaaatttctgtctctcttaccttatcataactcctaccccgcatgtcaacacgatctctgtttacataagattggtggatatcttccctgcctctggagggtaaatgtgatctttccaaatctgattttacatctcgtgagtactcatctttccggcgaagattgtgttcttctgcgtcatgatgccttcttgcattatttactctccttgattgcctatcttgaagaacctcttcacccaattcaaggcgtttctgctgatctttgctgcttccagacatccctttactattttcattagttctcaattcaacaggttcactgccattgtgtccagtaggttgctcaaccccagctatatgtttctgctttttatcagagtgaaccaggtcatcatcctcatttgcatcactaggcatgttggggtctaaagtagcatcatcaccatccacttcaacactaccaaccaatgtggcatcatcatcatcaccaccaccaccatcaaaatgatcttctgtactcagtttatctgtcgtgttatcattagcagcaagtgatccttctgaatcgccctcaacaaggttctcattccggg

SEQ ID NO: 198786 - DNA, 300 bp, Zea Mays
cgacgacgactcgggaggattgaagattgatcatcagctcgctcgtcactaggatcgttcaagctgaaattagggctaacgatcgaaggtggacgactgagaggagaggagagatcaggaatggacgggcagtttggttggggaagagaggagggaggctggaggaaagggccatggacggcgcaggaggacaagctgctggtcgagtacgtcaggcagcatggagaagggaggtggaattctgtcgccaagttaactggtatactaatcaacactgtttctgattctcgtttgttctgc

SEQ ID NO: 198787 - DNA, 381 bp, Zea Mays
tctgaaagggaagctttcattaacattggaagaactcactactgccaagaatagatggaatgttcctagcacttctgctaggaaagaaaaagaggagtcgtctgatgacctgtatgatgctaataatgatgatgatgctggttctgactgctcctcaggaaaacgaaggcgaactaattcaaggaaaaagggtcaaaaacgccgaaaggtaaatagagattgtagcattcttgaaaaaaaggtcgagcttccacttagaaatactgagagcattccggtggaagtgccaaatgaacgggtgccatatccggtacacacaaaagtaccaaatggacgagtacccatgccagtagacacaaaagtaccaaatgaaccagtgtc

SEQ ID NO: 198788 - DNA, 562 bp, Zea Mays
caaggcttcgaaggagcaattttttgtagccaaagccatcgcaattgtagggcccagttcatcttttggagattaggaattccaaggccccctaaatcaagaggccgagagattttatcccaagctacaaggcaattacctcctctagcctcctttcttcctttccacaagaagttccgttgaattttatcaatggctttgataacccatttaggagcattaagagcaataaataagtaaactgagatggcagagaggacagatttgataagagtgattcttcccgcaagatttaaaagctcagccttccatcctggaagcttggcagcaattttatctatccagtgagcgagatccccagcactaagttttttgctgcttagagggagaccaagataggttgtgggaaatttttttgaggcacatcccaaggtctgaacagccagcgcagtcctctcagtattgcactgaattgggtaggagaaacttttttgcaagttagtatgaagacctgaggcaacaccaaaacacttcaaaatttctctgactaccactaagtccc

SEQ ID NO: 198789 - DNA, 345 bp, Zea Mays
ggaagaaattcctggttctagtgctgaattggtggttaataagagtttggaggagccgaagcaggaggataatggggaagtaaagatagaaaaggcacaccgcctcaatgcaaagattaaggcggaggagtgcagaaataatgatgtgacgagtgcaacagaaggatggatgaagatatgtgggaatggggagaatgcagtaggtgaagaaggggtggctgttgatggtaacaccaatgtggatgaaagttcagagtttgagctgaaagatggagcactgcccttctacatactggatgcatacgaggaaccatttggtgctaattcaggcacagtgtatttgtt

SEQ ID NO: 198790 - DNA, 228 bp, Zea Mays
tgcgaacatcacaaaagggagatgtcattgccttccaagcatgttagtccacggaaagcaacaaaaagtagctttagaaagcaatatgaaggaccaaacagacatgtttcacgtcatactgaacatcagaaaaccaaactcgttatgaaggacagaaatacaggtcctgctcatatgagaagttgtaggccaacaaagcaaattgattgtacttgctcaagtgcttcc

SEQ ID NO: 198791 - DNA, 508 bp, Zea Mays
cgacggccttgaaacctagatccgagcaccttctgcaaagcaaggcgcagaaacttttctcaccccacctcgtagcgtctgcccgcaccaaatgcctcgcagtcgctattataccccgcgtcgcggagcgagggggtggaaaaaggagaatcgatgtgcggctggatccccgtggcgaagaatacccagcaccgatggcttgaactgggaggaggaaaaggaataatgacaccaccaaaaacaattacttgaacaccacgaacaccgccgcagcggatggggtggtgggtgaggcgacgaagaagggaaaggataggggtgtggcggagattggcgaagccgcaagccaggaacagcagcaacgggcgtgtggcgactgctcgaactgggattattacccacgcgctgcggagatggggattgggttcggatcgctgctgccattgtgtgcagccaataaaaaccaaacccccttttttcctctccgcccccgttcgttcccttttcg

SEQ ID NO: 198792 - DNA, 275 bp, Zea Mays
cagttagatcgaaaaggaaaatgacggaacataattccatctagaacgagattgagaaacatagaaatttgtctagtaagaaaacatgttgttgggtgagatactaacaaactactagatccgtttccgaatatttgtgatcccctaatttatttttaaactaaaatacgataaataaaaaaacagattaataaccatggttctgcttctgcatgccatgcagagcgccgagaaatcgtttgcgcgcgtgctgccggtgtgtgcggatggattgc

SEQ ID NO: 198793 - DNA, 297 bp, Zea Mays
tggcggaagacgagtccaaaggttttagactcagtagaactaagatcggatatatgagatgtgacttcaacactattatgcctatgttgtcttgacatagcaggccctaagctctggtaaaggagagttgtgatagggttggtgagccaacattaaacctagccattctaatggagataaaacctaaaagaaattcgttaggacgtaaccctcttatcgacgtaccgtatcagaacccaagtatggtgttaatgggtaaggatcgatcgacactcccttggtgacacgtcgtgtcac

SEQ ID NO: 198794 - DNA, 334 bp, Zea Mays
ggcctcccgtaagctatagcacatgttttcatggtcgagcgactatttttaagtacgtgttccaccaccagcgttttggtccccagagcaccttaaagttgttcttggcctcccacaagctgtagggtttaggttttagggcgtcccgtgacacatgtttttgtcgtcgaacagcgatttcgtgcctcccgtccgccacccatgatttgaccattgagactggtaaggctgttttggcctcccgtgagctatagcacacgttttcatggcccagcgaccatttttatgtccgcgttccaccgcacgtgtttttgtccccggagcaccttaaagc

SEQ ID NO: 198795 - DNA, 241 bp, Zea Mays
gatcgattcatcgccctcttcttcttcctcctcctccgcgcccgccggccgccgccgcgcagctctctgtaaccacctctgttttgtactagtacatatcgccctgtctcggggtccctgaaacgtgcattgggatctcgcgactttctgcgaccgattcctcttccgtttcctgtcaggagatccagtccaagggacttgtgccgtagttcctccctccctgctaccttgtggtttcgat

SEQ ID NO: 198796 - DNA, 546 bp, Zea Mays
tatccttccaagaggggtagaatcaaaaaaggacattggcgcacggaacaatgagttgagtaactgggaaaataaagatcttgatgtttggatcccaagaacaacaagtgctatcgatctaaacagcaagaagaacactgtgatgaatccaattgcaatgtacacagaaatcaacttaagtgtaccaacatcaggattctggacattagcagccatccatgaattctgtgctatttggccacatacgaaaatcacatggcaaagaatacccatagagccattgaagaagcctttattctggcgcaagtaaaggatataaggcttgagaccagtgtcacccatttctctttcctctgtcttgatcagctgatctgctggtgatggcttcaaagactctttgtataagcttccatgaatatcaatcgatcccttgttttcatttgttctatgggatctgactctgttaagatctgaaacaccaatagtgtctttatgggcatttacgaggttctgaaattcttgacaatgtgccaataaatcttgata

SEQ ID NO: 198797 - DNA, 304 bp, Zea Mays
acacaacaaaagaagaagagtaccataagccaaactcaggagtgaagcgcaggtaccccataatccatttcacagcatgtctgtgagaagtgcgtggggaggcttggaagcgagcacacagacacactgcaaagtgcatatctagcctcgtcgcagtcaagtataggagggagccaatcatgcttctatactccttctgctccatgggctcgccgtcctcatcgccatcaagcgtcgtcatggtagacatgggcgtagaatgagtcttggcctcgctcatgtcgaacttcttcaggtcgtcctt

SEQ ID NO: 198798 - DNA, 827 bp, Zea Mays
ggtttatgagatgttccacacctacaagctgcgtcggcacacccgtcactggtctgcaccacgttcgtctttgagttcttcgctgaattgaagcaccgttgtcgcattgcagtggctctctcgaggaccttcctatgtgtcgtggctctcccgccgcggcaacttcaggatcctcgatgagtcgtcacgcctacctcttcgtcttcttccagcacaaccttgttgccagcgtcttcttctcatcctcgactacttcgtctactccgctctgacaactgtgagttgcgacggcactccgccataccgcaccagtaccgtcgtggaggtcttctctgctagtcccttcagatgctgacactaggttggggccttctacctagtacgtgcggtattagcaacactagcacgtgcattcatctacgacgtgtttccaggcgtggcaaacctagagcacgcctcgttcacgacggtttaacaacatcgtcctcagcatcgactacttcctctacggctgcctcaactatgttgttgtcttcgtctatggcgccctcattctgcgctgtcgtcaccctggcgcctcctggcgcgtcgtaggccttcccgcgtgctgcacccgcaacttgtgcggcttgtcttcttcggcgtcctcgatagctacatctaccacagctacccgacacacggcacctcgataacggctcagcacccttgcactcgatcacctcgacattatttgcacaaagggctatcatttgcatgggctactccagttgcagcattcgcacctgtgttccgactattggggggatatctccattgttcttcag

SEQ ID NO: 198799 - DNA, 1240 bp, Zea Mays
cagtaattggccttatgcaggctctcgctgtcctgtaagtctcacagtgaattctagatgattgactaatctacaaatcagacattgcattctcattgctgccttgctggtagtgaaagaaatatgattgctaactcatgaaacttttactctatcagagatctgagttacaaccaattatctggtcctataccatctatactaggcaacttgacatacactgagaagctgtaagatttcttatcaccctaaatccggttcatagattttcaagattttagttttaactgatacaagtcaccactagaaaaagtttgtaaacatatttttaagtttgtctttgtacatgttaaaacttcataggtacatgcaaggcaacaggttaactggatcgataccaccagagctaggaaatatgtcaacacttcattacctgtatgttttagtatttctactgttatggatatcaatattaaggttgaccattaatctattttgacataattatctaaattcagagaactgaatgataatcaacttactgggtcaattccaccagagcttggaaggctaacaggcttgtttgacctgtaagtacttttccggcaccctcttattacttgtcacatgaaccagtgttttcttgttctccagaaaactacattgctatgaacatagctgattctacttgtttcacaggaaccttgcgaataaccaccttgaaggaccaattcctgacaacctaagttcatgtgtgaatctcaatagcttgtaagcacaaattatttctgaaagtttgcaggtcatgagcaatgtcgcaagtatctatataacatgctaattttatttaacagcaatgcttatggcaacaagttaaatggaaccattcctcgttcgctgcggaaacttgaaagcatgacctatttgtaagtttgaatagattttgagtttcattctgtgctaactgattttgacacatttccattttttgtactgatatgctgttttcctcatattgattcgtaactcacattcaaacttttattttgttcctttagaaatctttcatcaaatttcataagtggctctattcctattgagctatcaaggatcaacaatttggacacgttgtaagccttcatcatctcacatgcattaatagtatccatttcgtgctaatcctatatataacatagatatatgtaccagggacttatcctgtaacatgatgacgggtcca

SEQ ID NO: 198800 - DNA, 313 bp, Zea Mays
aagattcaggtgctcaacaagagcctcaaaccgctgcataatatgagatgcttctctgttctcaccgccataaaatgccacactctcagcatgtgttcttaaccgcgagtgaagttgacgatagtctccttctagttgctgttctgtagatttcagcttcccaaaagcaggagaaaagttctttattaccccaccagcaactagaacatatgcctgaaagcatttgcatattaatagcaccgagtagttagtgggtgagaaacttgttgccgtgatacattataaaagcactaaggaaacagcttcaatagag

SEQ ID NO: 198801 - DNA, 498 bp, Zea Mays
ccgccatgctcgctcccgagagcccagacccgcgcaccgaagaagaagaagaagaggaagctactgcgctcctctccccccacgcctcaatccatcccctaacccttggaccatggccagcagcaagctcctgagttcaaacggctccaatccctccgaggaagcagaggccaagacgtgtagcaccaccaccaacaacaccaagtcgcaccaaatcacagcccggagcagttgaacactggagcggtcgtgtgcccaccggtatttcaagtggcagtgaggacgcgagggggcgcgagaggacagagagccactgggaggagtgggaggttctcgctgggtgctcggcggcttgctcgagtgggcgtggtggcggtgccggtaacgatttctacggtgcgcgagcgcaaaggcctcgcctttccggtgccgcgcgcaattcttttggcttcttttatttagccgagggcgcgcctaattgcgctgcgctaatgggat

SEQ ID NO: 198802 - DNA, 339 bp, Zea Mays
ggactattgctaactgttgtagcctttagaagcataattgctggattcattgtagatttgattcgaggctagtctggttatgccaatgaaggtatttggttgtactttagattttgtgtgatatacgtagttgtgtgcagttatttaaaccacgatatgtttgtttgactatggagctcatttacagtgccatgccacccaacttggtgagagtcaaagtatattaaggatgttactgctactagctcttatgttgcattcaccatacatccaactttgtgtgatatatttatgttcagttatttaaacttcgactgcttgtttgactgtgcacacatc

SEQ ID NO: 198803 - DNA, 282 bp, Zea Mays
accttcttgttctatgactatagccacccgtgagggaccggtctggtgctccggctttggtaagttcttaatccggtgcttgttcttgtgatctgtgttcgggccgatctagtgctctggctttggtaagttcttaatccggtgcttgatcttgtgatctatgcttgtgatttgtgtaccaaccctaaaccctaatctactctactaccttcttgttctatgactatagccacccatgagggaccggtctggtgctccggctttggtaagttcttaatccgg

SEQ ID NO: 198804 - DNA, 740 bp, Zea Mays
gccaaaaatcccgggatttttggaggtggtggctgcctcgtggagtctacctctgcaggagttttgtccatttgagaagatagcactgaagtttaaaagattagctaagtgtttgcagtcctggggtcacaaagaggtggggaatgtcaatgcccagttgggacttgcccgtgaggttttgcataggctagagatggcgcaagatatcagatccttatccagggaggagctttggctatgggggcagctgaaacaacattgtctagttttggcgtctttgcaaagaactattgcacgtttgcggtccagaattcaatttttaaaagaaggagatgccaatactcatttctttcaccgacaggctgtttaccgtaaaaaaaggaagttcatttccaatctagaggaggatggaagggtgtacacaaatcatgaggatattcaaggagttctggacggtttctttaccaaccttctaggcactgattttccaaggtctgttactattgatttgttgggctgtcataggcctgcagcggatctcagtgagctggataaccctttctcggagaaggaggtgagggatgcgattgctgacctgccttctgacaaggctcctgggcctgatgggtttacagggaggttttacaagacctgctggagcattattaaggaagatctgctggctgccctgaattttctgcaccaaggaaatgctcataaacttggactgttgaattcag

SEQ ID NO: 198805 - DNA, 1430 bp, Zea Mays
gttggtgatgtgatatgtgagatagaaactgataaagccactcttgagtttgaaagccttgaagaggggtattgcccttgacgaagttttctaagatgctattagtacctttggttattgtgatgttacattcccaactttacattttctatcaagatgttgtaatctcatgtatagtcattagttcttttcattagaaccccccatccagggacagaacatgtgatagtgctccaggaacagattcttgccaaaatctaatgaaacccattcattatatttagttccaaagttagcaccatgttttgtttattgtaacctactggtacattcctttatatgaaagaattcactagtggaatgaacttatttaaaccttatttatttacattcagacaatctttatcaatctgttgccccaagccacactgagcataatatgcattcttctttgtttcacctgattgccttttccattgcacatgaactgtgttgacggcagactgacgtgagctctatagtatgaccataaaatgcatggaaggatactccattgatcttttacaactttaagtctatttaattcctctaccattatgggtaattacataaaaagtgtaagcttttaaataactagaaactgacactgctacatcaaacaattatggtttcatttttttctttagtgttatggacaccctgctggctgcccataacgttcatcttgtgtttatcattttttattcttgtgtgtcactttatcctttcttatcatgaatgttttgtatcatgcacacaccttttgtgtttacccttacccctttaatgcttcaggtatttggccaagattttagcacctgaaggttctaaagatgttcaagttggacaacccattgctgttacggtataactcataaacacccattttaatgtaatgctttacatctattttgtactgagtgttagttgtccattttgtaaggttgaagacgttgaggatattaagagtataccagctgatacatctttcggtggtgaacaaaaggaagagcaatcaacagaaagtgcaccgcaaaacaaagtagttaatgtgtctgaacaaagctcaacagtgagccggatcagcccggcagctaaattactgatcaaggaacatggactggatacatcatcactgagagcatcaggcccccgtggcacccttctgaaaggggatgttctggcagcattgaagtcaggtatcaattcaagttcaaccaaagaaaagaagtctccagctcaaccttcgtctcagccaactcgagattcccaatctcaagcatcctctatttcacaaaaggatgatacatatgaagatattccgaatagtcagatacgcaaggtaccgtgtttgactttattaatttcagtagatattccgaatagtcaga

SEQ ID NO: 198806 - DNA, 416 bp, Zea Mays
gtcatgtctcaaatccaaagcttctcgaggaacaactgtgcgctcctcgcggtgctgtgtgggaagtatgctgagaaccgcacaccagcagcgaggtctgggctggaggcgaagcggccgcggccggcttacccgttcccggagctcagctcggctgggcgattggaggtcaactgtgtgctccttgcttgagtgcgttcattgctgtttctcgcctttctttgttagctgaatgaaggggcttctgaatgcaggtccacaccctgttcaatcctacaccagagcagttcctcgaggcgcagcgggtggtgcaacctaacttcttgtacatccagggccagcagctcgaggatgagaaggagattggctcacttgtatggggggacgccgatgtctctgatccgcaggcatttagc

SEQ ID NO: 198807 - DNA, 683 bp, Zea Mays
ctcaatcacagcactctgaactcgctgggtgcagggcacaaccccctcaaaaacacaagcattacggtgcttccaaatctcccaagcgaccaaaatgatcaaggaattaagatcttttcttagactcttctccactttcttgatactttggcaccaccaatttgagaaacgagtgcatctaggctgaggtacaatggctaggaggcctaaattgtgtaatatggacgtccatatttgccgagcgaacacgcaggagacaagaatatgctggatggtttcctcggcctgatcacacagagggcaagcaactggatggggcagacctctttttgccagtctattagctgtccaaaccctgtttttgattgccaaccatacaaagaatttgcatcttaagggggcccaggtcttccagacacgtcgccaagggccaaaagggatagagccaacaaagagagcatcataggccgatttgctacaataagtaccttgagcagagaggcgccagatgtgttggtctgcgatgtcagattgcagaactaccccatcaaccaagttccatagctgcagatactccactaggaccgttacagacaatcatccccgaatatctgacacccattgacgatttgtgagcccctcggctactgttcttcgctttaaagcccttctagaaatcattt

SEQ ID NO: 198808 - DNA, 724 bp, Zea Mays
atagctgggcttaaaggcaaagctatgctgaagatagccgaggtcgacgtagttgtggtcggtttgtgttggtggagcttcaagcacatgagaggcaacagagtgatgaaggagacatgtcgaggcaattacgtgtgggggggatgctgaggtcgatgcagttagggtcgatgtagatgaaaggcgataatgcaattgaggctgacagggaatcagggatggaacaggagggttgatgttgacatcgatgcagtcaaatcgcttgaatcgaggcatgggttgggtttgccagacccagcaatgtgttcggaacgaaaacgtgtgccaatgtagccaataccagatgaacgaggtagagggcctcaatcatatatcagcatccgagggaccaacagagaaggtctcaatgacgattgcggtgtgcagaataacaggtagaaggtgctgatgtagcatgcaactgtcgaagtagatgatgttggtatggacgaggcgacgacactaacaacgtggttgtgctggatatagtgtgggagcggacgaccggacgcgtcaaacccgaaggtgagcaatttgtgtgggcatggtcgagtagtccggacgtagggcatggtcgtagtggtgtagcggtggcctcgcggagggcggcgacgttctcatgctcacaggtagcgctctgagttgacaacaaagactcgatgagtaggacgaagaccttgtgcag

SEQ ID NO: 198809 - DNA, 606 bp, Zea Mays
gtccggcgtcacacatgtgacgcaagaaaagatgcctacacgtcccggcccttaattacccaggtctaagctactacacgagaagtacaccaccaggagatagatgtgacaaaaagctggtcaagaaaacaaatgcagagagagagagagagagaaaagcgtgcagtactgtagctagtttacttggaagataaacatgcgtcaacgtcagaatgatctctaatcaacagctagcttttgctcgagcagaggcaggcctaatcaaactttagatgtggggctgtgggcgatccgttctgctggccgctccagaatcttttaaataaaggcgaacacggccgtgcgcgtcaactcaagcgcggcctgcttttacgcttgtctcttgtgttcgcgctgtgccacgcagcgtcgctattcaagacaacatccccatccaattctattcccgtccattcagaggaacgccgttgctagcacgctgcctagctagctagatgcgtcacgctcacaaaacttgcccttgtttgcagcaacagggcaatcttacccttttcttctatatatagcggccgcgtgctgaattattggaggagtagggttagttat

SEQ ID NO: 198810 - DNA, 347 bp, Zea Mays
aagaaattgacatctgatgtctggcagtacttcactaaaaatgagaaggtagtagaggttggtggaaagaaatatatccagatgtggggatattgcaactttcctaattgcagggcgaaatacagagctgagagcaactatggaacaactggctttcggaaccatttgaaatcgacccatagcatagtaaaggggcagctacaactcaaaacagaaaaggaccatggcaaagatatcactgttatcgagccctacaagtatgatcaggaagtaagtttaaagaagctttacttagcaatagtcatgcatgagtatccttttaatatggtagagcatgactattttgt

SEQ ID NO: 198811 - DNA, 992 bp, Zea Mays
ggctatctcatcccgatttcttcaagtccctttccccaagcagacaatgatagctaatgatgatgctcctgaaaaccaagctaaagcaagtgcttctgctatgaattcaaccagtgcaaactctcaggttatgattgaagaagatcctgtcacatcatcagtgcaatattgttgtgatggctgttccaccgttcctatacttcggcaaaggtggcactgtagcatatgtccagattttgacctatgtgaaacttgctatgagatacttgatgcagatcgtttaccagcaccccattctaaagatcatccaatgtcagcaatacctattgaagttgatacatttggaggtgaaggcagtgaaatccatttctctgtcgatgagctaacagattcaggtgttcttcatgctgataggagtgttcagacctccccatcatcaattcatatatttgatgcaagtgagtctgcagacttacctgagactattacagaccaggcaactgtttcgatttctgcatcaaaacgtgccattaactccctggtacttaaccacctaattgaagagcttagaggctggatggggaccactgctggtactcgagccatacctttaatgcagttattctacaggctttcttctgctgttggtggtcctttcatggatagttcaaagccagaaaattttgatttggagaagtttgtgaagtggctaatggatgaagtcaacataaataaacagttccctgccaaaacacgatgcacatttggtgaagtattgatccttgttttcatgttcttcacacttatgttccgcaactggcatcaacctgggagtgataattctcattcaaagtcaagtgggagctctgatttgacagataaaggtcctgctcaggttctgggatcaacaacaataactcttccgtcatctagtgctgacctggataaaaatgagtttgcttcccagttagtccgtgcctgttctgccctca

SEQ ID NO: 198812 - DNA, 428 bp, Zea Mays
gtcccctccaaatcactcaattattctttagccttccccatttaaattaccattgcatgtagtagtgagtagtgacagtgatgccaaataagtgtaattatacacaaataccaaatagaagcacggtgcagagcgatcatctgttccaatggcagtgctccctaacgtctcggaataggctggcgagaaggttccggtcgtagtccatggtggtatactgtacaacgtggttgaagtaggctacggcgtcgtcatcaggtagcatgcagtgcatgatcccgcaccggcggagcacctccagatccctccgcgagttcacgagcgacccgacaagcgccacgaagcccgtcaccaggttgcccccgtccagctgccgcgccgcgcggccgcctccctgctcgaacgccaccagattcgcgagcagcacc

SEQ ID NO: 198813 - DNA, 307 bp, Zea Mays
tgcctgatcaaaacggattatcaagttacaacttggcacatctagtccctcctccaaaatttgtgtggcaataatcagatgcacctacaatgtatcattttatcatcagtacaaatatttatcggacacaacaacagcagggcaacataagcagcagacctttccactccgaaatgaatcaacgatttccacatgcttattcctactctgatgttgcaaaccacaattacgccctgatgccatgtatctaacactccatccagacatttgattaatagttgacagaagggcctccaacacaatgctt

SEQ ID NO: 198814 - DNA, 277 bp, Zea Mays
attgtcaggaattcctcgtcctccagaacttgtattcgtcagtggacaactgaacgggtcagtcggtctttgtaaatttagttgggcattagttgaagtccgtgtacagtatttatcttggccaagttgatgtagtttagttgaagtcagtgtacagtatttatcttggccaagttgatgtagttgtggtgctaattatattcagttttgatgtaccagtgccttctgtgcatcaaatggcatttttgtacattttagatttctggtccactcctgg

SEQ ID NO: 198815 - DNA, 871 bp, Zea Mays
gttgacagtgatttacttggagatgttgcagaacaaaaggaagttgaaaaacttgcctccaaaatgaaagagacaaagaagagaatgtcgtttgagactcttaagctgattgctcaaagtattacattcaagaccgatttactgaagaagataatctcacctgtttctttacatcttcagaagcaacttactccaaagttgaaaaccagacttgagatgatgctacacaacatagccttagggattgagtgcaactcatctactgaaacatcaaacttgtttatcttcgtatattgtcttattgaggatactattacaggaagcagatctgaatgcaaagagaatacacaatctagtcctgatcaagacagtactgtaagaaagaccttcctgggactaggtgagagtggatcacagaattcttatatacttaccaagtttgcacttgacttacttcgtaatcgtctgaagagcatcaagcttgacaaggaagatgaacaactcgtgaagatgttggatccttttgttgaccttctgcgaaagtgtatgagttcgaaacatgcaagtgtcctctcagccacatttagatgttttgccttgttggtgaaacttccgttgccatctctgagggacaatgcaattactataaaaaatgtacttatggagattttacagagagctggaaactccaatggtcatttagtcacatcttgttttaagctacttgctgatctacttagaggattcaggatttcactttcagataatgagcttcagatgcttgttcatacccctatgtttgtagatcttcagacaaacccttcccctgttgccttatcgcttctcaaaacaatagtcaggctaaaattgg

SEQ ID NO: 198816 - DNA, 566 bp, Zea Mays
cgaagactggatgttgggactttctggccaaaccagtataaatcttacgcccaccgagcacaccatacgaaccgtggaacacgcacatacaaatttacttgttggagcgtaggttcgaaacaccgacagttggtgcactatgtaggggattgcgtgttcctgacgtcttttccaagctccggatggctgaccacgacgtagtttaggcccctggaacgaccattcatttttaaagcctcgacttcgtcgtcaacaacgagggaatgatgatcaggtcctcgaaagaccgatcaccctcgacgtatatcttgatcgacattgctaggggcctcggaggtctccagctcaactcccattagggaagcaacagacgacggcgcgcgacgggaccaacttgtgtcgagtttatgggaatgatggagcatgttagggattcattccacgacctcctctgtcgggattagaacacggacatagttccccgtaaagaggagcaaatcgcgacccactcaggagtgcttcacgaccggcaccccggaaaaacgttccccactcacaagaagccc

SEQ ID NO: 198817 - DNA, 681 bp, Zea Mays
tatgcttgttctccatgtctgggtgaagctagatagtttgaagtacatcccagagatcaaggaggtcggcaaaggcacctactgtcaaggcccctttaatatcagttaaccattttctgtctgttaaggcctcaagaacagttctgctgttcctaatcttttttggcacagctgcaagcagtcgaggagcaaggtcttcaatattctttccgtggacccaacggtcttgccagaataaggttgaagacccattgccaatgtcagtgagcatgtcagtgtaaaagaaggtcttcattttgttggaaaactgcataggcagtgaggaccaaggcttatccggatccgttttgctcagccacaaccaactcattcttaaggcccatcccaattctgagactagaaatcccaagtccgccgatttcaagaggtttacaaactctgccccaagccactaaacaatgtcctcctttgacatctttccttccacgccggagaaatccttttctgatcttgtcaatagctttgagcgagcctgtgggtatgtcgactgccatggctaaatagatgagcatgccggtcatcacatactgaacctgcactcttctgccagctcttgtcattagatccgctttccacccagacagttgatctgccactctgtcaataatgggctgcacctga

SEQ ID NO: 198818 - DNA, 1452 bp, Zea Mays
tctaggtgttcggtgctttgagaatgtctgtaaagatgctccttatgtggaactccagaatggaaattgatggcggtggagattcgatagttgcaacatctttgttggatgctagcaacctgatagttctgaaggtttctagttggtccaatgttaattaccgctcttcctattttgctgcttgtgctcagtatgtataactattgctcatatgttttcaggaatcatctgtgatacactctaatgctaatcttggagttcggggccaaggtctcctaaatttgtctggggacggagacacaattgaggcgcaacaccttattctttcgctgttctacagcatacaagtatgatatatatgcttttcagcatcagtgtcttttttagccatcacctttctgatgtatttgtttattgctgcaatcttagcgtatcgcatagcaattcacattttgaactctacagtgctgcactgctctagtcaaaccaaagatgcagtactggtcattttttttgattgccagtacaggtaatttttatagcaatgctaatcgtaatggtttcagtcatatgtccccacttattttaagtgtatctaagcaatagttatactgctgtaatgactgtcatacttttgtgtgttgtcttgtttgctgtctggtgtctgctgtgtcatactatactgctgatgggtttttcctgtacacacaattcaaatttacaactacccgggttgaatgttcaatatgtggtcacatgagatattatgttctttttcgcttctgtgaccagttaaagaaagaatagtgataaatattcattttgtaggttggacctggttctgttttacggggcccacttgtaaacagaagtagcgatgatgtgtaaatacttttaccttcagctatcacatagagacattctttttccctattttttatgttggaaatctttttgctcattaataagctcttgcgcatctattagggccccaaagctgaattgtgaagctgatagctgccctgtggaaataattcatccaccagaagattgcaatctaaattcttcattgtcatttacccttcaggtacactcaatttttgaacactcgcatgcagctcccagatagattctctcataagatgcagcttatggtatctttctcctatttaggtctgtcgtgttgaagatattgatgtctggggtctcgtacaaggaactgtaattcatttcaatagggcaagaagtgtcactgtgcatacatctggaaccatcagcgcatcaggcttgggtaatttgttagttttgtacttctgaaggaattctctgttggcttgttgcctcttgtatgcagttctaatttatggggaccaagggatagcttgtatccctctgaaggctcatgtcattagcttagccattagagttcagagttcttgtaaaaaattgctg

SEQ ID NO: 198819 - DNA, 354 bp, Zea Mays
tgaaggttccactaccagtgccggtaatgatgtggaagtagtatttgtttcaccccagcctttgtctgaatcgaacaggtcaatctcttcctagtgctcagccatatatcctaatctaggattaacaagttaatcctgcatgttcgataaaaaacatcttcatcttaataaccaatctattgctgttgcattccactatttgtaggaatatagaaaagtctcattaagatacactcttcttctcagggtgctcattatcttcagagatggggttatgagtttgtgggatattaaagctagcaaagcagtatccatatctggtaaaactacgcagcagcaatcacagaaggaggc

SEQ ID NO: 198820 - DNA, 515 bp, Zea Mays
aattggtggaaggactctagttccagtgtctccgatagcatgactacacaggcatctgggtgctgcttgagtagactctccagtcccctctggtgcctgatgtcatacgcccactgcgggctgttccacaccatgaacactctcatggaacacttcccatgctcgaagaacctctccatgaactctgagaatcccaaatgtggatcgatccccgggaaatatccccacctccttcccgtctgcggcttctccttcacagttgttgtcatgctctgcttgttctcgtaagatagaagcctacgccgctcaaagctcttggacgcgggcttgtcgagctcggctagtagcattcgctgcaccatgcggtcgccgcgggtgagagaagtgaggccggggctgtccggatcctggagaagcgggtggttgcgcggattgagggattccaggttggagcggagcatccgatcgcgccgtaggtagtcggccttcccctccagccagcgtgcccacccggc

SEQ ID NO: 198821 - DNA, 351 bp, Zea Mays
gttcaccccttttggctaaaaatggttggttagcactaaattaatgtagatttgccatgattaagcttaataatgcacgtgtgtcatgttttgtatgtttcttgctgtagttgattgtgatataggagtctatcgacattgatgcataggtcctctattgaacttgtgttgggatgctttttgtgtgcttaatagaagaactaatgaaaggccgtagctaattaaataaatgctcatacttgtgatgtcctatgtgtgttggttaattataggtagtaatcgtcgtccttccagtggtattgatgtggtgcgctcgatagagtgtagatagctaatgctagcatgtggttg

SEQ ID NO: 198822 - DNA, 680 bp, Zea Mays
aatttagatcgcgtgcgtgtgcagcaacggcggcgctcacttctccgattaaccttgccgcgtcccgacgccacgtcaacaaatacgcgggcgcgattcaaatcccgactgacgcctgcctgcctggcatggtttggcctgccctgccctgccaccaattcccctccctgcattcgtacaataataatgagcgtattttagtccatcccgttgatttggtcgagtatttattggctgccacatttttccacccacgccgtgtatggaactccacggatccgtatctcaacttggccaccctccaacaggcgccgtgttcgttacacggctagtcctctgcaacgaacaccattagtcctctgcaatgaacaccattattccatggaaacttgcctcacgaaaaatctctctatacacttgcattatccatagactgagcacacgacgcgcgctgcgcgctacttcacatcccactactcctccaggttattgcatcatgcgtaataactatgttttaatatgctgccgtgccatacgtaacgttgcaggtgctgcatcaatgtttaccatacgttattttttttgcgtgcgtgtgtctgttgtctgtttatgtgcctttattgtatagttattagggatgatatctagtacacatatagaatcctagtcttcaaagttag

SEQ ID NO: 198823 - DNA, 417 bp, Zea Mays
tagcaggtagtggtggcagaggccggaggccagtcatcggctgcagtgtcggagcgtgacgtgaaatcaagagggggcgacgaacgatttggcttctggatgtagaatcggagatagatcgaagcgcgtggcggcgtgtttccgtttgtgaaaatataggagtgctgtatggtcgatggcgtgcgcgacggtggagcagcacggcgtagtggcgggaggaggccgtggccgcgccaaccattcacttgggactgtcgtgcaagctgcccatccctgcgctcttgctgaagtcctgtgttgcagctgctcagctgtatgcttgtgacgagcatgtggtgctgggggccggcggggcacataatttcaagcaagcagatgaggatctacaaccaggagggtgtatccatccatgaattc

SEQ ID NO: 198824 - DNA, 368 bp, Zea Mays
ggccgattgagcaagtgggtgcgcacattgctatgctgcccccgtttgacaacatgtgctaggcttggcattaccgataagcgcagtgttaaaatagtgccagaagccagtagcaatagccatcacgctgacagctgctggttaagcttccttagtatacacatcaccttttgattgaaggtgtcatttgttctctcgggtcaagaaggatgcttatttatagtgccagtacgtgttggagcaagtgactctgttgtgaaactctaaaacgtccagtgcaggtgacacttgggatttgactaagttcagtaatatgtgatcttatcggcaaagcaaaagaaatttaccctgaatcataccaagacatg

SEQ ID NO: 198825 - DNA, 262 bp, Zea Mays
aaactgggctcctccccttttgtgattggacttaagtgggattcatatatcaggagtttggattcttctctttcctctgctggtgaggacgtcgatcttcttctttttgtgttgtttcccccctttatcttcacattcagcgatcttcaaattcaatctgttgtctgtcggattggcgctctagtctggtgggtttgctttcagatttgccgagtatcaatccgggtccccatttgttggtggttgaagctcgatttctcca

SEQ ID NO: 198826 - DNA, 803 bp, Zea Mays
cttcaatgtccttttcacactgtcgcttatgtacctgaaccgtaagctctgaattattgtgttgattccttgcttatcaccttaaaatagaatccgaatcctgccaatgatattttttgtgttaatatcagcaacatatgttctttaattctcagctctcggcaagccacaagctgttatatcagaagaaactgcaaaggaagcggaaggcaacgggcattcaaaaggggcaataagaaatggaagcacaaaaccaaaggacggtagtcataacagtaagcaactctgacagaagtcataactcataagcaaatctgaaaaacaagtgacatcttctaatctgaggtttggttatttcagaggaaatgaaggagatgaggttgagtgcacgtttgagcaactgttcatcaaatggggtttcacgactcatgtccattggcagcaatgaagctgctccaacaagaggaatggttcttccattcaaccctcttgctatgtcttttgataatgtgaactactatgttgacatgcctgcggtgagttgaccttcgagtattctcagcagttgttcctgtcccatttcttaccttcttcaatgtgcttgtacggtaaaatatggaaactgatggggaattctattgtttgcccaggaaatgaaacatcaaggagtgcaggatgacagactccaattgttgcgtgaggttacaggatcattcaggcctggagtgctgacagcacttatgggtgtcagtggagctggaaagactactcttatggatgttttggctggaagaaagactggg

SEQ ID NO: 198827 - DNA, 221 bp, Zea Mays
ggcaaattcctcgatagtacaaggaaccaacttttttaggtcatccacagatttcttcagatcttccacagatttgagagcatcctcatcgtcactttcaccagattttccattgttgcttgtccaatcttcatcaccatcgtcttccatttcagattctgaaccttcatcctctgactcagcatgctcatcctcctcctcactttctgagtaatcctccc

SEQ ID NO: 198828 - DNA, 745 bp, Zea Mays
tatagatgcctcctccgaccctgatgcagataagaagggattggattctgagatggacatggtgagaacttaggtttcaccaattcttttgattggcatcatgaactggagcattggatattgaattctgattgacctttttctacttttttctttcggtttaatagttggggagaggaaattcggaaaagaaggatggtgaaaggactctgggagggctggatattgatttggaggaccagaaggtgcaaagaattccagccgatgagtccacgcccaagaagctcacactgcagttggatttggagaagcccagtcttggtgatgaaaaatcaccatcacagcgacggcagccgcatcaacatccacaacaattgcagcagctgaagccctcaaaagctgagataaagcacgagaaatctggtcagtgttttgatgtgttatttccattcgttccttggttttgccttctagggaatatgtttgtttccatttttttaatctggattttcttgtgttgcagctatgcctgctgttacaccacctatacctatacccgttggaggttggcttgggaatttcccaccgtttgggtgagttcctttagctgctggatacgtagtgtgcacctcttttgttcagtgggttggtttctgaaggtgctgttttgtgtcttggcagttaccttagtccagtcccaggcctatcaggagctggtcttcatcatcccatggacgtgaagcca

SEQ ID NO: 198829 - DNA, 328 bp, Zea Mays
tgcgcgcccgccacctgcgcctcagaatgcagccgtgcatgttcctgtctccgcatcacggccacaacaccagggtgagtgaggtgtcctgttccgctatcttgtactgtgtttggaatggtgccgtttggattgataaacatgatgtgttccttcgtttgattgcacatgtttttttttgattcaccagatccacatgtgtcatcttcattgtctgccagcgagaaaccggctaatccgccgttaccactaccgaaagctacacatgctgctccaagggctctaccaaaaaactctaacacagcgcttcctcagggaggatcgcaag

SEQ ID NO: 198830 - DNA, 283 bp, Zea Mays
atgttaaacctggaatgttagtgagagctaaggttgctactgttgagccattcggtgctattgtacagttttcaagtggcgtgaaagcactttgtccgcttcctcacatgtcagagttggaacatgttgttaaaccaccaaagaaatttaaggttgctcatttccacatcaattgtttgcacatgaattttttatgttaagagatgttgaatatgatgatgaatgaactttaactttgttctatgtttaggttggagctgagcttcttttccgtgtgttgggc

SEQ ID NO: 198831 - DNA, 1144 bp, Zea Mays
gggagggagaggtgctttggttcctggatgagctgtgaaggaactgggagcaagaagaattgatgtttactccgcagggcaaaggatggaccggctggtcgacgccaactccggccaaccagcggagcggtggtggggctcctgctgcgtcggcgccccttggaaagggcaaaggaagggtcgccgagctcgagcaggaggttttgctcaacctttacctttttgtccagtcattcatgttctgtctgaacctgatttaggactaaattcctctgctcccttttgttattgattactgatagttttggaactaggactatcaagtaggtcctgctattttatattctgtttctatatcatgtagtcagtctgtaaaaaaagatgaaaatgcaatttaatttgtagacattcaactttcattgttgaaagaggtgcttttgtcaagttgagttcgctgcttacatgaaattattgcagcattgtgaaatgaagcatatttgtgaaataaagtgtcagactggtaacctattaacaaacaagtcatattttagatgtcccaactcccaatgaaggcataattgtgaaataaggcatcagtctgggctctatgatattttgatatctctaaaatatttttgctatgttggttttcaacaatttgaaattttatacatctgttgtagaagttccatacttttgtgccaatttttttataaatttcaatgtctagattctctgttgtataaagcgaaatgtagcaaattatgccattccaatgaaggcataccaacacctattcaagtgtctgtttggtgcaattttgattttgcatccaatttcttgtttttctcgtgaaaagttatttgttatcatgtcactttagatctccagtttattggcttccgttcattaccataatagttgtttaataatagttatttatttgtgtattcatcccatatctgcagttgcatgaatatcagtacaatatggggcttcttttgattgaaaagaaagaatgggcagcaaaatttgaagaaatcagtgaagtgctgacacagaaagaggagatactgaagagggagcaggcggcacatctgaatgctatatcagagtatgaaaggcgggaggagaacatgcggaa

SEQ ID NO: 198832 - DNA, 912 bp, Zea Mays
agttgtgttttatcatctgactcaacagcaccagaatcaacaaacatggaggataactccccaaggagtaaacatctaaaactcttctgagctgcaacatcatcatcaggagctaaagtaacatcaccaaattttgtcaacaagcctctaatacatttccaaacatcagcaatctctggacgggattttggatcatatctcaagcacgatgctataactgcagccaatggttcaagtatagtaccaagcaatgtggcatcaagccttgtaaccacttccttctcccaatcatcatacagtccttcagagttccaacctgccacaggcacaagctgttcatccctagtaagaagtgccacgaacacacaacccaacgaccagatatccgaggtacagccaaccaaaccatcaaaatcacgaccctccgtccgcaacgtgtcacctagcactgccgccacctctggagcgatgaaagctcgaacactgttcgagctagccccagcttggactccccggcacaaggccaacgcctgattcaaatcaagcatgcagtgcccaaaacgatcgaggcagaagcagtccagcccgaggcaccccagcaccagcccctcgctgtgcaaccccatgatcacttcacatgcctccattacaaggaatccggcccgcaccaccgtctcctctctattgataatctcctcctccaacaattgggaaaccgtacgtgggtgccgttcagagaccatccatagtggcggcgcgtgaggggacatccagacaccgtagagcctgctcaccatccgtgctagcctcgcggaagaggcgatcagaccggccagctcctccttggtcgcgtcgctgagcgcgtcgaccgcggcgaggacccgcgtcgcgtggctgggccggtagaattcg

SEQ ID NO: 198833 - DNA, 563 bp, Zea Mays
gaacaataccggtatttcggaaacatcggaaaccaaatggggcctaagagttagtcttctctctggacaaccttcaattttcatgtgcacccttcagttctggccttcttttctgcggcagtttcttctgaagtgggcaatggcaggaatactctattttggacagatatatggttaaatggccaaagcctacaacagttggcacctcatcttgtcaggttggtatcttcaagggctaagaaaaggactgttcaggatgccctcactactggaagctgggtacaggacattagaggggctattactgttaatgtgttgtctgatttttttaaagtctgggacctcgctgccagctggattttgcacccggaacaggaggataagcatatatggttgctctctagctcaggaagtcggcttatgatggtttctttattggctcaacaacctttaggtcatggaggaggatttggaagagttgggctcctggaaaatgtaaattcttcatgtggcttgtggcgcacggccgatgctggaccgctgaccggctggcaaggaaaggc

SEQ ID NO: 198834 - DNA, 807 bp, Zea Mays
tacatatgagtcactgaacaacattgcaaggttcataaatggaatgtcagcactcctattgacactattacctggaaaaggcaacattttagaagggataaatggctgggaacttaagccagcactccgtgggccgcgtcttcctcgttggatggaaaggtagtctaattttcttcacaacacttccattaaggtagaaatttatggatatgatgtgtttgtagcattgagaaacatccaatacttaaaaccaagcagataaatagcgagtatttattccttaagcacaatttctttacatgcatttgaatccacatgacctgttgttgcatattctctacgagttacttcctcccattgagaactattgttggttgatgcagagctttggatagactctatatcaatattgagacatggtaaatgatgtggtccagtttgtttccaatgcatactaaattatttacgtgaaatattttagcctggtgaaatatcccatcgccctgtatatttatgtttccttttattattagtattattatttagtgctggataatctaactagtatatgctttgttttcttaggtaacatagttttactctgttctgacaacttcattccttcttttgaacatagtggggtatcttcgtttaatgagttcatccatgaactttctgttgattctgatgctgattcaattgctgactctgtcgctggggacgatgatcatgaagagtttgtctgccctccgtctccattgtcccaaagttcacggttatcacatgcaagcagctttggtagacatg

SEQ ID NO: 198835 - DNA, 550 bp, Zea Mays
tgcacacgcaaatatggcctacaaccaccatctacgtcaaaccgtggaacaacatggagaactactgaatccaagatgaggggtctgctaataggaggccattctgaaccacctccttgtcttgttatatagtgcaaatatctcaaatgtgaaggctgaggattcaagggaaaaaactgttgtataaagtcccttcgagcctgcttatagaccatttctagtgtcttctgctcaccagtgtatgttttgcgatacaaaagcagtccagccaacatgaatgcaagaactggccaaccccctctctcacaatgcatcaaaagcatattatgctgaccttccaccgatagccaattttcacatgatttcaagaaatggtggatcatctcaagctgaagcaatggacacccttcatactgttgtgggtagtccattactgtcatgtcatactcagataatatgtctgaaattcggcttcttttgtccccagaccaaaaattggataccataaatgatgcgtccggaaaaaattcctgcaactgcgcaacaatgc

SEQ ID NO: 198836 - DNA, 996 bp, Zea Mays
aagttacggttcgttgtccgattcttgacgtgtgagcgtttttgtgcgccacctccaccgccctttttccacaaattccttctccttcggcttcaccaccatggtcgtcacgcatgtgcgtaattgcctactttgaccgcgtctgcggtctgctaggaagatttctcttcttttctttcttcgcggagtaggggtacacgccattttttatgcgttctcattacgctgatacctcttagttctagttccgaggaaagtttagttgatgacttaatcatgttttatttgttactgctattatcgctaagcatcttgcactgttatggataattgattgattatacaagctagagcgcgtggctgctaaaaatcatattgcaaactgattgtgactatgggcgtggtagggaaacaaccccaggaatatcaacgtgccgtgtttggtttcggtacctacagctttcttgacttggttgccgagttactgctcttttggtactacataagaccaatctgtggtatccaaacaattggtgctgtttcagtctgctgtctctgttggtcaatgtctacttgtaataccgaactgcagtaaatgatagttttgtttgactgcaaaattgactagtttacctacgccttaggtggagggtaggagctatctccctgcagaggtcaggaacggcctcgagaccctgaagcggaggaggctcgagagagtgcgtttgagtgctcagaacgaagctggcgacaatcctgctgtggctgcgagaagtggcggtgatgccttgcggagccccgctaactgtggagtcagattgcattccaacaacagtacaggtttacctggaaatgtccatgacaagagtccttttgcaaagcgcaaggtggagaagtttgatatgtccaaccttgagtggatagacaagattccagagtgccctgtgtattgtcccaccaaggaggaatttgaggatcccattgcatatatacaga

SEQ ID NO: 198837 - DNA, 602 bp, Zea Mays
cgctcggtggcatgatctgagcaggaagctgaacccggcgcagatacgtgaggccctcagcacaggatgcaactttgtgtggcagccttatgtcagctccatggagcacactgggtgggttcacagcagtgatctagccgaggatgatgaactggcatcgctcgcacaatttttgcacccctgtgagctcgtagggatggattgcattgagcagtacctcccgcaccgtgttgccagacagtttggactggaccaagatgtgcctgcagatgttcaccgtgccaaccaggattgggcgattgcttggcagacctaccagctggaaggtaagaatgtggctttcttcatccctcactctgagcctgggatcacaacacggtatgcacagtggtggaggcagcaacttctgccttctggcattgatgctgctacagcaagtgctccagtagagtggaagacttccaagcgcaaggtgaaaaagacaccagcggccatggaagctgaagctgagaaggagcgtaagatgaagaaggcccgggtctctcctacttatactgataaaaagcgcaaacttgaagagttgtatgatgctaagttgtcgg

SEQ ID NO: 198838 - DNA, 242 bp, Zea Mays
tgactgctgaccaaaagaacaagtcgggatggagtagtaaaatatctgttatacaaaagcagaggaggaaaagaaaagataggcgtaggataagctggcaaggcacatagcatttcctcgatttgaggggatcaagatccatcaatggacgatctgaagataggcctgaaaactgacgacaacacctagtcctgaatgataagacctgaattattggaggggactttgcttgtgctttctcc

SEQ ID NO: 198839 - DNA, 365 bp, Zea Mays
ctttcaactagctggtgaaggcagtaacaaattctcatcaggtttgcgaccatttgcactaccaaaacttgatattgaggaccaattacaaggccatcttcgatttgataatttgatagatacagaagcatttttcagtgtacaagggcacgggaatagttggattgaggttctgtccactggaagcagtgttgttgattttagctctagcgcagctgaatcttgctcaatatctaaaactaataatgtctggtcagaggcaacatccactgaatctgtcgaaatgctattgaaatcggtgggagaaaatgagacaactggtgacatggataataatgcccaccttaagttaagtggtatggaca

SEQ ID NO: 198840 - DNA, 501 bp, Zea Mays
agctcagagcgtggtgtttctctccggatagcctgccggcggtaattgatctacatgttcaggaacctcttgttgttggggaggatggatccattgtccctcgcactttggtttatcccatttctgtgagggtgattactcctggtgattggccggcaggggacatgtctgaggcattgcctcctgttgtcgaagatgaagatgacagggatcagtttcagcagaggcggcgcattgttgggcatgatcttacagctcggctctcggtgcattcgaggcttgggccgcgaacctcttcttcgtcggctgctgaacctgtcgtggacgcattacccccggttgttttggctaatgagttggctgtgcctgggtctgttgcccctgttgatgcagaatttttcccatgtgcttcggttgaagagttgttggctcctgggcctgctggaccagttgatgctacaattctcccaaatggcttggatgggtctgctgtaccattta

SEQ ID NO: 198841 - DNA, 487 bp, Zea Mays
gtcgtcttgttctctcgttattgggtcctgacttcgacaacaatttcgtgactcttaattctgttggtgctagcggtggtgtactgctggcctggagatctaaattgggagctattattgactcccgggttgatgtcttcagtgtctctgtcaaattctgtccaacgattggtgatgagtggtggttgacctgtgtgtacgggccccagggtaatgataggaagctcatgttcatgcaagaactgcgccttattagagctaattgtgctggaccttggattgttggtggagacttcaacttgatttatagagatgaagacaaaaataatcctaatctcaactgattcatgatggggagattcaggagatgtattcaggatttaggaatcaaagacatcgatctacatggaaggaaattcacctggtcaggggcacatgatgtgttggtacgactagacagagtcttctgttccgttgagtgggagca

SEQ ID NO: 198842 - DNA, 454 bp, Zea Mays
aggtggaaaaggcactaagtctaagatgtcgttcgtcataccaacgcaaatgaggatcgacaagggcattgtggatggacatcaggacaggagacaagggcgatgaggacgtcgcaatgggaatcaaccggttcatgagctctcgaaagtcgtgatggccggtgtggccatagggtggtgattgacaggcggggtgacgagctcaacaccgacgagggaggtagttgtccgagccagcatgggcgacacgtgtagatgatggtctctgaggccgcgtatggcacgagagagggtggtgccatggctatgtgtggcgcaggagagcatggcatcatggccgcacaaagctagaagtcaggcaggaccaggggcataggcatcaagggtgccgacagagatgaacctgcaaagggtggggtcccaatggtgccaaagaacctgacttaaataaaaa

SEQ ID NO: 198843 - DNA, 926 bp, Zea Mays
caaaccccgtcttgcctcgtctcgtctgctccccatctccccgtctcgcctcgtcctctggatcccgccgccgccttcacccaccgccgacgtagggtctcacctcgtcctccttcagatccagtcgtcgcttcacccaccgccgacgcagcaccccgtctcgcctcgcctcgtctcgtccgctccctatttccgtgtctcacctaatccttctccagatctagctgtcgccttcacccaccaccgacgccgagcaagaagacacggagcccgaggccacgtccagctcgtccatcgatccggcacacgcgtgctcctcgaacgtcgctgcccctcctccgaagaacacgatgacccctccgccgacgctatgaagaagatgcagaggaagacgcccaccgccgagcctcgtccagatccagccgatgccctcacccaccggtaaatatgcatacatccatattacaaaagcaatttgtttgtgcgcatcgaaataggaaccgttttggtgaactttggaagcagacaagggtttggtcacatccgtagcatgaccagtttgtttcttggtcgtaggagggacataggatgttttgttgccttctactaccttctccctctaccattttatttctctccatatgatttggttcacgggaaccccaatggcgaggtgaatttggggatgtaagacagctcaagaacacaatcctttgggcaaacgtacaaaacttgacaccccgacagctatataaaagaccaagtctaccctaatcaatgtttaatcttgcatcactttattcataatccattgtgccatcagcacataaataatcgccccaatgatgactactcttcactgctacccttgttacaactatctgatagacgccttgcttgagaaagctggttatagtgtatacgca

SEQ ID NO: 198844 - DNA, 246 bp, Zea Mays
actcttttatcagcacttgttggtggcgttatgggtgccagagatcgccttggagaggtgtatatttactcttttatgtcctggtcctgtttttggatccaagttcttatcaactatgcatacatttcttctgatgtgcaagctagattattgttctgacattctctaatgtaatgcagattcggtcaattgaaatgcttcataaacgttttgagagctttccagaagcgtttgctaaaaaccttt

SEQ ID NO: 198845 - DNA, 285 bp, Zea Mays
cttggatggatgaatgtagtggtgagcattgtattgaggctgactgagcttcctctaggccttagggttagggttcgtgatggtcgcagctgataaaaattcgtatctagttgggtgtttatttgggattaagttggaagctagctcaatctgacgtgctgcttatgtaccttcgcttaagtacctgggtgatgtaagtttgatgcaatgccagatttaggtagtgggagtgttctgagcgttatgaatgaagcatgagccatttggttgtgtgccttgctgatg

SEQ ID NO: 198846 - DNA, 292 bp, Zea Mays
cctccttcttctccagcccggttcctcgccgccccgcccccaggccccaggcagcttgctgcgtgctagatcgatgcccccgtatcgttccgcttcgactctccgattacctgaccgctcccgctctatgtggtgtgctgtggtgtggcgtggtagggataggatgcgcagcccgcgcgcgcgccgttgctcccggttgctgcccgttcttcgttttcgttctctccaccagccgcggagcgactttcacttgattttcgctccaaatggccgatctcacgctcccctccgg

SEQ ID NO: 198847 - DNA, 970 bp, Zea Mays
tgtttctagtgctgcatgatgtggtttgacccgctattgcttattggtttctaacttaatggacctgatatcgtaggggtacttctggatgatcttcttgtggccgaggatcttgctgctgctgaaacaacaaatgctgctaatcatgcagcagcaaatgcagctgccacaaatttgcaagcaggacgaacacctgggaagtatgcgtataatgaacaaacaagacaaacaattacagaatcaggtcctgatggggctgtagttcttgggactccagttgcacctcctgtaaatggggacatgtatactgatatcagtcctgagaatgcggtgctgcaaggacagaggtacatgtattactttttatgaatgtattcctatgctgttctttgaacaagttaataatattttgccattttggtaacagctatgtcattctgatgaatttggaattcttcacaggagattaagcaaaggcgtggattacttggttgaagcatcagcagcagaggcggaggcaatcagtgctacattagctgctgtgaaggccaggcaggttaatggtgagatggagcagttgccagacaaggagcagtctccagactccacatcaactagcaaacattcaagcctcatcaaactggacagtgctctttctaacaacttggcagctccacctggggttcggttgcaccatagagccgtgagtagaatacatgttcgattttttattgcacctttatagctatttgtgacatgacattttaatgccgtatgtctacttttgtacttgttactggtgtcagaagttatttgcacaatgatatcatactttgtttttaccttttcaccttgcaggtcgtggtcgctgcggaaactggaggtgctctaggtggcatggtcaggcagctttcaattgaccagtttgaaaatgaagggagaagagtcagctatggcaccccagagaacg

SEQ ID NO: 198848 - DNA, 209 bp, Zea Mays
atagctaccgcaccagcaacgacacacaaaaaaagaaacaagaaaaattaaggaactaccttaaccctcccctgtcctaggaacgaatcaaatgcttatatgcttgcttaggcagcggttagtcacgctctcgctacgcgtcgcacgccaacagctatctagtctatctatctgcttggagttggaggcgtggcgtggcgtggcgtggc

SEQ ID NO: 198849 - DNA, 694 bp, Zea Mays
attcaagtatgcagatgtcttcaaggaaagattgggagtcagccttgaaaaggaagatgaaatggactgtcttgtggctggagcaaactttttgcttaaggttccaatttatttacgccatattccattgtgcatatatattgtatgtgatgtttatagtggatttttggagatgtattgacctaatacatattaataataagtgtgataattcatgaatcgaaattactaattggcggtaagtaaataacactctttttctgcacttggcaggctatacgtcatgaagcttttacacacatggatggccagaagcaatatgttcagattgatcagaatgacttgtttcccttccttcttgttaatgtcggatctggtgttagtataatcaaggtaactttgaggttagctttatagtttgttcttttgagtttcactggatcttgttgaccattctttttcaaaggttgatgggcatgggaaatttcagcgagtaagtgggacaaatgttggtggtggtacgtactggggattggggaggctaatgacgaagtgcaaaaggtgttatttttctgcccatgaacaacagatatttctgtatcaagtttgatttctcttaaactcaataattctttttcagttttgatgagttgctagagttgagccagcgtggagacaatagcaccatggacat

SEQ ID NO: 198850 - DNA, 240 bp, Zea Mays
gcataatgcattgttgccgccttccacgatgcctccctccctgcaagtgcaggctggagtgatagatgatcccgatgcacacttcacctcgcttttatcagctgcatggagcaacagtccatttgtgtggcgataccgatgctagctctttgctgttgctgtgcagacgaagctgacttcacatcgtcgcaacggtgtgttcgatctctagtagtcaagcctaactatagctagcgcttt

SEQ ID NO: 198851 - DNA, 235 bp, Zea Mays
cgacatccgagacgaggaagcagaaggctaacgaggccactgaggaagtctgtttagaggagggtgcttcagatgctaaggaggatgttgccgagaaagaagataacaatcttcagccaacaaagcccaactacatcgatatggtcagtctatcattaagcctagggacctggagctcttgaagaaacttagttacattgaagatcataatattatccgttttgctggtgacgag

SEQ ID NO: 198852 - DNA, 256 bp, Zea Mays
agaagaacctatatgctaaattaagcaaggatggcaaactgcaaccatttatggtcttgcttcttttaagtggtaatatcactcatgctcccacttggggatcaaaccctggttgcgggcggtgcactccctcacatttaccaccacaatgtgaatcaaaactgctacagagccatatgatgatgtgagctcaaaaacagattttgattgtactttctttgtatttttgtttacattccagtaaatttgtaccatg

SEQ ID NO: 198853 - DNA, 676 bp, Zea Mays
ctaccgccactcgcaaggtctgccacagcaccaccagtatcacgagcagcataagtctgtgtgttgagggtatctacctgataccactgatgtgtggcctcgtcgtacttccagccagggtagaggctctctagatatctgggatcagtgtactccacctgcgcatcagcgctccgatccccgtatccctcagcagtagctctggaatcgaactgggaagtggcattgctctccccatatcccacctctgtatgcatcggcttgggttcacactgtgcctccccctctttctgtggtgccactgcaggctgattgccagcctcagtctcaggctgagaagccgtctgcctgtgttcaagcccagtccctgcgtgtgaagtgttttgcaggtaagaaccaccaaacttctgctgaaggtcaccatcactcctatggtctgccacagcagcaccagtattctgagcagcatagctctgcgcgctgagagtatctacctgataccactgctgcgtagcgtcatcgtacttccagccagggtagaggctctctagatacctgggatccgtgtactccagctgcgatttggcgctctgatgcccagacccctccgcagctgtgctggaatccaactgggaactggcattgctctccgtgtggccagagacggtgcgatccg

SEQ ID NO: 198854 - DNA, 452 bp, Zea Mays
caagattcaagttcagctaatgttcaatccaaatcacaaactacagtgcagtctccttcgcgaatgcggcgcacagcattgttatcaccttctaaggttaaggtttcaaagaccagtgcttcaccaatggaactgtcttcaagtacaatcatgccacaacaatcatcttcgccggttcagcctcggcgagtgatgtctgactctgcagtaaaatttttatcagagataacagaatcagcatcaggtgagatgtcttgttcacaaactccagttgaacatgaaccttcctctctgatggaaaacaatccagcaccaacagcatctctgttacctttgtgcacacctcctcctcttcctccccctccacccactgtctctttactccctgttcccactaagttacccataaatactagcacaagtaccatcaacatttcccttagagcaaccgt

SEQ ID NO: 198855 - DNA, 781 bp, Zea Mays
gaattggtgtctcagttcataatattcgtgctactgggagttacatacgaggaacaaatggaacatcaaatggaattgtgcctatgttacgagtctttaatgatactgctcgttatgttgatcagggtggtgggaaaagaaagggtatgctttttttcattatttccacttttagtaacatcgtcttcagaaattcttatgagcttctaaaacttaggtgcatttgctgtatacttggagccttggcatgctgatattttcgagttccttgatctaagaaagaaccatgggaaggtaaaatctcgaccattagtatttaattatttccatgtatgaaaaacagagtatctttgtcttttgaactccaacaataatttggctttatatatgcttactgctatcctgattcctgcataaaattgatccttgtgcagagtgtcttccttatatatgtatgttcaagtcttagctttttattcaagctaatgtcttatagagacagttactcgtcatagtttttttattcaagctaatgtcttaaagatagttactctagttttttctgcatgatatctaaacttcttgatagcttagcctgcatgctgctatcatagaataagtatatcatcatttgcctgccatctgtgtctaacacagcatcgtctgctcaacttatgagtggttagcatcgaaaattctcaaagacctgctattctgaacaatattttaacaggaggaaaatcgtgcaagggatcttttctatgcgctatgggttcctgat

SEQ ID NO: 198856 - DNA, 634 bp, Zea Mays
gttataagcttatagcagtttttaatttgtttgcctgtttggaagtctaaaactgacctaaaaattgttgtgtaacagtcctatggtggggtgcatatggaggactggcatatgaactacaaagcctagcaaaaagggttataagcctctgttgtgcggcttctggttgtgagagaaattggtcagactttgcagcagtaagtaactaagtactgtattacaaagcctagcaaaaagggtttgcttgttgattgatcattatgtggctatgtgcaattgtgcattttcaggtccatacaaaaaagaggaaccgactagaacaccagaggcttaataaattggtctatgtcagttacaacagaaagatggaaaataggtttcgaacaataagagagctgggatccaagggaaaaagaagcaacccactggtgcttgaagagtttatgtgggaaaatgaatgggttgaagaaaataatgaagctgatggtgatagcagcatatggcatgctgtggatgaggcattaggggcaactcatgctctccaaggcagaaatttgccaagattagctgctgcaggtgctgcttcaagttctcggcctcaacgaacctatgttaggacaaggaagcgttcaag

SEQ ID NO: 198857 - DNA, 466 bp, Zea Mays
ctcggagtcagtcatcttcccaggatcttcgtcgctgccggacatggatgtcgctgcagctttggaatctgataccaaattgttgtgaacccggctgcgatgcgcagggcggggaggagtgcaccacgaagggtgggatattaaggtggattgagtagaagaacgcagggaatagggtatcctatgtggcggctgggagctaagatcaccagatggcgtaggttctgccagggtgatcaagcagccgcacccacaggcacaacttctttgataatctcctagtacaatctaaggccacctttatagcttaggtgcctaaccatattacagattttctagggaataagataactctcccgggaggataagcctccttaattattgcctaactttacttcttaacaaactaaatctggcgcctagcataatgccttccaacaaaagaatctacaacatcctcaggcaa

SEQ ID NO: 198858 - DNA, 371 bp, Zea Mays
ttcgcttcctacccacgccacgcgtgtgttcttggcagccacccaatccccgcctcgcgaaatcagacgccaaatccccttatcttatcatcaaatcgatcgccaacgggcatgatctgatggctccctcatcatagcctctgctgctgcaccgcagcaaaatggccctggtttagtttagtcctcaagatcccgcctttctggtgctctgtttggctagtgtcgtgccgccgcgcgaggacccggagattcgattccggtccggtgtatctctaggctgcttggtttgggttaggatttagtgggcagggttgtgcagctggtgtctcgtggaggaagaatttcgtgggaggattttgaccgggtttggg

SEQ ID NO: 198859 - DNA, 504 bp, Zea Mays
gtttggaaaacctgggccccgccaaagtgtcgttttttcatttggcttgctgcccataataaatgttggacagcagatcgtttagctaagaaaggcctaaaccaccatgagaaatgtctgctttgtgaccaagctgaagaaacccttgatcatcttctggtggcttgctccttctcgagagtcttttggtaccagcttttccggaaatttggccttcactcccttgctccccagccggcggtcacctccttcttgaattggtgggaggaggtttcagaggtggtctcaggtgtcaccagaaaaggccttaactccctcattattctgggtgcttggactatttggattcatcgaaacaaatgtgtctttgatggaatgtctccttgcctcacctatatcctagcttgggcagacgaggggagaagtcgatgggaggcagctggggcgaaggccctatgttctctggctgcttctgcagctgctccctagagtggtgtgttgtta

SEQ ID NO: 198860 - DNA, 270 bp, Zea Mays
gttataggcagcttgttccatgatgtattatgtttatgtggtgccattttacttccatgctatgttactgtgcaaataaataggaaataaaaatgatgaattacattttagtctaatctatgtactgctttatttcgcaactccaggtctccacgttatgttgctgctgatatcaatccatttgccccacagatcattcagaacctgtccacagcactaggtttccctgattcacaagagaacccctacctgatgaagtgcctgatgcgg

SEQ ID NO: 198861 - DNA, 260 bp, Zea Mays
gcttcgttaggatcctttcatgtgggtgttgttaaaaccttggtagaacataaacttctgccaaggatagtttcaggatcaagtgtaggctcaataatgtgttctatagtagcaacaagatcatggcctgagctggagagcttttttgaagagtggcattccctgaaattttttgaccagatgggtggaatctttcctgtggttaaaagaattttgacgcatggcgctcttcatgatataaggcacttgcaggtgctttt

SEQ ID NO: 198862 - DNA, 237 bp, Zea Mays
cctactgcaacaagtgctcctccacccgctcctgcacaacctgcggaggctccggcagaatcgtcaccgcaccacctgtcacctagctagcactcaaggctatctatggaatttgcagctatatgtgtagcactgcatgtacctctcagagagtctgataaaaagggtcactcagattttttttcccttgtaaagaggattaccaagaatttgtataccatgtcatttggcagttgc

SEQ ID NO: 198863 - DNA, 458 bp, Zea Mays
cagatgcggtggggatgctgagaccacggcatcacgtgcaggagctcatgtattatgttgctcaagctaatcatgtgtactactaccatctgccaaccagagtacactgcctcagctaagcaacactgctaattaaggactatcacgtgaaagcgctctgctcgtaactcgaattactagattggttggcccctgtccctgttcctgtctaatttcatttagtgtcctgtccttgtgatcattcatggtcgcagcagactctgcgccagctgccttgtttccttgacacgagagtctgtctctgacctgttctctctgtcttctgcatttatattacaatgctggactgctcgttgttggtcaggccggtccgccggtgcgcgcgtgatgataaatgcccaaatttttcaaggagaggcagagctagtgcttttccaaatgcatcagctccttttttt

SEQ ID NO: 198864 - DNA, 527 bp, Zea Mays
aactggaagtggaccggcgcgtgttgggactcgggctagctagcccagtcaacgtcggtgtagaccacgagctccgacgttggggatggttggagtaggaggccgtagtcgagggagccgcagaggtagcttaggatccgcttgagagcggtgagatacctaggcgatgaaactgggtggatacctaggcgaagaagtgtgtgagggtggtgaacgtgtcagacttcaaccgaagaggaaaagtccaaagaaaatgagaaaaatcatccaaaatcaccatatagtatttataaccagagagactgtgtataggtgaggtttagagttcacaatgaatcagatcaaaagcctgctcagccctagaagtagtaaatgggaggcgagtatgtcggcctgtctgacaagcatgacagagaccctcaaaatgtcctctactacatgaaagatctaaactactagtaagcttggtcatgacgtcgggtcctggatgatcgagacgatgatgccgagtggtggaggaggcggcg

SEQ ID NO: 198865 - DNA, 543 bp, Zea Mays
gtcgatggggtcgcttgtgccgcgggaggggtcgatgggaccgcgcgtggcgtagacgacagcatggttaaaggtagagacagcaaggccgcgcgtggcgcaggcgatggggtcgtgtgtggcacaggcaaacacgacgcgatcgcgtggggcacaggcagcttagtcgtatgcgacgtgaaagaggccagtggaagaggaacatcgacacaagcgtcatcgaagagggaatcaaggtcagaagatggggaggagtcagtaaggggaaaatcatcctcatcaaagacaacatgacgagagatgacgatgccgcgggtgggaagatcgaggcaccgataccccttgtgatcagggagtacccgaggaaaagacaacaaaaagatcgagggcaaatttgtgaggagcggtggcggaggtattgggatagcaggcacacctgaagacccaaaggtgctcataggaggggtggcgtcgaagagggagaataacggagtgggatgggatgccgccttggagggaaaatggttgaggaagtaggtggcc

SEQ ID NO: 198866 - DNA, 233 bp, Zea Mays
gagttgcatgtcacagatgcaaatgatgataatatagtacataccaaatatctaaccagacttcaacatatagggctcacatcttgcaatattactcaatttccaagatttctaaggcatgttaaatatataacatatttggatctttcatgtaataaaatcagtggcaatgtaccaaattggttgtgggacaaaatatgtagcattggaccatattcttatctaaatctttc

SEQ ID NO: 198867 - DNA, 367 bp, Zea Mays
ctcttttgcagttttacagggccgaatgggtatccttcgttcagagtcgtccgatcgacaaccgagggttccgattagatcaagcccacacccgaatcggtatgcgatgctatgcgttggattgggaatcaacgacgctgatttaattaaatgaaacgatgtatttccccctctgatcctaggcgcaagctgacacatcaacgactagggttttacaatgcccagatccgatccctaccctcggatctctaatcgacggtcaggattccattactgcaaaggggtatgccattctaatcttggccttcaaacgcagatctaacgggcacgataaccctcagcctttcctcgacgcggtggcacggcg

SEQ ID NO: 198868 - DNA, 845 bp, Zea Mays
cgagcttcttgggatgaagagtccaactgcatttatcaagcgaaaaactgaacgaacaaaagcatccatcctccaaggaaaagaagcagggccctgcatcaatttcattatccatgtatttcaccgggagcatagtgatggataagttaggagcacgatcattgtcagtagtagtgacactgatgcaataagcattgatggatccatttccctctgacaagccaaggaataaagagccatgtggggtggcgcgaccaacgaatggtagccccttggtgtcaattttgtgccactcgactgaattggtgtcaaatgcatatgtgccccaaagttgattgaatgataccagtatgtaggtgtcgaccaccacataagacgtgataagtacaactggcagcatggtataaacaaatggggtaatcttccaagggaagcaaggtggatgtggtagctcaatccaggagcatccctccaggtgggagcggtcgtcaacaatgacaactttggctttggaaagatcgagtacctcgaaccagggtgggaaatcggggtctgtgaaccagcagagagtcttgcacagagcataaaccttgtcccccattgttgttaggacagggcaccactttgtagaattgagagtcggcccgtgaatgaccttcttcgtcttggtgtcgaagatgacggtgtcacccggatcacccccgaccctaatgatccacgcgcggtgcactgaccgtagggacgtgaaggtcataccgccagcaacggtggtcagacgggtaactcggtgcaggctcttccgcttcacccgcgaaggaaaggaagtggcgacgcccatcttgtac

SEQ ID NO: 198869 - DNA, 445 bp, Zea Mays
gtcgttttcatgagtggcattttaccagagggcactgatgttggttactatgttggtggaaaggtcattttcttattttctcaaattgctattttcagccagtacaaatgtttttttattgacacttaagtaaatctctagaggttactggatggatatataaaggaacttgggatctactgtcattgctgcagcacagtggtaagttggtagtccctttcaatggaatgtgacacaactcaactgttaagcctgcctagtctaattcagtccgtttaaaatgaataggttagtccttcacagtttgaaggtcatgctggtcgagctgctcgacgcaaaccgtgagtttattctagcttcttttttttgtaaagagtacaattcaagctctaataccttctacaaacactattgtagttaccacaacatatatatgtcaaacggc

SEQ ID NO: 198870 - DNA, 315 bp, Zea Mays
atgtgatggagggcttcctaaaggagcaaagaactgctgaatcaattggaatgcatgacatgtggcttagcaaaagcaaagaacttgatgtttttacttaccgatctgtgttgccttcattaccatggctggacacagatcgagccaagaacttggtagaatctatgctgaccgtgaaacttactgaattctcatatcgcggttgcattgtgaatgaattaatgcaaacaaggaatataaaatgggccattccagtcttgcaagaatcagctcctgggaagctcagtgccactttgttaaattccttacttcaag

SEQ ID NO: 198871 - DNA, 349 bp, Zea Mays
cacgccgtgtcagttcttcaaaaaagcttctcctagacccctagcccactctctccctcttcatgcagtcgtgttgcagtgcatcatcagcctttgttcagtcatgaccacgagacgagagacagcaccacacgcagacgcagaggcaggtcctttcacatgcccacgacgcacagcctttaccaccgctgctctgctcccctcaaagccaaggccagtagaaaccagcccagcttgctctctctgctcttccccctcacacttctccctcgctcatcactcatagtcacacagtcacactacagagcccagagccctagtgtcctcccctcccctccccatggcccct

SEQ ID NO: 198872 - DNA, 1295 bp, Zea Mays
ctgtaagtaaggaagtcaaaactgacttggtaggatgccatgcacggcaggaagaattgcaatgcacgctccaagatctatcagaaatagcctgcagtattgatttagtacgtaataaatcttctccacaagaagagaagaagtctgtttcccctttgaatgacatgggccataatgtggataacaatagttgtaatggtgataccaattataaagggcaggagctcaatatggggaatgttggagatgaggatcatgctgtagcactttgggtgaaggtacatttttctttatttaaattcgttttggggttatatgagcaagtacttgtcatgtttcaggttccagaatctgtgcatttagttttagtaggtacaccatgtattattggggtggccaactcatagctctgttatgattttctaattgtagtcttagttgtagctttattccagttaaacaatggtatgcttgaatggtccatgtaaagtctcgttttctttattagtcctaaaaaaggtaacttgagatcgaaggttgaagccttaactaaaatggttagacgaggcttcttttcatatatgatcttagaatgaatactgtcccatgtcctattaaacatttttgtttcatgactcggatagaattttgtaatgtaaggattgtccccctaaaagtggtacccttgctttcttctgtttattcagctaaatattgtgtatttatataaagaagaaggggtatcttgggaccaaaataactagtttctgtacactgagctttaggtactgcaataatatgttctctttttgtgcataatgaagataatatatttgatacattggtgattctagtataatttactattgcaaaaatggaaaaggtgaaattttgttcactgagctacagctacccacaagattgctagtattcctaatatagttctgctacgttttttttgtggcagagaagtttttgttttttctaatgcctcctctgtgaatgtgttttatccttttcatgtgaaaacagtggagaggaaaatggcaaactggaatccgatgctgtagagcagattgtcctttacctactctaagggcaaaaccaacacatgacaggaagacctatatagttgttttcttcccacgaacaaaaacttactcttgggtagacatgctacttgttcttccaatagaggaatgtcctttgccacttgtgaatggaactcatcgtaaatggagaaagctggtaaaggatttgaacattcctcgacgattcaacatacagaatcttgc

SEQ ID NO: 198873 - DNA, 422 bp, Zea Mays
aagaagttgagcgtgtaaccagagagtctaatttctatgatgcggagaagacaaagaactttttgatggaagcaaagctacctgatgcccgcccactgattaatgtttgtgaccgctttggatttgttccagatctgactcactatctatatacaaacaatatgcttcggtatattgagggctatgtacaaaaagtatgtacatccttgaagtcactgttattttgggcgtcattcttcatctggtatttcaagcatttgtttgattgtttccttttgtcttgtatgtaggtcaatcctggtaatgctcccttggtagttgggcaacttctggatgatgaatgcccggaagatttcatcaagggtttgattctctctgttcgttctctgcttcctgttgagccactagttgatgaatgcgag

SEQ ID NO: 198874 - DNA, 724 bp, Zea Mays
gaccagactaacagtacatacatctgaggtagaggttcaccgcgtggttgaggaagccgctgccccggacgccggtgagcaggctcgttatgggcacgaacgacatggagatgacgtccgggaagccggtgatggtggagagccacttgccgtggccctggccgctgtcgacgccgcctctcctgacgtgaatgcacaccatgtcctgcgaggatcccaccacgttctaagggcgttcgttattcacattttcttggtgacgagcagtgcagtagaatgcaaaaccgcaacagtacgtgcttgcttacatccttgtgagacacgacgggtgatctgaaggactgccaggcggccgatccgggcccaacgtttagcccctgcgacaacctgccgcctcccgcggtggaagaattggaacttgctgtggaatcctccgagaacctgtcgtcggcgagctccttgagccgggcctgcacgtcgctctgcgtgaggctggagcccttgagctgcttcacgcacaccacgtccttgcctcccatcttcaccccgacgatgacgtgagtcccgtacttgtcgatgaacctgcagggagggagctagcagcagcagcaccatcatgagctttcgagacccatcaccagtcaccgctgctgctgggacggtggactcgacagtacgtactcggcgagcgcggcggggtcccagacgggcgggaggtcccgcc

SEQ ID NO: 198875 - DNA, 524 bp, Zea Mays
gtttgagggcattgcggagattacagagatgacacacacaaagggagaaaggatgcacaagagtgaggatgatgttctgagcaaggagaagaaatcgaggcgcgctgggagttcacgtagaaaaggagaggctttaccagaggctgcaaatgatgatgctatagatgaagacagcaatggaggggcaggaaatgatacgttgagtcagggggaaaagtcaaagcgtgtgaagagttcatcgaagaagaaaacagacatttacaaacatttatatggactcaaaactgattctgttgctgacagcagaacactggacaagaagggagtagatgatgttttgagcgagagaaaatctgggcgcacactgcgatccacgagcaagaaggaagatgcattagagggtttgaaaaggctggcaaagcatggaattgaggaattagcaggaaaaagcaaagatgcccccgttcttaaagaaaacaatcagaggcatggtgcaggctctgcacacaagggtagaatcacag

SEQ ID NO: 198876 - DNA, 997 bp, Zea Mays
caacgtcgattcgttagttcagcaccaaccattatatagttcaccacacaaaggttagtcttatcgaatgctcacacaacatacacacgtacgatggtctacctagcgattaccttcccaaactttcttttttctttttactgaaaacaacaacaaaaacagaataggtcaacattcagtacttatatatatagagataagaaaggcctcctcctccatcttcagcttacttctgcttcggcagtccagcttgatttctttccatgtcctgtcatcttcttccaagctagctaggtcagcagcttactgcacaaaaacagactctctacatcatgccaaacaaaagagtagattcagatgtttgagctactactacaagtgctgagtgctgacatcaccactattattttctttttcagcctctgaccatgctactgggctgggtgctgaaaaccaagttgagaaacaggacaatgtcagcgctcaacaaactaaccacagttcgagtaatggcaacttggaaaatggttcacactctaatggtgtgcatgagatctccagcagcagtgaaaccgtgacgaccattgcggacggactcaaactgatcacaaccatccgcgagggcaggcagcacatcttgccaagttggagtggctctcttgaccacgtttctggtggcagcacgagcacatctcaggttcatgaaattgaagttgagaaggaagtcagtaagggcgacgtcaaagttgaagagtatgatcttgagaagattctggacgagcaagaaacccatgacctctattgccccaactgcaaatcgtgcataactcgaagggtcatccttaaaaagagaaagagaacagtaaggcaagaaacaggcaaggaaccaccaaaaagaccacagcttgtagagcctcccgccaatgctccaagccaaacaatcaatcaagactcgccggaagtatttagatgcttgtcgtgcttcactttcttcatc

SEQ ID NO: 198877 - DNA, 249 bp, Zea Mays
cctgtctacatcttcaaagaaccaattgggccagacagaatgagacgtctagcatcccgaggaggagacacactgcccagttttggaaatggcgcaggcttgccatggaaggcaactaatgaccaagttaagagtatggctgaagagagcttttcactcaacaatgggatagggggaagcttgcatcttctttaccatcctagtcttctcactgggcggttttgtccagacgcctcaccttctggttca

SEQ ID NO: 198878 - DNA, 347 bp, Zea Mays
ctctcctctcgctcgtgcagaggaggagacagactccccccgtcgccgccctcgcgcctcctccgcccgcagctcaagccgagcgtcaccccgtcggctaccttccattctcgccgcacttctcccactgggcacctcgcgccctcgtgacggtataaatagcccctagtcactcctcggcgctcctcaaacccaccaaaccctagcccacttagcggcggcggcgctagaggtggaacgagaccttggcggaggtagcgagggtagcgctgctcgctcgctcgttgggtttccatcccctactgcctagagcgagctctacgcgacgatgagcagccttgtcgagc

SEQ ID NO: 198879 - DNA, 1378 bp, Zea Mays
aaaaatccggcttgccctctatgtgcagaaggctgccatgaccttcattgatggtatgcatgtattacataccatacctgctgctgcttgtcttgcagtgtattctgctgctaactcccatgcatctaactctgtcctgatggcggtgttaaaggtgccaagcacaaagactaccggatcacagaggatatcagaaacgctgggttctccataaacccagacgagctggcatcgatcacaagcaagcacgacgcgaaagccttaaagatgcacggcggggtggacggggtgtcgaagaagatccggtcggcgttggaccatggcatatctgccagcgacctagacacgaggcaaagcatctacggcgtcaaccggtacgcggagaagccttcgagaacgttctggatgtttgtgtgggacgcgttgcaggacatgactctgatcatcctgatggtgtgcgctctgctgtctgctgccgtcggtctggcgtctgaaggctggcccaggggcatgtacgatggcctggggatcatgctcagcatcctgctggttgtcatggtcactgctgtcagtgactacaggcagtcgctccagttcaaggagcttgacaatgagaagaagaagatattcatccatgtgaccagagacggatcccggcagaaggtctctatctatgacttggcggtcggtgacatcgtgcatctgtccatcggagaccaggtgcctgccgacgggctgtacgtgcatggatactcccttttgatcgacgagtccagcttgtcaggcgagagcgagccggtctatgtttctcaggacaagccattcatcttggcggggactaaggttcaggatgggtcagctaagatgatggtgaccgccgtcggcatgcgcaccgagtggggaaggttgatgagcacgctgagcgagggaggagaggacgagacgccgctgcaggtcaagctgaacggagttgcaaccatcattggcaagatcggcctgttgtttgccacattgacatttgttgtcctgatggttaggttcctcattgagaaaggtttgacggttggtctgtccaaatggtactctactgatgcgctgactatagtgaactacttcgcgactgctgtcactattatcgtcgtcgctgttcctgaagggctgcctcttgctgttactctgagccttgcatttgcgatgaagaagctaatgaatgataaggcacttgtccggcacctttcagcgtgtgagactatgggatctgccggaaccatctgcacggataaaacgggaactttgactactaaccatatggtggtcgacaagatatgggcatccgaggtctcaaaatcggttaccgatagcagtagtttggaagatc

SEQ ID NO: 198880 - DNA, 521 bp, Zea Mays
attcacatgagagggtattagagtacaactagtggatgaagacattgttgggctagctactgaccttttgtgataccaggtttcctataatcctctctattcaaggcatacctaggtggtgtttatgtccactcaagtaaaacaccgcacatcattatgccacatcgtttctcaaaataaaataaaataaagaccatgggaaatttagaaaaattgcgtgagagatctgtccaaacataggttatagttgtatgtcaccttttttccaccatacagttgtgaaaaggttgtaatacaaagaatacaaaacaatagatcaccttttaaacctcaaatgacgtttctatgatattgaggacattgtattcagacgagtgggtattcgagaacaactagtggatgaagacgttattgggctagctaatgaccttttgtgatactaggtttcctataatcccctgtattaaaggcatacctagatggtgtttgtgtccactcaagtaaaacatcgcacatcatta

SEQ ID NO: 198881 - DNA, 290 bp, Zea Mays
cgatcaaccactgtcaatattactgattttccatggacctttggcagaccattgcaatgccctcaatgaagtccattgcaatatctgcccatacttgtcgtggtacttctaaaggctgaagcaggcctgctggttgaagagcctcggttttattcttttggcagatgacacaggagcgcacccaatcctttactagtgccctgtctttgtgcatgaagaagtctgatctgagcctatgtagtgtcttttgtactccaccgtgtcctgcagaatgtgcggcctctagtatt

SEQ ID NO: 198882 - DNA, 393 bp, Zea Mays
aattagtgactgctggaggtatgttttggatggacaaatgcacttgcctgatgtacaggagggtgctggaattgggacatgcatccgtgatgctcttctctatggttgtgctgaatttggcacagtaagtgggaaaatcagacattcttccattgttatattatgttaacatttagtaatttatagaacaatgaattatcatattctacatactctttggatagaacattaggtcatcaacacctcttccttttgagtatactttagctgtaataatgtatttaaaggataaatcatcgtgatatcctctccagtaatctttttcttgacttatgtcaggtacctgacaaaatggaaatggattgtgataaaacagtggatgcgaacactgct

SEQ ID NO: 198883 - DNA, 204 bp, Zea Mays
aacatactctttctcggtttgcagaacaagtatagatttctgaagtctgccgatctcttcttgtgcctcctcggcgctcatgcgtggatgggagggtggcttgttccatcctgaccctgacggaccttgtctctttgcgttgagaatctcttggaccaaggacttgtgtgtcttgattggtgtgattgctttggggaaatcatg

SEQ ID NO: 198884 - DNA, 374 bp, Zea Mays
ggcgaccgtgatggtcagcttgtcgcgatgttgggggtacaaatactgttgctggcatgctgtcttcggcgatgaagttgtgtgtggacctggagtcgagcaaggcgtagaggacaacgttgcccatggtgatgcgaaccttcatggtggtcgaggagcgaacgctggctatggcacgaagggagatgagcggtgcttcttcttgtggatcgggctccatgcagttgtcctcatcttcggcgtcatctaggtctagtaagaacaatcgggggcaaactttattgtgcctgcgactgaacttatgttgcagttgtagcagaggcctagccgatgtcattcttccatctctgcttgagacagcttcttgattggac

SEQ ID NO: 198885 - DNA, 317 bp, Zea Mays
gttgtcttcgatgatgctcatcctttttattctcattcttctttcgatgcttcatcaacatccttgactaatcccctttctttttgttcttcccagatgttcgtgcttctactatacctgcctcacgattagaacagtccttgatggagtccttatcttcttcaattgtgccttcttcagtggtacctcccttcccttggtgtcttctttagagtctccttccttggtttctgactagactaggaagcctccggtgacacatgtctactctcaacgggtcgtaaattcttctggtatgccgtcttcctctgctgagc

SEQ ID NO: 198886 - DNA, 644 bp, Zea Mays
gttggagagtcgaccacggtccgcaatggctagacgcggaagttccccgacgacagcgaattcccggccacccaagctcccaccggacgcggaaacaccgtgtgtgaaatccaccaacgccactgaagctatcgacgccgccaccgagactcgaaccgcaggaatttctccacccggctacacactcactggacccgacattaatggttattcctagcggcggcgttttcttcttcttgtggcggtggaaggaagaggaggctagggttcggtgtcccgctttatggcctccagggaggtcggtttggggcgccagccgaggactgcgcgcgagggggctgtggatccgctcggcgcggcgcattccgcgcgacgacgaaggtcgggaggtgggaaacggtccaccggcagtgactgaggggagcgcgtgctcgaggtggctgaatcgtggctagcttcccacggattcctcgcagcttgttgtgatctggattgccgcgtcggacgttgacgaaggaaggggaaagaaactgtgcagtggagcccgctcaccagcgacagggttgacgcgcgcgaccacagctactgcacggttgggcccacttgtcagcggcgcaacagagagagaggggcgcggatggttc

SEQ ID NO: 198887 - DNA, 471 bp, Zea Mays
gcgcactggttttctgccgtgcggggcccactccccagcctcccggttcgtatgcgcagggtgaacaatacttgcgtgtgggcccggaacggggcttgcttcttctaccttgttgccgcatcgatcggaaggtggggtgacacccgcggcatgcgcggacccgctgaacgactcggctcgcgtctataaaggataggaaggctcctaggctgcgcagaaccttctttcccctcaccggaatctcctccaccgagctcgctctgccgcggtgtgggtcgtggtgccgccatcggctaatcgggatcacaccgaagtctggggcgcttgatggccgactggccgtctctccggtgaagatctccactgtacagtgagtggacgctatccgtggtgtcggggaaaccaattccttcccaatttggcgatgtgacgctcggggagggatttcccgtgcgcgcgtggaatccgagc

SEQ ID NO: 198888 - DNA, 299 bp, Zea Mays
aggtgcgtcacaggagtgtaagccccgttctgttagtccaatagtggaccaagtgaataactgtgagacaaagttggccatttaacccagagccggctcccttttaattgggctccacacgtgtctcagccccccaccgaagcagggagagccagctcgtgggccgtacacgtgtccgtgggcgcatcgctgcgcattaaggcccggggactttccagggctttgaaagcccgctcacttcatcctgtgacgcggccaagaatgccaccacgctccttatatacacggtctcatgtacc

SEQ ID NO: 198889 - DNA, 496 bp, Zea Mays
tccgatctgcgcttccccatgtcgatcgatctcgatctctctaggctctagagctatagctctctcggcccccactttttacctttgcaagcattttccctgcatgcgaaacaagcgatagtttactatttgggcggccatgctgctgctgcttcggctaccttgcctccgtcatctttgacgggacatggaaagaaagaaagaatagagagagagacagagagagagagagagcaaacaccgagaaaaagacagcaaagctagttgtagcctgggcgcagaacacagcaccagatgctggctagctcgtgacaaagtaaaaaaagagaggaacgaacacagtagtaccaagagatcagggacgagacctttctactttgaactggattatatattggattctttatcagtaacttactgctgctagtatacccctaccctagtctcggggcgacgtgcctgcgtgcatgcccgacgcgtacgaaacacatcgacg

SEQ ID NO: 198890 - DNA, 446 bp, Zea Mays
cttgcaagaagcatgggagcatatattgacatgtgtttctcgttttgaaaatctacatcttgttggagagggagcacctccagatgccactttctttgcgctgcagcagccggaccttgataaatcaaaacaggctaagtcatcgattcttcctgttctgaaaaagaaggctcctaatgctacttcagcttctaaaagaggctcttatgatagcgctggtgtcggtggcaaagcttctggtgtggatcaaatgaataatgaggtgacaagcctcttggagcaagttgggatggctgaaatgaaccgtgtatttgtaagaagtcaaaaactcaacagcgagggtataattgattttgtgaaggctctctgtaaggtttcaatggaggaattacgttcggcttctgatccacgagtttttagtctgacaaagatagtcgagatagcgt

SEQ ID NO: 198891 - DNA, 254 bp, Zea Mays
caccaggatagccacccattgatgggtaagcactttgattatatgttggatatccagatggtgggtaaccactatgtgaagagtacataggtgaaggatatggatatgatcctaatgggggtggagccatagatccatgttgtgcatacggatatggatatgcaactggaggcgcaaatacatatgatccagttgaatgtactggaggatagacagtcggaggataacatcctttgtcagcatgatgattgtcc

SEQ ID NO: 198892 - DNA, 419 bp, Zea Mays
ttggtcactgctgccgggggcgggggcgaggggtcggatagggactcttcggggtccatagaggagattacggctgacgacttcaagaaggactcgtcgtcggcgttgggcggcgcggcggcggcggcggggccgagatctaggtcttgggtggccccgcccgccgtgggttacatggcccggaactttcgctatgccttcaatagctttgcgtggtcgcaggccgtgcggaataagccgctggggctacaaccgcctgccccagacgacgacgaggtggagcacgccgtggacgtctccgacggagagaaggaagagggcgagattgaggagggggaggctgtggaggccttggcctcgcctgctcctgcgcagcctgagaccatcgatttggactccgacgccccggagaagtcaga

SEQ ID NO: 198893 - DNA, 336 bp, Zea Mays
cgcacatatcgatctcgtcgtcgtctcccccggtggcatgctccgctcccgctagatccgatctattatctatggatccccgccgtctccccatccttctctccctcctgcttgccttcttctccgccgttgtcgcctctgacgagatccacggatgcggcggcgtcgtcgaggtcgacgttcctcatgttgctctatctccgtgtacagtgtgtttcgctttggttaggtgtgacttgttacactgatgcgacttggggttttgggtggtttcaggcgagctctggcttggccaagtcgaggaaggcatcggattccaagctcgattactccgac

SEQ ID NO: 198894 - DNA, 391 bp, Zea Mays
gttagtgctccctactgccgcgattgtctccatgacgatcgaggtcctatcgtctccccacccatgattgtcatcagcatgctcgccagtcctggcttcagcctccttccggtggctctataggggtgcctcccttgactctcttctcatactccatgtcttcgccacccctcctactcccgtcgattgggttgtcgactctggtgccttgttccacaccactcctggcccctcgagttgtctctttacaccatccccatagccccacctttccttcctccatcattgtcggtaatgggtcgactcatgtctgtcacctcagcaggtgacatagtcctttctggtcctttatacctcaacaacatccttgttgcccccaacatcatctaga

SEQ ID NO: 198895 - DNA, 363 bp, Zea Mays
ttgaaggtcgatagtgtcctgaaccacttgttcttctggaacacggagacactttctcaactgagacacgtggaagatatcgtgcactcccgacatgtcctcgggaaggtgtaacttgtaggctactgctcccacccttttaaggatcaggtagggaccaatgtaccttggggccaactttccacggacctggaatctgcgcgtgccacggatcggggaaactttaagatacacaaagtccccgacactgaaagcgagggcacgcctccttttatctacatagcttttctggcgggattgagctgctttcaagttttctcgaatttctgccactttgtcctctgctgtcgtgataaagtctgg

SEQ ID NO: 198896 - DNA, 2609 bp, Zea Mays
accacttattttaccaattgcttactttcttgctatctttccattaccctgttggctcagggattgcatctcaagaatatggggagaaagaagaaccccattgtctttctggatgtatccgtaggtgacgagccagatgaaagaatgatctttgaggtatttttgttattattgtttctcaaattcgtattcatatggtagtgcaaacgtgactaagactgcaacgttaaagattaggagctgtagctgtctctttttatattgaaggctaatgatggtattagtttgatctgtttaaaagcatgagttacctttccttgcagttgtttgctgatgttgcaccccttacaactgagaacttcagagctttatgcacaggtaatcctctctccacttccttttcattaaattagtaaaaatcatctgttatctaatgttacatattattgtgtaatttggtttatgtgacaagttgaacatgttgttttagctttctaatggttgtggtgtcacataatgtgtccatcaaaatactgaagtttttgttgtgatctgttcaaactattaaatatttcaagtagcattactttcaagtggtattatatgatgtaaaattcagtaaattcacaaagccacacttttctgaaattataaaaagatgacaattccaagaacttgctttgagcaacaacacttcttattgtttacagttttagatcgaaactcttttagtgcttgatggttactgagtagtcaagcactcaagcccactgggcaatcagaccatgcttacgaagttacgatggccacttaatgacatggtgctaggaaccatgtgcggatcatgtcatgttgtttatgagggaatgtgatgttatcaccaaattgctaggattatgctacaatcacccctgtttatctagatatgggtcttaaccagggagggttggacttagatctgctgatgccccatccaaacagtaataatgaaaactgtttcactgaaagagtttctgttgtgaataatgttccagtgctaaggattgtaatcctttttaattttagggaactacaaatctagtttcatgttcaaatgtagctttcttttaattaccttgggatgttcctgaaatttcactattttattgaaatagcatcacatattttttttgctgtgtttaatttcgctccagtggttctagttgaggcaatattttccctatatttatgtacaaatgttgtacttcctatcctcactaacacaagcccattaggacattagcacagtgtccaatacttcagtttgactagcaatatcaagaaaaagtggatagattaaattaaacggatttgtattttgaaaataattatcccaatgaatctacttgtggcgatcttctgttgcaaatctatgtgaattttagatattgatgtctggagctgaaaagaatttgacctaagacaaatctaaatggacatgtacttgtggtcaatggaagtactgcatagcttctctttgcaacatggaataataccacaaatgtattttattctgatgaatctactaattgcaatcttctattgcaaatctatgtcaatttagatattgatgtctggagctaaacagaatttgatctaggacaaacctaaatggacttgtatttgtgtatcactggaagtaatgtgtagctactctctgcaaccttgaagaatacctcaataatgtattttattactgctcttactgcattttatttttattatctgcactaagcagttgtgactgatactgttgttatactagtctttttatcggcacttggtaatcctaatggtttttattgttctttctttgcttaaaaacactctttggaatatttattcaaacttgaactctcgtctactttcagctatatccaatatgccattttgtgattctgtttgaatatttctgaaatctgagaacctaatctattctttccatgttgattaactggcaaagtaattctgcatgcttaatgcttactatatctacgtgactacaaatttgtaattgctctttatattatgaaacttcatcttgaaattttgagcaaggcgatgatgttactacatgggagtctcttacagatttcaagtaaaactggatgcatgatacaacagctgatgtttctacttttttgacagttttgttttgtcagacaatttgttatgatgttcttcagttatgacatcaaataaaattaggatatgaaatgaagattctgaacttgtctacatcagtaaacacaaacatactcacatgtaattagtataacttgagctatagacttctatcaaaatcttgtgttctaagctgccaatctaatctacgcataaaaaagctaatttgatgatgagcggttaatatactattatgtgttttcgaaatcttctgatagtgtagtggttaccattgttctttttgccacagcccaccttgtgaatagtcgaacctacagattatatccaattctcagttaaaaaactccttcctgttcctagcattgttgctcttgctaattgatgtcgcatgctttaggtgagctgggaattggacagaagactaa

SEQ ID NO: 198897 - DNA, 407 bp, Zea Mays
ttttcgagaggtttggtcagcaggtaaggaaattctccatcaagcaacacagctatggttgcagtgtatgtggcttggaaggattgagctttcttttcgcatgggattactcaaggttgcactacttctattctacttgcactgcaccaggtgtcaagccgggaactactggtgtggccgtgtggcgtagtttagttataggagagagaagaactgggtttagtgatccttgcaagggaactggccggctatgtggttgcagctgctagcttgtgttgagcacaagatgggtctttgcactagaaagaagaaagctttaaggaattgtcaagttttggagagagactacgactgtgtatatagtacgacgattcttccaaggaagctttgctataatgacgatctgg

SEQ ID NO: 198898 - DNA, 345 bp, Zea Mays
ataaaagaatgggatgctcctgaatcaaaaagtacagtagcgagagtaaattcaacaaggaactcaccgagcactactcccggagcttgctgagcctcttgagcatcgacgtggtttactcgtgccctgccatgatactgggtcttattctgctggctaatggaggagggtgccttggaggcgggcgctggggcattcttggggccattcaccgagttggagtaagtaggtcctgatgccttcaactgggggcagttattcttgaagtgattggggtctccgtagtgccaacaggcattagctggtggttggttgcttgcgactgagggggcctgaaaggagctc

SEQ ID NO: 198899 - DNA, 209 bp, Zea Mays
gctgaatgtaacgatacaagtttggaatgagctggtcctcttcatggctcatgccacttctaaaatgtgttacaccaacatctgtctgcttgctatacctaagatcgctctgtggtataagaatatggcccattgataacattccaagacctccaatctccttgggagtatagaagataactggaggaaacctgctaggcatctttgaa

SEQ ID NO: 198900 - DNA, 288 bp, Zea Mays
ttgtaaacaaatcgacaaccaccaagatgcaagtgtatgactgtgatcgcggtaacgcttcaatgaagtccattgaaattatctgccacaaggactcaggcactagtagcggttggagaagccccggcaatcgagagcgatcggccttagcctactgacataccagacaatggctgacgaactgctgaactgaatgtttcatgcccctccaagcaaacaactgcttcaagcgagcataggtcactggcaccccagaatgtccaccaatgacagaagaatggaacgctg

SEQ ID NO: 198901 - DNA, 357 bp, Zea Mays
aagacggctggtggaaaatcatatgttgcagtatataagaaatacaatgcaactgtgtccaaaaacttccttgagatccatctcttctgggcaggcaagggcacttgttgcattccaactcaagggtattatggacccatgatctcagcattgagtgtgacaccaagtactgtctaacccaatctatgaatagtagcttgtgataagtatcctgttgaatgctaataatatcaaatgtccttttttcagattttactcctactgtgcgaaatggtgttcccaaaaagaaaagcaaagcaggggcaattgttggaatagtaattggtgcttctgtcttaggactagccgccttagctg

SEQ ID NO: 198902 - DNA, 888 bp, Zea Mays
cccaggcaccacttttcacacggatggtttcatgtagtgtgcacctatggacaagcttcttggtagctataaccactgcatgcttgctcagcagtgcaacggattccatatcactggaccaaacaacgtatttgatagcaggtgtctgaagctcaccaagaactaacctttgctgaagatcaaagatggccacccgatcttcagctttgcaaagcaggttaccggtcccagcataatatattgcatcagtcgcaatgggaagggggcttttcttcacaatttcattcttaagattcttcaccaaaacttgattgctactcttctcaaggactgcaaacctgttacgcgctacaaaaacagcagaactacccgcccctttctttgcctcttgtaagtaatcagacctgccagcagaatccttgggaacaatgtagagttcatatgaacccccgtcagcatcagagcaaatcaagacagcattctcggttgggctgtaggacagcatcctgggtgactggttcaagctgaccgatccaggtcttcttattggagccacttgaacttccttctgggtggagtactcaaagaaacggagaaatcgatctttcacatagaaaacagtgtcaccactaacgcagaaggccgggcgttccctctccaatttgaacacaatcatgccactgtcatggccagcagcaagaaggttcatttcagggtgagcagcaagaatccagaaacggtcgtgctcccgtctaaatgtctggataccagttctctttgtggcatcccaaatgcgaatgcttttgtcttctgagttagacacaatgatgtcttgcttcgcatggaacatcacacaggacacattattcacgtgaccccttaaagtat

SEQ ID NO: 198903 - DNA, 400 bp, Zea Mays
ctttgaagctgttacacctgaacaggatgccccatataatgatgacaatgaagaatctcaaatgcctgttgagaagcatcaccatattctggaagaggttgatggtgagcttgagatggaggatgtagctccaccatctgatattggggcaaccaccaagtgccaaccagagcaaagtgacaccaatcgtgcaccatctgaccaacgcccttcagatgctggccctccacttcctgtggaccggcctccatctcctccgccattgccatcatctcctccacctgtccccgttcctcagagtgcacagatgcagcctaaattacaaatggcatctgatcccatggcgccacatcctcaaagagctacatatgtatgtgtattttattcctgtgcaagagat

SEQ ID NO: 198904 - DNA, 505 bp, Zea Mays
caagaggacccaaatcagacatatgaaatggttattgagttctctcttcttgtgagatatgtgttctacatcatctctcgttatcaaccgacacgaaacaagggtggtggctaccctagaggggcaacgaccaggggaggagcgaaagcaagattagactcgtgatcccatgctagaggaggtattttcgtagaattagatgcatctattcatgtgtaggggagtaaatatatagtcctagaggtgagtggctaggaaaaccctaggcaccaataggctagacccaacctcacgcaggagatggaacaagcccaatatatataaaccctaatacacatataggcagtgattaatactctaacattatataagcttcctcgttgaaatcaccatgaagaaaggcattcttggcatccatctgagagatagcccacaaagaagtagcagcgatggaaatcaaagtacggacaatagcatatgagcaatggtggcaaatgtatcatcc

SEQ ID NO: 198905 - DNA, 326 bp, Zea Mays
gacgggcaagcatcaaacatgcttacatttgatgaatacagctgattcaaatcaaaagatacagcacttacctatctccgacgggggagatcaccgtcttccccgcctcggagctcggaacaggtggaggttgtacgacatggggccttctaaacttacgtggacgccttgctggagctgccttagcctcatctccaccctcagccgcacctcctgcctcagccgcacctcctgcctcagccgcacctcctgcctcagcctcagtctcatctccacctccaccctctccctgctcacctccaccctcaacctcatcctcatcctca

SEQ ID NO: 198906 - DNA, 476 bp, Zea Mays
cgatttttcatatctccatatattaggactgaagatttccagcatggatgaaagaatgcatgctttaactgtacaacagatatcactgttgcaaacactaatattttgcactacctgtaaaaattcttccagtatctgcagcaagatagtgccaacaccatctacagaaaagactctgtcatgattagagaaattgaacctcagtctaaacaaggctggaagactatcagcacatctcgctactgaggataacatcatggcatcagaggcatcaggaggaaactcaatagtgagaccacagactaatttcaaaatcctttgggcgaaagacaacctcaagccaatgtttacatcttcaaccatttccaaagcgggagactggcaaagcttctgaaccagtgtaagaaggcgtggcatacaacataagtgagcaaccgcaaaatgctgtgctaatggcaccatggcatttggagata

SEQ ID NO: 198907 - DNA, 766 bp, Zea Mays
atcgacttcaccttggtacatcgccctggttgcctcaacacagtggttgatgccctctcttgccacaatgtcgacaacaacgacaacatatcactggtcacaaacatggcacccctctccaaatcgacctctctgacgacatcacctgatatgccaccacacaccagtcttacatcgacatgttcaacaaattcaatcatggcgagctaggcgaatcatggtgcacacatggcaagctgctgctccacgacttcaaagtttttctgccagtgccctccattatgttgccctaggtcatgcagctcgcccacatgggacacgaaggcttttgagcgtaggggcgatgtttcttgtgtggctgtcgggagcgtgatgatccctggctgcgcattggctctgcctcgggtgcttctgtggggatcatagtgcccgcgtcgcccttgccaccgttgtccgttatggtccctagcgctcctgctgtgctcgtcgacctcgttgccagtgggggtgccagaccctctcaggttccctccacccctcgggtacgagcctaggtccgccacctctaatcctcccctcaaacagatgtgttcgccacctctaaccctcccctcagacatatgtgtctgcggcgcattccacccttgttgttgttgcccgttcgaccatggccatcggctagacacgggagcgggctgcggctctcgcctgggagcaggagcgtgcttctttggaggctctcgcttaccaattcgccgaggctaag

SEQ ID NO: 198908 - DNA, 691 bp, Zea Mays
gttttacttcttccccttcacctaccagagctatgatctttcacttgccaaatttactgtgtccacccaagatgttctcctgcttagtgacttccagcaaccagacaagaccgcacccttgttcaaggaatactcactgaatatcacccgcgacacgctcgtgatttccttcaagccgtcaaatggaattgcatttgtcaacgcaattgaggtggtctctgtcccagatgatctcatcaccgatgatgcacaaatggtcaaccctgtccagcagtacagtggtttgtctacacagccactggagacagtatatcgggttaacatgggtggtccgaaggtcactcctgacaatgataccctctcgaggacctgggtgactgatctaaagtacttgttgaacccatctgtgaccaaacaggttaattatggcaagcgtgtcaactataagaagggtggaggtggagctactcagctgtcagcccctgatattgtctatggcacagctacagagttggcagcgacaaatacatccaatgctcttttcaacatgacatggcagtttgatgtggatgctggcttcagctatttggtaaggtttcacttctgtgatattgtcagcaaggcacttaaccagctctacttcaatgcatatgttggaggcttttatgcacagaataatcttgatctgtca

SEQ ID NO: 198909 - DNA, 508 bp, Zea Mays
cacatatccaaatctttcccatctgaaggtggtggaaacaatcctgctccagcagtgccacttgttgctctggggactcagaatggaactattgaagttgtagatgttgtggcaaatgcagtttcagccagtttttccgttcatagcagcacagtgagaggattgagatggcttggcaactcacgtcttgtttcattcacatataatcaggtgcctccatgttctgatagttttaactcctgtatattgtgaattgtgattgcactaaagtgtttctgtaatttgtcaatgagaccattaggttactcttggcaatcaaaactattatgatggttttccttaatttaggtacttattggcttcattcagtttgcactcacgtttcatgattgcaactttatatgtttttgtgtaacttaatgattttcagcatgttgcttctctcattggtttaacattttgactattgcaggttaatgataaaactggtggatacaataataaactt

SEQ ID NO: 198910 - DNA, 678 bp, Zea Mays
gtggcatgcgggcgattcaagccagattggcaaaacaaagagatcgtacaagttaaatgttttgcttaccacttacgaaatggtgcttgttgatgctgcatatcttcgttctgtctcatgggaagttcttgtagttgatgagggacatcgccttaagaattctagcagcaaactctttagtttacttaattcgttatcatttcagcacagagttttgttgactggaactcctttacagaacaacattggtgaaatgtacaacttattgaacttcttacagcctacttctttcccttctctgtcatcatttgaggagaaatttaatgaccttacaacagcagaaaaagtagaggagctgaagaaacttgtagctcctcacatgcttcggaggttgaaaaaagatgcaatgcaaaacatccctccaaagacagagcgaatggtacctgttgaactgacatcaatccaggctgaatactaccgtgctatgcttacaaagaactatcaagtactgcgcaacattggaaaaggtggcgctcaccagtctttattgaacatagtaatgcagcttcggaaagtctgcaaccatccttatcttattcatggaactgaacctgaatctggttcacctgaatttttgcatgagatgcgcataaaggcctcagcgaagctaactttgtt

SEQ ID NO: 198911 - DNA, 320 bp, Zea Mays
ctcctgaaactttgtatcagatgccacgaaatacatctacaagtgcccagcagctgcatgatgtggtatggcctggcgattccactacgaagcctaagggctgggtattcccaaacactggccttcctctgagagttggggttccaattaaagcaagctttaaggaattagtgtcaggcagaggagataacatgagtggttactgcatcgagatattcaacgcagcaattaaacttcttccttacccagttccttgccaatttataactattggtgatggcacaaaaaaccctagctatattgacataattagaatggtt

SEQ ID NO: 198912 - DNA, 763 bp, Zea Mays
agctaattggagctggtgcttttgggtttcacccgaccctagagtggatatttgttggtgatagaggtggtactctcctggcatgggatgtatcaactgagaggccaagtatgattggcatgtaagtatccttatagagcgttgagagttggaaaatataactatagtgtcatgggtgtgttgcccattgtttcttttctttccagtactgcttgctactttcatctcagtgctaatgaaatattcattatctgcaaagtcaaacaccaagttcttcaaagcaccagtgaaactagaacagttccttaggatattgtccacattaggacttagttttgaatatatgctgctctgccatatgtattagacacccatctgtgttatgttgaattacatccacatctgatttagtgcatctttgcacatagtgacatgaattttaacctaaaagttctaacataatgcttgcagttccttggcatcaaatggatattgaaaaattgcaacgatgtttttttgtcttagtcaatcatctgcatgcacctttctttgttggtgtctctcaccctctaattacactgttttctgacatagccatctttctgtctattttccatctgaattttgcctttcacttttacttagtacacaggctggttcccatcctatcacatctgtatcctggcttcctacactgcggctgcttgttactatttcaaaggatggagcactccaagtgtggaagacacgagttataataaac

SEQ ID NO: 198913 - DNA, 390 bp, Zea Mays
atatgagctgcaaggaatgtattgcgtccatttctgcattctcccaggacaggcttctgcttttaaccacttcaagaaatgccttgaatgatgaccgtgggtgcatcctctgaccatcatccttatcctcagggtgatgttttgcgccaccccatttgatctctttagctgtgtgtgacctaaaccaaaacaagtaatcacttggtgttatataagccaccgccattccacacacagcatcccctaatgcaacagcaccaaggtagcctgcatcagcaaggctatctgtgctgagccctgttgagtccccatgacacaccgtcaaccactcgataatatccttaatctgagactcggtgggagtgacacccaatgggtagtacttcccac

SEQ ID NO: 198914 - DNA, 387 bp, Zea Mays
caaagaatgtggtgagggcattattaacaaactcagtgccattatcagcctgtatagtcttgatagggaggctgaactgtgtgtggacataagcgcaaaaattaatgatgtgagtggctacctcggacttgcagactagagggaaagtccagcaaaagtgagtgaagtcatcgaggatgactaggtagtactgcgcaccagagacactggcaacgggagaggtccaaacatcacagtgaataagctcaaatggtagagatgaaactgaactggaatttccgaagggcagccgcacgtgcttgccaagttgacatgaatgacatagagtatgagcggacttattacatgagatggaattattttgtctaagcaaatttagggcagcag

SEQ ID NO: 198915 - DNA, 492 bp, Zea Mays
aaaaaaaacaggaaaaaaaaagaggaagcacttacttggtcgggccgggagcaaggcacgagccagcccatgttccccacgcccacactaactagtctttttactattattttattctcttgccgcaaatgaggtcatcatgacatatgctatgacataagcatgcaagtttcagtcgctaacagcaggccacggaacagcctcatgcgcgatcgagtcgagatggctgacgcatggaccactcgtcctcccctcgcgccgttagaatagaatagtcatcaaccaaatttgattagcaacaaccatgccaggatcgtaacaaacgcgacaacttcgccgtgggcgttgcaacaacctggagctagaattcagccgtgaatctctcggcatcgagtatttatatatccaggcctgcgcccatactgccatctacatctagctggaagagtccgccaagcaagcttgccaccgtgagcagagatgagagatgtc

SEQ ID NO: 198916 - DNA, 1709 bp, Zea Mays
tcagagggatggtcctacacataatgaagaagaagacgattggcttgagacagagaagaaagtaataataattcacaggctgcatcagattttggaacctttcatgctacgtaggcgtgtggaagatgttgaaggatcacttccacggaaggtgctacccttttttcccttgtctcattggttaatttgttcggtaactaaataactttattgacccggcatgttgttgtaggattccattgttttgagatgcagaatgtctgccgttcaaggagctatatatgattggatcaagtctactggtaccattagagttgatcctgaagatgagaaaaggcgtgcacaacggaatcccatgtaccaggtcaagacatacaagaatctcaataacaagtgcatggagctgaggaaagtttgtaatcatcctctgctgtcatatccattcttaaatcatgggaaagattttatgatcagatcttgtgggaagttgtggaatcttgatagaattttaattaagcttcacaagtcaggccatcgtgtacttctttttagcaccatgacaaagcttcttgacatcatggaggactatttgcagtggagacgacttgtttataggcgaattgatggaacaacaagcctggaagatcgagagtcagcaattgttgacttcaacaggcctggttctgattgttttatattcttgcttagtattcgtgctgctgggaggggtctgaatcttcagagtgcagacactgtcgtaatatatgaccctgatccaaatccacaaaatgaggagcaagcagttgctagggcccatcgtatagggcagacaagggaggtaaaggttatttacatggaggctgttgttgataacatatcaagttatcagaaagaggatgaattgagaaatggagggagtggagatttggaggatgatcttgctggaaaagatagatacatgggatcaattgaaagtctcatccgcaacaatatccaacaatacaaaattgatatggcagatgaggtcattaatgctggtcgttttgatcaaagaacaacccatgaggaaagacgaatgactctggagacactcctgcatgatgaagagagatatcaagactctgttcatgatgttccttcattgcaggaagtgaaccgtatgattgctaggactgaaagtgaagtcgagctttttgatcagatggatgaagactttgattggacaggtgatatgacgaagcatcatcaggttccaaagtggcttcgtgttaactccaatgaagtagatgctgtggtggctagtctgtccaaaaagccgtcaagaaatatgtcatctgggggcattgctttagacactaacgaaacacttgagaaaagaagggggcggccaaggggtacgggcaagtactccatctacagggagatcgatgatgaagatcttgaagaatctgatgaagattctgaggagaggaatactgcatccctacctgaagaaggggaagtaggggaattcgaagatgaagaagacaatgatgactcagtacctgataacaaggatgaatcagaggaagaagagcctatgaatgatgatgtatatgaatttactgaaggattaagaggcagaaaagctaataggatggaagaagctggttcaacaggctcttcttctggaagcaggagattaccaccacctgtaccttcctcatctt

SEQ ID NO: 198917 - DNA, 636 bp, Zea Mays
ccttggggatgcctcatcttctcagagagatgctaatcatccacaggacaccaagcatccttggggcggagacgacagtaggggtaaatcacgtctgtcccaagatggttctcgattggacggaacaagggttgggtatggaatgttaaccaacccgacagcagagaagaacaacgaaccttgtgttggaatgatgcaagcatatggagcaaggtcattggatgacagttttgcttcattggatgattctgatgtccctgaggctgattggaccaatgatagatcttatagcacacgtgtttgtgacacaaagtcaaaacatggggaaaggaattctgtgacgaggttgcttaaagatgaagaggtcagcgaaaatggtgaactgttgaagagaaagctgaatcgagccccctcccgacttagagtgaagggaaaagcaggtgacagcttgccagaatgtgaaatgacacctttatcgccaacctctggattgagaataggaggtcaggctacaagagacaggaatgtggcgagggttgatgatccaaaggaggcaactgatgtgaacaatagattgtttaacaccatttccaaagaagaatacgaagatcgattcagggattgcattattggctt

SEQ ID NO: 198918 - DNA, 760 bp, Zea Mays
gaaaggagtgatctttcttcatcaaagcaaaaaaatgtctcacatcataaccatttggaaaattccaagaaagcaaggcaagattatgtaggttttcctgaagacgagagcaaggaatattttcaccagtcagatgtgcaaagatcagatttgtctagtaagaagaggatagtgaagaaatgggaggagagtcagtacaatccagtagctcaggtaagcaaaggagctatcaaggaaacctatagggatcagaacttaaaggaagcaaagttgatgtcattgaattctgaagaactgttttctatgacgagctccaaaccaccgaaagctcaacatgctgatcaggttttgttttatgatggggggcgtacgaacagcgagttagttgaggataacacacactttagtggcaaaacaggtctccctgagcaagaaaatagtctttctgataaggctttagacttgggcaaacctgctagtgatgtggcctatattcagacttcagctgtaacttcaagttcttcaaaggcttcagtctcacaaaaaaagaagcagaccactcaagctatgaagacatcgtcaattgagtctctttctttgtcaccacagagaaactctaacattgacaatgtctctgcctctcatagtagagtttcaggtaaggatggatctctgaatgctaactcaagcactgtgccggccatggcaaaacaactaaatactcaagttggtgtagcagtcaatgatcaatggtctagtg

SEQ ID NO: 198919 - DNA, 332 bp, Zea Mays
ggtggataggctatccaagtatgcccattttttccctctcaagcacccatttacaactggtcaagtggctcaagttgtgtttgacaacatctgcaagttacatggattgcctaaatcgattgtctcagatcgcgataaagtgttcactagcactttctggaagcagttgtttactctgatgcagaccaagctcttattgtctactgcctaccacccacagagtgatggtcaaactgaacgtgtcaatcaatgtcttgagatgtatctcagatgtgctactcatgattctcctactaagtggaagctgtggttacctttggctgaattttggt

SEQ ID NO: 198920 - DNA, 505 bp, Zea Mays
cggcggacgtagcagatgcacggtgagccatcgtgagctcttccaacagaagagtggcacggacgttgaggaacatggggaaggggcgaccgaggcgaagatggcggccgatgttggagaaatggttgctgaggccgcgcaaaacattgaggaccaatgttcgaccggagactggttcgccaaggtcgccgagagcatctgccatagttttgaaacgacgatagttgttggagatggatagatcaccttggatgaagtgctggaactgggcgtcgagatggagggcgcgagtctcccgattgctgagaaactggttctcaagggaaagccaggcgatgcgggcagtggtgccacgttgcatgaccatctcagcaagttccgggaagatggaaccggagatccacgacttgacaatgcaatccttgcgtgcctagtcggggaaggtaggcgagggagcatcgtcgaggatgtggctgtccagggagtacttgccgacgacgaggag

SEQ ID NO: 198921 - DNA, 310 bp, Zea Mays
aaaagattagcgagaagattgcaatcttgggggcataacgcggtcggcaatgtcagttctcagctgggggtggctcgtgaggtgctgcacaggatggagatggctcaagacagcagggtgttgtcgtatgaggaggtgtggctgctgcgcaaattgaagcagcattgccttgtccttgcttctttggaaaggacagttgcacggttaaggtcccgggtccattatttgagggaaggagatgccaacacaaaatttttccacttgcaggctcgccaccgcaagaagaggaattttatctctcatttggagg

SEQ ID NO: 198922 - DNA, 327 bp, Zea Mays
atttggtgaaaattgaaacggaggttaaccaattttttttaaagaatcccattcccgggtcagtatctgaaggaggattttgttttcttgctcccgcctagtcaaacccttccactgatctcctccaactgtcctaaataccagtctaatcttggtcatccctgcttccctctgtacatctacttaacgtaccagaatgcagtggtctgtggtcatgaccatctagatcagatttgatctggaaagaagtctattattttattatttctcctagtacttgctcctcatgtgccttttggagttctatttccaaactttttataactg

SEQ ID NO: 198923 - DNA, 371 bp, Zea Mays
gtgctttgtcaaccagggagcgcattggcctatgtaggagtcgaagccagacccagtctcctacctcaaaagtcacttcccggtgatggttgtcataccaacgcttggcatgctcttgtgcttgaagaaggcggtcccgcacctctgccaggaaattgtctcggtcttgtagcaggtcttccacggtttgggattgcgccgtgccctgttggtatggtaccagtgccggaggctcacgtccgtataccaatttgaatggtgtagtctgcagcgctgagtggaaggatgtattatagcaatattccgcccatggaagccagtccagacaggaacgaggtcgatctcctgtgatgcatcgcaagtacatagca

SEQ ID NO: 198924 - DNA, 462 bp, Zea Mays
gttatcttgggcctcatcagcattataactgtttattccagcttgggagtcattctgctctgaatgagttacagcggacacctcatctgacttgactgtcttatcatctgattctgcaatgctaccttgagctaagccaccatcttgagaaaaatctgttgcaggaacaccaggcattcccatattattatcagaacacctagttgattcttccgaaacatcgctcgcatccaagttaactaatccgttggcttccccaccattgcaggcaacttccatcagcacactacttttgcaagcctcagcctccacagtagtgtcacagtgtttcctctccaaactatcagttttgctaacctccacacccgctccacatggtgcctcagcctcagcacgcagcttcatggcgtcggacctcaacacccttcttgtcacattcctgttgtcatccgcggaacccct

SEQ ID NO: 198925 - DNA, 397 bp, Zea Mays
ccaccataagcacttgttgtctatatcgtacacgcgccaacatacaaatgatgaaattccagctggtagttcaacacctttacgtaaaaaggcaactttgcaaggatgcagtagagaaacagcagatgcttcgtcctggtggaaagagtagaagatctcgtttggggcagcgctgagttgtatatccttgttaagcttcacgtcggtaggtctataaagccaactaacacgtaatttgggatgtgcttcttcctttttctcaatccaacgtatcaatccaatgaacggaggagcaccgacagcccgaaaaagagcacaatcccctactctaatttcacgaccgtcctgaaaattaaacagcgtgttaaaaagtcatccaatgaccagcatgttgctc

SEQ ID NO: 198926 - DNA, 309 bp, Zea Mays
agctgaaggttgtaagacgacgagttgacatcccccaaagtcatagtggtcaatgtgtcgcatatgctgtagctagagtgctcaagcaaggcagaagctctttgtgccgatgttgaggtagtcgagcacgagggtgagtagccatggttgaggatgccatctttacgccatggtgatggtcgaggcgcgtcgagacagtccattgtataagggggtgatgttgaggtcaatgtagtcaaggccatcgaggatgtcgacgaaaatagcgacacagtcaaggcaggtcatcatggaggaagcatacaccgg

SEQ ID NO: 198927 - DNA, 1062 bp, Zea Mays
aaacaaagcagttcaaaaggacttctggcagagcagaggtaatcaagtttttggtgttacttgtgtaatgtttcaagatatagtgggctgtctgccttcaatttcttaagcatagggtcagttcgtagttcttggtttctctagtaatagcacaagtttatgctttatgcttgcaggtgccaattaagagcatcatgcgtaactctaagccgccgagcaaactggccatgctcatggtgttattgtttctgctttgttacggagttgagaaagtccattgctcgacggttcatgaaaacaaccaagattttcactctctgctcgatttcaagaagggcatcacccacgatccaaatggagccatgaacgattggatcaacaacacccacttctgccgatggaaaggtgtgaagtgcaccttaacaccgccatatcgcgtcacggagctcaacctctctcacaacaacttagctggccaaatctcctcctctcttggaaacctgaccaaccttaatttgctggctctaccaaataatagatttggtggaccaataccccttcttgacaggctccaaaacctaaattacctatccctggacaacaactccttaaatggtgtgattcctgaatcacttgcaaactgcttcaacttaaacaaactaggtctctctaataataacctcaccggtgttatccctcctaacataggttctcttaccaagctacaagttcttctccttcatagaaataagctttccggggtcatcccatcaagcctcagcaacatcacaaatttaattgcaatatctctttcagaaaatcaattgaacggatccattcccattgaattatggcaaatgccacagctaacgtctttgtaccttcatgataattatctattcggtgaaatcccacaaactctctctaatgtatcttctcttcatatgctatccttggcgtacaatatgttgagcaacactttgccatctaacttcggccatgccctccataatctaaaatggttgtacttggaaggcaacttgtttgaaggacatattccag

SEQ ID NO: 198928 - DNA, 520 bp, Zea Mays
tggaggttgtacctgtatgcccccctgccggattaatcggtctttgcgtccgagtggtccgacaatcttgttgggcccgtgctcgtggaccagattgaggggatctcaatcgatcttgtactagaggggtcaacctgtcaaaaacagatgattgaggtgccccccaggtggggtattgtggtatcccgaatggatatggtggcgcgccccacatctgattcgggatatatggtggcggtggtatgtatgtataatgacatgacatgggtgtatgtggaggtggaggtgtccacgcaggtgtattaggtcttaattgaacattatgacctcatgtcctttccgattggcgaggtggtccaatcggcctaacctgctgccgctcctgggtgggtaagcgaagacgctttggtggccggtcactggggtcggccttctttttcacatatttagacaataattaatcaaaagtagggctggatttgaccaaccgaccagctgccttgaacgtgttagttttcca

SEQ ID NO: 198929 - DNA, 407 bp, Zea Mays
tttacatgaaagcagacgagaaaaagagggagaagctaatgagtatggttatgagtccactgactttaaacttcggaatgacgaggcccttgtgccacatgcagcttggctccccatgccaagtagccgaagtggagtttagagtggtggcggccaaggtcagtactagggatttggtgcaagagttcttggcaaacaggatattcccgacctctagtggctgggggatgcccaagaaggatgcgggcaagaaacacgaacttgttcagctaccctaccggttcaagtttgagaaagagttcaagaagccatgccaagtgtggctggaaatgattgaaactatgtgcaacgaaatccttggtaattataccaagaaggaggaccaactaatgactgctgccttcggc

SEQ ID NO: 198930 - DNA, 391 bp, Zea Mays
gttgtacactggtaggcctaacagcagcatgggtcaatccctacgagaccttgagaatgaccgtgcagatttccaatcgacaccacatgaccctcattctgtggctggagaagctaatttgctgcaacataatgtcccaagggacagtgatctgagtcctcttggcttactttggtctgagctggaaggacgtccaaaacaacctctctcatctaatgtacttagtgtaaatgaacgtagaaatcccaagcctacaacacccaaggacattccacctgtaaacatgagacaagggccacttagcagaatgaatgaagtttctagtgtgcgcgatgagtggcctgcaaactttggtcggctggacaacatgaatgatgcaaacatttctggc

SEQ ID NO: 198931 - DNA, 484 bp, Zea Mays
atttttcttatgcttttacaagttcttttttgctaacttactaggatggcatgtaccttactacctccaccccgaaaaagaatgcgggtctatgcgattcgacaagcattccttttgcgacagtggtagctacaagtaaccagttatgtggggattgatcacattgtgcttccactataaaagtgcacttgctatcttgataatggttaaatctgagacactaaagtgacctttttctcttaggaccactgtctgaatactcctgcccccttccccccaattcccatggtggtttttaaaggttggttttgctgctgttgcaggtaacgagacaactaatgtactctttgaattggttaaagcttttattctgttttgtactcgtgtgctcttatgcttgttattactgttccgtaagaattttttttatccacaccattgtcagataagtcatgaccaagaccaaaaaacaacagataatata

SEQ ID NO: 198932 - DNA, 395 bp, Zea Mays
gatgaggatgagatcatggtcatcagcttcgaccgggagctgcccttcggagagggcgtgctcaccatggacttcaccggcacgctcaacgatcagatgaggggattttacaggaggtacgcttcctcttactgtactagtttgttgtgcatgccatactccaattattcctagttgttaggtatgtactctaggctgttagtttcagtggcgacaaattcgtgtttgggaccaaccaatacagtatttacagttgcctcactagcaggccaattgtgtacaccagggacatctggatacattcttgttgccatgcatattacgtgaaaagtgtgaggtagttacacagcggtgacagatatcttagaatctgtagtgtcacagtcttgcaaaag

SEQ ID NO: 198933 - DNA, 403 bp, Zea Mays
ttttgtcttcggtggcttgcctggctagtgaatcaatttcctgatgatactgctgcctctcttgcataagttcttgaatgcatgcctgggcatgatgcaactctcgtttcagtcccttcattgctgacacatcagctgcatgctgttcttccaagctccatattcgattgagaactttcaatagctctgttgacgttttaatatcagtacctgcctgcctaaatctggcattgcaatccaaagaccgagttgggctgataaggtttattgtggttgcctgtcaaatgattagatgtttttaagaaacatgtattaatgcaaaagtgtctcgagatgcagaacttggaactaataatatgcaatggcatcacaagtgtgacacaataaaaacagtgcacatgat

SEQ ID NO: 198934 - DNA, 280 bp, Zea Mays
ggcacagttacaatggaccgcgggttgattttccgaaaacagagggtctctttaataaatgtacacggcgaatgggtatcttctattctgggctgttggatcaacactggacggcccggattagatctgacgcccccgaaccccgcaatcaattctggccatccgatcaaaatctgaagatccagattagatcgccatcacacccaaccggtatgcatccacaaccctaggatcacgatccgacggcagcggttttaaagagataaggagggttctggtc

SEQ ID NO: 198935 - DNA, 391 bp, Zea Mays
gtcgatgggcaattgtcacagcaaagtaattcaccaccatctccacagaaaccacaggtgtcatcactttcatctattgcctcaacttttctaccccatgcattgcttctcctgctcatagattcagcagaccaagcctcaaccaggcacaaagtgtatgacttgccagactctagaaagaggcccaatgaggactgtgggtgactacgaccagcatgagccatgaaatcagatacggataagttttttttgcagcaattgcaaacaataccttcccaggtaaccatcccatcctttataattttattactttttggatcccggtactgtatcacatcttttacgctcagaaagccagtcgcaagcaaccagcagattacagttttacggg

SEQ ID NO: 198936 - DNA, 673 bp, Zea Mays
catgccctcaagtgcctaaatatgcgttgcatttacgagtttctgttgtgaggattcctgattgtggtgtgcttgcttctttaaagataaattcatcctttggaggaagtgagtaccaagacatggtagatcaagctttgaacgagtactttaagtttgataggttcctagcaagaggagatgtttttggtatacaaaacagttggaagtgtggctcaagctgctgcctggcatgcaataagcaggataataaactgaatccccgtaatatgatctactttaaggtatacctatgtttcatacttaaaattactttagtccataagttcttcacaggcgattgaacttatagctcatatctaactgcatttgctcataattgtaactattttataggattgctgcttgtttgttgatattttaattaattgttaggtgactggcatggaaccatcagatgaacctatacttcgtgttaattgcaatgaaacagcccttgtacttggtggagctgcttctgctgcaatccccccttattccttttttgcttcttctggtaattcagtaccattgcacagtgaagtagtggagcatttagcatctgtcattgcaccagcattgtgcccttcggatattttaccaaaaatcaagttttccacttttttatatggcc

SEQ ID NO: 198937 - DNA, 587 bp, Zea Mays
atcagaggaatttctggcgggcaaaagaaacgtgtgacaactggtatgcatgcaaagtctgcaaaccatgtgcccttacgcagacctgtgatcaaatcaccaatttatagttggaaccctaattcattgcaaattatctcaggatttgtctattcttttttcccttttgtgcaggggagatgctaacggggccagcaagggctttatttatggacgaaatatccactggtctggatagctcgagcacatttgagattgtaaagtttatgaggcagttggtccatgtaatgagtgaaaccgtcatgatctctctgctccagccaccgccagagacatacaatctttttgatgacataatcctgctatcagaaggatacatagtgtaccatgggccgcgcgagaatatcctagaattctttgagtctgccggtttccggtgccctgacaggaaaggtgtcgcagactttcttcaagaggttacttccaagaaagaccaacaacaatactggtatcttgatcaggagcagtatcattatgtatctgtacccgactttgcagaacgtttcaaatcattccatgcatgccag

SEQ ID NO: 198938 - DNA, 346 bp, Zea Mays
agaaatttgtatcctccttttcttgacagaatctatgacataataacatctcaggcatgcatggcaatgaggcacaatcaggtcaacagactgctcatctgcactagaatgtgttcgctcaaaagatattattcaaaatttaactgaaagattttgtttgttgcacaattattgtattgctttgtttgttgaatattatttccttggtgatggtctgctgttgctgctagcaggattgagaacggatgggctacaagctattgttggtgcctggtatcagagaatacagaaactctctttctctttatgtatataacatgaccaatttagaggtgtgtagtaatta

SEQ ID NO: 198939 - DNA, 309 bp, Zea Mays
agaaggtgctgatttcgatgttgttgtggatgaccggttggaaacatctccctgaaaatcatggttagtgctagcagcactagtgtggggctgccatgatgtattgcgacctgcataagtattagctctcacgcgtcgtccctgcacttctctttcagccttacaagcaaaatggaataatcgagtaatgttattgtagtccttgtaagctaagatatcttgaatttctcttgtcaaaccacccacgaacctagacattgcagcctcttcattttctaccagaccacatcttagcatgcctatttgtaa

SEQ ID NO: 198940 - DNA, 1170 bp, Zea Mays
catggaaaatctgactctctgatcagaaaagcatttggaattttgttagaatctgaggctggttcactgtgagaacagttagtgacagatgaaaaatctatctcatgatattcttggcagaaggatctgaaatcatcttcagtcataatttctgatggtaatggcgcatcatcaggtggagttgcaggttcccaaagggcatcagcagttactcccatattgtcatgttgtattacaagctctgaaaggaaatcctcttcttcagggaaacatggttggctactcatactggaagatgaataaatttgagtgtggctcatcaagtaggcaggatccaggaacgggtttgtactactagaatcttgagcgtgcatcccccacgccaaatcttgaccagcattcactggttgtttctcaactgcattacttttcaaggttactgcaccatccttgttcaaatcgcagagagatcgatcttcagcattatgactgccctcttttagtaattcctcttgataatcagattttactagaaattgtgtatcaccatccctgtcactacatttttcacttgtagtctctacaataagaggactattgtctgtctgcaacatactcttcttagagatatcttctcttgattcatctactgccccaaaatttctgtgaatagcttccgttgtttccaaaacttccctggaaggagactgtagttgtaaatccagcctagtggcttcttcagtcaaacttgtagccagaacctctaccttttcaggatgtatgttagcatcaatgaactctttgggaggtaccacatcaactgcaaatacgctagtagttgattcttttgcaaccacaaattcaccaacctctgcaatttcttctgtttcagtcaattcatgtttttctaccaaggaactactggtgttaggtagaaaggaagtaccaggggctagagggacaccaatctctagtgcttcagtatcatcactgaatgcataggacgtggatgcaagtgtctctcctacatgagattctgtctccagttgagaagctaatacacctgaaacgactcccggaagcttttcagcatcagtgaaatccctggccacggcacatccttgcatagaatcatccttgcatgtgttgaggctagttggacaagtcctt

SEQ ID NO: 198941 - DNA, 318 bp, Zea Mays
cctacaagcacccaatcctcagatgaacccaggaccaggacaaccatagagaacaaaatccaacccaatactcaagcaagaataacatgggggagagattgaaggagcacctggattggagggatgtgtgcccactgcccacctgttccagcacctggattggagggatgtgtgcgattctggagcaggaacagaaatgagcagagaacagagaagaaaaggaggagatgaacagaggagggagtaacctgggtacagcgtggagcaggggcggcggcagcgctagcgtggagcaggggcggcggcagcgctagcgtg

SEQ ID NO: 198942 - DNA, 626 bp, Zea Mays
ctgagatggtctatcaccgagacgttcgccatcgttgctgtatcctggaccggctgcggcaatggcattgtggcagttggcgcaggtgtttccatgtgggcaagattggagtcctcctggcagctcgcttggaggtctacaccgcaggtgccgcaagcccttgtctccactacctgttccatgcaaggtcctgtcgcgacagtggcagctcttgctccagccgagggcagtgtgcctgttcttgtgtttctgaacgatgccaggagggggctggagcaagctgagcttgtgcatcctcagcctgtttgtatgatccagtggagatcctgttcgttatacccccatgatctgtctgagatcaggagagagatcctcatgacttgctgctttgatgggactgtccggctatggagtaaggatgaggtgtctaggtcgaagaagcagcgtggtttgctaatatcattcagtgtcattgcagtaatagaggtgaacaacactctgaatggagtcctcggagttgatattattgtgagatggtccatggaatctggcagcgttgtgtcaagggacgaacaaggtagattcaagttgttttcaggtgatttgagggagagccaggttggtaa

SEQ ID NO: 198943 - DNA, 407 bp, Zea Mays
atgtattgttgctgacattagcagggtatccctcagacaagattgtagtaaggaactgtggcagggtatcaaggaacaagaaatttttgggtactattagacatcaatggaaaactgttgttgatctggaggataagattcctgtagaagctattgctagagcacggcgtgctgcacgttcaaaactgattgtatcacagcaactgaaaaagcaggaatcatcaaaagcagttctggtttctttcttgttgaaaattcttatgcccttcttatgtttatggaggtttcttgtgttcatatggaggccagtgtgggcgatgatgggccctagaaacaaggcatcatatgcatatttttttcctggttctacttatgatgttgacatggagcttcatgtcagcgtacac

SEQ ID NO: 198944 - DNA, 327 bp, Zea Mays
cagttcgtcgtagagtgcaacgcttcgacgtacggcttcggcgcggtgctcgtccaggagggccaccccatcgctttcttcagtcagccggtggctccacgtcaccgctccctcgcagcttatgagcgggagctcattggcctggtccaggccgttcgccactggcggccatacctttgggggcggcgtttcaccgtcaagacagaccactatagtctcaaatacttgctcgaccagcgcctcgccacgatttcgcagcaccattgggtcggcaagttgctggggttcgacttctccgtcgagtaccggtcaggctccacgaacacg

SEQ ID NO: 198945 - DNA, 364 bp, Zea Mays
acgagacgtcggagtcaacaacaaagtcggtaggaggactgggctgcgaagacatgggatacgagaagagagcaagggaaggcacccccacagagccatcgagaggggtgctagggtcgacagtagtgagcatgctgatgacggacatgggtggtggagacgacaaggcctcaagcgttatggagacaatctcgacactgcagaacacgaacggtccaagagtgtggcgaccctcctgagggtggagggaggcgagaggggtggtagagctcgatgcagtcacggagaacaggtttcatgacttgatataaggccacgaacgtgctccagagaagctggtcatcgtgaagggagacatgcacac

SEQ ID NO: 198946 - DNA, 517 bp, Zea Mays
cccaactgcctgtttgcgagctggtgccctaatggctgttctatcgtatctcgacttcttctccactggggttcaggtcgggtcctctgatctccttacaaccgttcttatcttgtgcactgtttgcatctacttacacctcttcccatgggggacgtacttgttgtagagggtagccttgtctaccgctgcaaatatttgcaggaagctgccgtccgatgcttccgagtttgtcatggaagctgtccccttgctcacgaatcttctaaatcaccatgattccaaggtactttgcaagctcagacaaccatacctctggattatgatatattgaggtatatcatgtatttcccaacccttcatctatgtgccttacaggtactagagcatgcttctgtttgtttgacacgcattgctgaagcttttgcctattaccccgacaaacttgatgaactctgcaatcatggattagttgctcaagctgctagcttgatagctgttggcaactcatctggcc

SEQ ID NO: 198947 - DNA, 517 bp, Zea Mays
agaactgtcacagggcatgcttgaagaatggtgtggtctgctctttcgacgatagtggtgtcagggtgtctatgctgtgttcatctcttccatctgaagatgtaagtttcagcagcaaaatgtcattagttaattcaacaggctttgcacagaagaagaaagggagtaaggtatggcgaagatcccagggtggtaagaaattggtaaggcatagagctccgaagcatggcctgggaaaggacagacatggtcacagatcttcagttaaggatgatgataccgatgcagttttgtctggtataagcaaggagtccagcattgaagagtgcaattctgctctgatccgtcttgagaagctcagcgatgagaaggctcttaagttctttgagtggatgaaggttagtggcaagctaaagggaaacactcatgcatatcacctagctcttaaagccattgcctggaaggaggactggaagatggctgaacttttgcttcatgaaatggttgctgattcgga

SEQ ID NO: 198948 - DNA, 649 bp, Zea Mays
ttttgttgagcctcctgcttttcaatcaagctcatcaaatttcagtgggctgaactttagattcggtgtgtcatcctctccacaaatctctgcagcagcacaaagacgtaacacaagaaggaagttaagaacaaagggcagtctggcatcgaaaccttcaactatcggctcttttgaacagtcaaaatcttcacaagatactaagggcatgcggtttttctgtgaaacaagcaaaaatgaagacccagtgaaagagcaaccgtcaagaaagtcttctacttctgcggccttggaggcttgtgaaacctggcgtactaggtttgtgtgaacatgtttaatgctatcttactatctcaattttcatgtattgtatataattttgtattaactcatgtgattacacacaatttcatatagcatagcctgttgtttcatttgttccagtggaaataaagcctatgaaaatgggcactttgctactgcagaggattattatacccgtggaataaactctgttacccactatggtgtttctggacattgttctcgcgcattgatgctgtgttacagcaaccgtgcagctacaagaatgtcgcttggcatgatgtgggaagcacttcaagattgtttgactgctacatcaattgac

SEQ ID NO: 198949 - DNA, 599 bp, Zea Mays
caaagtttccatgctgggacctgctatatatcttatggaagatctgaaatcaagaggtataaccatcaataagacgatgcgtactattctcattgatgggttctgtcaagtgggtgagatttccaaggctaaacaaattttgaagagtatgtttgaggatggaattgatccagatgtcatcacttattcagcattgatcaatggtatgtgcaggatggctaagatgcatgaaacaaaagaaattttgtcaaggatgcagaaaagtggaattttacctaatgatgtcctatatacaactctgatttgttactattgtaaggcagggtatgtcaaggaagcactaaagcattttgtggacatttatcgaagggggctagttgccaatccagttatccataatgcattattacatgctttctatagagagggaatgattacagaggctgaacacttcagacaatacatgtctaggatgaatatatcatttgattctgtctcctttaaccgcataattgatagttattgccacagaggtaacatagttggggcattttcagtttatgatgatatggttagatatggctattctccaaatgttt

SEQ ID NO: 198950 - DNA, 313 bp, Zea Mays
cacggactggattttcattaccacttagccagcagcatggccaagctccacttccaaaccagcagttaccttctagtcatcaacatcccagggcccttagtagccagccaaatattcctggagttggtgggcctttatatccttccaagcatctgcctggtggatcattctctgctgagactaataacatgggttttatgaactcacctgctcaaatgcatcaaggtggagcaggtacaaactaccagcaaaagtcagttagtggtcatgcagttccaaatcatgttggtccatcaccaattcgacctccaat

SEQ ID NO: 198951 - DNA, 397 bp, Zea Mays
gggagaagtgcccggcacgtggacagggtgctgcagccaatgcaatcatggtgacgattgaagagaaaatctttgacttcatgaagtcatgcagtacaaatgctatgctaattagttattctggtgctcatggtgagaggacaaagaagcacattgtgggcagtgaagatagaggagatgaggcgctgatatctgaagttagtgatgtcactaaagatctcaaagcgtcgaatgtcccactgaaagttagaaattttatgggcaacaaggagctcagtgttgagggcaaaacaaccaccgcagaaggaaacgttgagattgttccaggagatgagctgacagctactctcttggacgctgtgaatactattcagcgcactactactggatatgatca

SEQ ID NO: 198952 - DNA, 317 bp, Zea Mays
caagaagcatatcttaacaatacgaaaagtcagacactgtattttacccccttttgtaatttgtcctctacagcagttgcaccaacaaggatcagctctctttcaatcaactcagagactcgttcaagttgcaactctctatcaggaccaatatatgtctttgctttaagaaactccgcattccacaaagaatattctgattcatcaagcaccctgtatgatagtgccaatgttcgcaagcctgcctcaccataatcattcagatgcctagtcgtatcaacttcatacatccttccattttttgccagtctatcaaa

SEQ ID NO: 198953 - DNA, 680 bp, Zea Mays
ggaacaggacgcggctgtagcgccggcgaggctcaggaggtggaactcagagtcgctggatagcatactggagcaggaggcgagagtggcggcggcgaggagcacgaggtggggctcggaggtgatggacgccatgccggaacaggaggcagcggtagcgccggcgaggctcaggaggtggaactcggagtcgttggatagcatactggagcaggaggcgagagtggcgccggcgaggagcacgaggtggggttcggaggtgatggacgccatgccggaacaggaggcagcggtagcgccagcgaggctcaggaggtggaactcagagtcgttggatagcatactggagcaggaggcgagagtggcggcggcgaggagcaggaggtgggactcggaggtgatggacgccatgccggaacaggaggcagcggtagcgccagcgaggctcaggaggtggaactcagagtcgttggatagcatactggagcaggaggcgagagtggcggcggcgaggagcaggaggtgggactcggaggtggtggacgtcatgccggaacaggaggcggcggtggcgccggtaaaaagcaggaggtggaactccgacgcagtggatgtaataccggagcaggaagcgccggtggctctggcgaggagcgggagatggagctcgggggcggtgg

SEQ ID NO: 198954 - DNA, 771 bp, Zea Mays
caattccgcaattatgagaaactctttgattacataaactcgaatccacatcttaatgctgaagtcaaatttggtaccctggaggattacttctctacattgagagatgaagctgaaaagataaactattcacggtcaggtcaattgggttctgctgagctgcaaggtttcccaacactttcaggagatttctttacctatgcggatagaaatcaggattactggagtggttactatgtatcaaggccattcttcaaagctgttgaccgtgtactagaacagacactccgtgcctcagagattttgggttcatttgttctaggatactgtcagaagtttcagtgtgcaaaactccccatcagtttctcacacaaactgacagcagcaaggaggaatttggctctttttcagcatcatgatggggtaactggcacagctaaagatcatgttgtggtagactatgggacgcgaatgcacacttcactgcaagatctacagttatttatgtccagggcaatcgaagttcttttaggagatttccacgatagatctgaccctacattattatcacattttgagcctgtgcaggaacggtcaaagtatgatgttcagccggtacataaggttcttcttcctcatgaagggaaggcacagtcagttgtattttttaacccattagagcagacaagggatgagattgttatggttgttgtaagtagtccagatgtttctgttattaattcaaatgggtcctgtttgccaagtcaactt

SEQ ID NO: 198955 - DNA, 615 bp, Zea Mays
gagatatcaactgggctggacagctccacgacgttccagatcgtcaaatgtctccagcagattgtgcacctgggcgaggccaccatcctcatgtccctcctccagccagcccccgagaccttcgacctgttcgatgacatcatcctgctgtcggaaggccagatcgtttaccagggacctcgtgaatacgtcctcgagttcttcgactcctgcgggttctgctgccccgagcgcaagggcactgcggacttccttcaggaggtaccattcggcacttgtctagtaaagtagtaaccatatattctctgaaagcaaagtttatgaattgcaacaagacgaccgattctttgggtgcctttccaggtaacatcaaggaaggaccaggagcagtactgggcggacaagcagatgccttacagatacgtttcggtgccagaatttgcgcagcggtttaaacggttccatgtcgggctccagcttgagaaccacctctcgctgccgtttgacaagagcaggtgccatcaggctgccctcgtattctcgaagcactcggtgtcgacaaccgaactcctcaaggcatcctttgacaaggagtggctcctcatcaagcgcaat

SEQ ID NO: 198956 - DNA, 474 bp, Zea Mays
ctggacgttccaaggcccagcgctggagtgatgatggtggcggccctgctgggaggcaaccttcatatagggatgtgttgatctcctcctccatccctcccgtccagcccccccttgatgacgttcctgctgatggttgggttacggtcgtgaatcgtcatgctcgctggcgccgttctcgtcctccgaagcctccccccaggcctatccctgccgacttgcgtggcaaatgtttcaactgtttctcgccttcccaccgtgcggctgtctgtcgccgtctggtgagatgtttcctctgcaggctgtctgggcaccatgctagcgtgtgcccgcgccggcggacgatctcaggattaccacgacgttccctggtgtggcgtcctgtctctcactcttcgtcttccaccatggccccggtttgcgtggagggtggtcaggatggtgacgccgttgcgggctccggtggaggcggtg

SEQ ID NO: 198957 - DNA, 504 bp, Zea Mays
agaacatccatatttcctactgcaaccttctctcgaacaaaatggaaatccacttctatatgcttggtacgagcatggaacacaggattagaactcaagtatgtagcacccaaattgtcacaccacaaaacaggcggtcttgactgcataacatgcaattccttcaacaatgattgtatccatgttgcttcagctgcatcatttgctaaagccttgtactcggctgcgagcattccatgagataaggtttggcccaaagaaaatggcatagcctccagttgaacgtcgatcatcaatgcatctcgcccagtctgcatcggtgaagatgcttagtaaactagatcttgatggtcgtaatgacagtccagtattcaaagttccttttacaaaccggagtatgcgcttgacagcctcccagtgtaggattgtgggtttggagaggaactgacatactttgttaactgagaatgacaagtcaggtcgtgtgagagtaaggtattgaag

SEQ ID NO: 198958 - DNA, 215 bp, Zea Mays
gggcaactcaaagcagtgagaaagagatggagggagagacctctcatggaatcggcgcgacggggagtgggggtggctgcagatccagcggggagggcggcgcccatgcacagacaggcagcgcgcgtccgttacagctagcacggagaagctgcgggacgcgcttccgcttattttcgatggggaggagctcccgggaccgaactcccaaggcc

SEQ ID NO: 198959 - DNA, 404 bp, Zea Mays
tgacacagggtgcatacagttagttcttaagaatttctagtgtattgtgacatcctgcattcccaggaaacatgttaactcatgttctctcagtgcggataaattgaagcatgtacaatggaggtgcttgaaaacaccttttttttttcttcaccaaccattagcacctgattcttaaaaggcggattcgatgctttttttcgaacaacgcaagagagttgcatgtcatttcattaagaaaagagaaccaaatacacagagaggaaagagacctcctgaacacacaacacactaacacaactcctctagagctaaaacaacaacatgaccatgaccacacactagttagcacccagctgagaggggtctgcacacttcttaagaggagctcttgctgaccggcg

SEQ ID NO: 198960 - DNA, 372 bp, Zea Mays
cagatcaagttttggattgcgctcttgcactggtagacctgttcatggtttcgttccaaactgttcaactgccaaaccaacctgtaccaaactgcaatacaggattcaaatgggttggattaaccggtctggaaaaccattgaacccatcaacatcacacgctgcaccaagggcacgctagtgctggctatggacacgccaaccaaattgctcgtatgccacccatccatcggccacatgacaccactcatcaacaacaccatgtggcacaacctcaccgccttctagatcagtgtccttctgggcactacagtaccgtgggctcgacatctttggcatcaatgagaaggccaacagcaccatgatcttcaa

SEQ ID NO: 198961 - DNA, 670 bp, Zea Mays
tgttgctggaggggaatggaaactccatcagaggccttgaagccggcggaggctaaaccggcgaagccacggccagtggcgcccacgggcaggttcgccttggggactgcttcgtccattaaaaagcgagctgatggttcggctccggcggaggtgggtgtgccccggtcttccttgatgaagtctacctcgtcgctgaacgccagttcggcgacgagaagaagcagcacggggactgctgggaagcaacaggacaatgggagctcagctgctgctaagaagtctagtcctacgctgtcggatggcgcgaggaagactaaactggtgtcagctcccgctgctggctcaaaaccagcagtggagaagaaaacatccttggtcgagaggacaggtgccgatttggccaggaagcctgctgttaaggcatccccaacttcaacactgaagaaggtccagtcaaagacagagagctccaatggcagcagtggcagcaccaggagagtgtcctccaatgcttctgtgccatcgccacgttccgtcacaagcaatgcagcaaggaaactgggtactcaagcatcatctgctgcgtctaatcggcggaagagctcaaccgcagatagccgtgattcgagattcatgatgctgccacaggtggatttgaaggctagcg

SEQ ID NO: 198962 - DNA, 375 bp, Zea Mays
gcaaaacaatgagctgaccaggtcaaacatgacttttaatggagccggtaccaaccacccaatcaaggccaagggtgtcatgtccactaagctaaccatcgaaaccaagaacctaactatcgcattcttcgtcgccgaagtagaaggcaattatagtgttacactggcaagagattggatacatgccaattattgtgtaccttctaatttacaccaaatgttgatacaatggataggtgacaaagttaaaactgtacatgcagatgcagtagtttgtgttgctatggtcaatccccgtactttagacctatgagtacgccaattgtcttagtggggtagacttttctgattaccaattctttagtgtatataaag

SEQ ID NO: 198963 - DNA, 206 bp, Zea Mays
ggaaccaccatgataactgagcaacatttcacacaaaggatagggctaaggggattggctcaccttgaactacaccatagaatctgacagacctgcgccacgtcgagcgcttctcttcaaacctgtttcagtgggatatgacaggaacgcaagaacctggtatggcttcccttcagagaatcataggcatcgtcatttttataccc

SEQ ID NO: 198964 - DNA, 250 bp, Zea Mays
attaccttttgaacatagccttcgatatatcgaagcatgttgtttgtgtacaggtagtgagtgaggtctggcacaaaaccaaagcggtcacaaacattaatcagtggacgggcatcaggtagttttgcttccatcaaaaagttctttgtcttctcagcatcgtagaagtttgactctctggttacacgttcaacttctttgatctgtccagtcctcgcagctgcttctatgtacttgaaatggatatctg

SEQ ID NO: 198965 - DNA, 200 bp, Zea Mays
ctccatcttgcttgtgcgctgcaatcgccatcgcctccttgcccattctccgcgccgccgcctcctcctccgctcccctccttcttctagggtttctactccatgcgatctcgcggccttggtggcgcgggacagtagggacgccccctctccatcgaatctagagagtcagcgacccaatgggtaagggcgggcaggac

SEQ ID NO: 198966 - DNA, 261 bp, Zea Mays
cacaatcaaaacacaccatctttcgggactgattggctcgatacgagccatgctgccaactctgcaattctgacgtccccattccagcccgcagattttcttttgcatttccacgcttttattcatgcgtctgtatgctgcatcgtaaaaaaattgatctgaaatactttgacagtggcctgtgacgaaactcagcaatcaaaaacaccatctttcggggctgattggcgcgagccatgctgtcacactgcaaagaattct

SEQ ID NO: 198967 - DNA, 479 bp, Zea Mays
caataatcaagtagagcaaccattacaggtttcaaggacaaacagtgatatgccatgcagcttaaaatctggcaacattctatcccatgatgaacatgtaaatgaagttgaagcatcaccacccttgaagaaactggtatgagtcaacttgtttgttttaatgaaatccatttttttcaatatattgcttactttgtctcctggtatcggtcttgcagtcacctattgttgaacatagcccaaagatgaaaaccgctgggccatcaactcctgaacctgccaaacaaatcacagaaaatggggctgcagcttcaggaagaactaagaacaagtcaccacttcctgctagacgacctagccctcagaggcaagctggagcagggacttcaagtttcccagtcacaatgacaagacgtactcataccaagttcataacagagagagagaaaactctagagggaccatcctgtagcccggat

SEQ ID NO: 198968 - DNA, 214 bp, Zea Mays
agcactaccattctagatcccacaccaaccccccaggccatacccctcctctcccttagtagcaccaccattccagctcctataccaaccctgttgctttcttccctgtcttcctcgtcctgccagctatcagcccctcctccatgtcatttccttgcccctaaaatgtatcaatattgcctatgctttcagactggacaatagagcttatata

SEQ ID NO: 198969 - DNA, 258 bp, Zea Mays
atctactaatgtggatggcacaccaaagaccacatgttcttcccccactaaaaaaggttgttcacatgtcattaacttttacatgcatcgagatcaagaaaagacttggatggctagcatggataagtggacaacctaagataggcttcaattttcattggaataccattgtaccctataggagaaccaaaactaatttatttggtagtaggcagatgatggtttagcaaaaaaaatcttataaaattaagagttgtt

SEQ ID NO: 198970 - DNA, 406 bp, Zea Mays
aaaaggtttcctctcgcggggtagaaaggacgtgagaggtggtcattgtttagtggcttatggcagagtctgtaggccacttgagcttggtggtcttggtattactagtttcaaagaacttggctgggctttgaggatgtgatggttgtggttggccaaaatctcccctgacaaaccttggaattttctgcctatgcagttccctgacaaagtgagatctttttttctccacagccatgatcactgatatcgggaatggctcttccactttattttggcaggatcggtggttacatgggaagaaaattgaagaccttgcccctcgtctttttgctgttgttcctaagcgtaccagaaactgcagaacagatcaagaagatagagtggctgatggatatcagcggtg

SEQ ID NO: 198971 - DNA, 313 bp, Zea Mays
ctgtcccaggagctgccagcagcatcagatccaccaactccagcttgtttgtcccatgcagtaccaccagaaccttccttttcagtgtcaacagctgatgatgttgctttcttaccccatgaatcagaatcaccatcagcagaagacaccactttcttaccccatggatcagaatcaccagcagcggaaggtactgtttccttaccccatggattggaatcaccatcagcagcagataccgcttccttgccccatggatcagaatcaccatcagttttcttaccccatcgatcagaatcaccatcagttttct

SEQ ID NO: 198972 - DNA, 316 bp, Zea Mays
cagccgttaccagtgccagaccaagcctggcaagtcattactcttgacttcatagaaggtttaccccgtgctgctcgtgcgaattgcattttggtggtagtggacaaatattccaagtttgcacactttctacctcttcttcatccattcacagcatccaaggtcgccaaagtgttcatgtcctcagtgtacaagcttcacggtatgccagcagcgatagtctcggatcgtgatcgtatattcaccagctccttttggcaagaacttttcaagttatctggcacacaattgtgtatgagcacttcgtatcatcccc

SEQ ID NO: 198973 - DNA, 366 bp, Zea Mays
aaatgacaaatatcttggtctaccttcaggaatgcagtccattttcggctgagttgttcaactcaagctcaaagattcagatggttcctctcctgtgcaactatacttcttcatcaagttctgctcaatcaaaagattctacacgagattactgtaaactagtttgggagacttgcaaaaatgtgacaatagtgaactctcctttccaacctcccttgcaaggaagtgcaagactgcctagttcatcgtcaaagctcacagatgtctggcagtcagaacatgacttctgcacatcatttggtggctcatctggtgagcagtctttatgtttcaatggaaatggaattttcttcaacagcacagaac

SEQ ID NO: 198974 - DNA, 262 bp, Zea Mays
ctgggaaccattggaagtgagcgtgtgaaggcgaggagagcacgtagccaagtgggtctggagtctggactctggagttggtgaccactactagctagctaccacccttctgttctgcaactgacgtactcaagcggccaaggttcaggcccaaccagcgcacaacatcctggtgtttggtgcttctcttgcttccaagcgatgacctgccttgacgtgccctgttttgcggcaaatccgtgtagctcaggactgtctggag

SEQ ID NO: 198975 - DNA, 313 bp, Zea Mays
ttgcacccgacgccactgcaccacgacggtttggccaggtcttcacgcgtcgcctacacccaccagtgcaggaccaggccatcccgaccaagccggctggactggacggctcctgccatcatggctggcagtgtcgatgctccatctccatctcctacggacgcattggatcgttgtctcccacccggcgcggtgtctatctcccaagtgctcaaccaccatcgcatggtcacgcgtgctaaggctggcttccgggtgccagcattgttccacactgccctgtcgattgtcttgtcctctccgtgacatcgtc

SEQ ID NO: 198976 - DNA, 314 bp, Zea Mays
tgacgaaccacttagttctgcgtggaacttatcgcagtctcacccttgtaatttatggcaataccgccgaagaccttggtcaattcaacatagaactaggtctggaccattctcttgctaatgttgttagctctccatcagagggaaagcttgaagaccttccaccagcgctacattcatccaagttgtcatttgaagaatcattatcatcattgaaaccatcgagttttcatgccactgatgtcgacttatcaattgaagcgaagaaagtcttgcatttggctctgaaaatgtaccaaatatctgatgtggag

SEQ ID NO: 198977 - DNA, 236 bp, Zea Mays
aactgttcacaatatcatctagataagctacttgagataggattcgaaaataccggaattgatttctcttttccaaaattttagtttgaatctgtccgactaacagtcccaacacctttctcacctcagcacaaacttcaataacagacccatagacacctctataagctaataagccaacagcaaccagccctctcacacagacagacttttcctttccctttacaacattgtcc

SEQ ID NO: 198978 - DNA, 237 bp, Zea Mays
tttcttatgccgagggccaagtcaagtccattaaatttccttcccttcctttttatattaactattttttagactggatcaaataaatttatatggacttgtatggatcatgccccgggccacggaccgggtggcccggggtttagatctgcccctggctgtgcagaactggaatagttcctttcacgtttcactcgtgatgttagactatccgcagcggttccctccatatcatcc

SEQ ID NO: 198979 - DNA, 925 bp, Zea Mays
tctaacccttgctgttcgctcgctgttcgccccccagccgccaccgccagttcttccattcctccgcgctctttgagccttcgtctcccagtctcctcaactcaggtacgttgtccgcccgccgcacaccctcgccactgttcatcgttgcacgctggtgcttccctcatctccacagaacatctgattcggccagttgagttcctctcggacgctggttgtctccttcgacctccgtttccttgtcatttctgtgcctgacagcaacccgcgctcccgccgcatctattcatggcggagccgacccccaagtcgaagcgcaccaagaaagcgaagaagccctcggcccgggaaggtgatggagaggacatggatacgctcaagtctgacgtcgccacattcgcctcctccctcggcctcctccctggcgctggcgactccaacggcggcttcgatgactccgacttccgcaagtccggccccatgtataaatcctcaaaatttccttccaaacaaccccatcaaaaacctgataacacggcaaacccccatctaaaccctagacctaccaagaagccacaccctctcgagctacgtgactcctatgctgccaccaaacctggtgctgtcaacactaattaccccctgatgaaggcggcagcactctcagggcagtggtacactgatgctgatgagctggaggcgagggtcctaggcggtcgtaagcaggtgcctccagctgtggggcttcaggagatgcagggaatagtggagagaaaacgagagctggcagagaagctcatgttgcagtatgcgagggaatacgatgccgtgaggcgagggcatggtgacctgaagctcctggacatatcagcaaagtctggtacatcagctgacaaggtgtcagcatttacatgtcttgtcg

SEQ ID NO: 198980 - DNA, 807 bp, Zea Mays
attgtcatgcagaggatactgcgctccagaataccaataccatggcaaaatgtcccttaagtctgacatctatagtttaggtgtcataatgctggagctggtgaccgggagcaaggaggagccggacattactaatgtaagtctcactattcagaactacacttaaatctgaaatagttgcgttcacagcattgttaaatggcatcatgaaaaggtacttcgacggtggagccataggtggaaaaaatcaggacagcgtacaccatcatttcaacgccatcaagtgagtaaatgcataggtttggctaagagatgcaaagaagtagaaccaacaagaaggccttctatatgtgatatacttgctgccctaggcaaaatggaagatatgaattgcagtgatcaacaagtggacgaggtaagctcatagaataggtactgtcgtatacattatttttgattatctaatgctacttagctaattgattgattgatgtgcattgtctgctgcctctccatacattcacaggaagtcacttatctggaggacatgctaggaatcgagcctcttgatctgcatttcctagtcgaacctaccaagcagatatcctgctcagtccatctgaccaacgctacgaatgactgtttcgccttcattgttcagacgacgaacccgaagcagtactgcatacagccggacagaggcgtcgttccaccacgatctgagtgtagtgttgccatcgtattatcgcaagaaccgacgcataataagcgatgcagcatggaggacgagctaagcgtgcagagcac

SEQ ID NO: 198981 - DNA, 382 bp, Zea Mays
ggtaaaagtgtcagatttcaggcgtaaagggaatgtccataagtaatgtgaacaatcgtcaagaataacaagataatatttgtaaccggagatactaggaatgggtgatgtccataggtcacattgaataagatcaaagttatttgacgcccgagatactgaagtaccaaagggaagacgaacatgtcgtcctaactgacacgcatgacatataggatccaaacttttattacatgccggaatggcagaagctagtttggagagggcctcgcgaccgtgatgaccgaggcgacagtgccataggtgggatggtgcagcactggcgacaagggagtgagcgacgggcaactgcaaggggtagagcggaccggagctattgcac

SEQ ID NO: 198982 - DNA, 540 bp, Zea Mays
attcatctgcccagggaaatcagacaacttcctccagtggtggtcttggcagcatgatgggtggtgttgttggaggcgtggttggagtagattctggatggaagtttttcaacgaaggctcttctccaatggaggatggtgttgtagtcatgtttattatgcatcaacatgctcttgtggtatgaaccaattacaattttggaaacatgttctgtgattttagtagctagtatatgtgtcatgaatacttataatgagcataatatcatattgttttcatgttaggttagactccgtaccaatattgaccatgttgaccatattgagaccttctctagaccagatggagcacgtgagggctccatcgcgtatgctgcgtggaaatatacatcatatttgaatgaatcgtcatcagtaggtaaagtagcccttctttcatgagcattggcgctttctttaatgtgtatttcaatttttggggactaacatgatgatgctatagatgaagaacgagtgtcatggctagcacttgcatgggac

SEQ ID NO: 198983 - DNA, 448 bp, Zea Mays
ctgcgatgtcaggttgcagaactaccccatcaaccaagttccatagctgcagatactctactaggaccgttacagacaatcctccccgaatatctgacacccattgacgatttgtgagcccctcagctactgttcttcgctttaaagcccttctagaaatcacttggataagggttggacagtgttcaaccacagttttaccaaggagccaacgatcagaccagaacttcacagattcaccactgcctgccactgaggtaatagccacatcaacgagggcctttgcattacggtgcactcggatagggagaccagcccatggccttgacgcgtcagtcttttgtaaccaaagccacctcgcacgtagggcccatccaaacatctccaggttgagaatacccagaccaccatacttgagaggccgctggacagcttcccaggacacgag

SEQ ID NO: 198984 - DNA, 364 bp, Zea Mays
tgtgtgtgctatctcaattgcagcatttgggcagtcgtccacaagcccatttggccagacctcgtttggaactccacagggatttggccagtcttccactgctgccaacaatccttttgccccaaaaccatttggcagcccgaccacagcttttggggcacagaccggaagctcgctctttgcaactacatccactggtgcctttggccagcagcaatccactcccgcatttggcacaacatccactggtgcctttggccagcagcaatccactcccacatttggcacaacatcctcatctcagtttgggagctctacaccagccttcggtgcatcccccactcctgcctttggtgccacatcc

SEQ ID NO: 198985 - DNA, 206 bp, Zea Mays
agggttttgggccggcggggcacacacatcggccgcggaggaggatggcggaggagcaaagaggtggggattcggaggcggcgacgtaaaggaggggagagggagagagggctgtgattgttgtttggggtgaagagggaggaaacttggagggttcagagttgggtcggttcgcttttttcctggggaaggaaaaggatggacac

SEQ ID NO: 198986 - DNA, 207 bp, Zea Mays
ttaagtaccggccatgatgattccgggtgccgaattgggaaaatttctgttttgtcatagttgatctttagtcctgaacatccctcgaacgcattgagaatctctttcagcacctccaagtctgatttgtcagctttaatgaaaactcccgcatcatccgcgtagagggagcagcgaagcttagcccctctaggcagtacctgtccc

SEQ ID NO: 198987 - DNA, 1179 bp, Zea Mays
ggaggaaaatgaaattggagctctgatccggttttctcatcagggaaaggtatgccttggcttaacaggtgttttttaattgttcaatatttttttctacttgttactaatgtgattaacatcctcttggtgaagttggtcaagcaatacgttggatacttcccgtatgtcaacctatctgcaaccgtgagcccaatcactaggacagttcttaaagtaagagtttgttccagttaagtattgtgtgccaattagaattttctatgatatgctcttatgcaaccacttattgtatttctgtaggtggacctgcatataactcctgaatttgtgtggaaagatcgttatcatggcatgtcagaacgatggtggatcattgttgaggtgtgtgattacatgtattgtacttatatcagaaagatggtgcaaaatttatttcacctgtctttcactaaatttattatcttgttgccatgccttttttgaggggtcaagagactgtttcctcttttctaatcttctttatggggtcttttggtatgtaactgaacaatgcaattatatttgctttgcttctaactttgtgaggagacacatatagacctagaaagattggtagtaaatgcatagaaatgtcattattttcaggaacctcttatataaaatgcgatgtgcatgcaattcttttaatggtcatataaatttgcacctttttaaagattaccaatttaaactttttgtagttgattcctatcgcaggcatgcagtggtcagtactcagtaacattaacattttattttacaggattctgaaaatgataccatttatcattcagagctattcacattaacgaagaagatggcaagaggaacacctacaaagatatcttttaatgtaccaatatttgaacctcatccgccacagtactatatacatgccatctcagactcatggctacatgctgaaacactcttcactgtttcttttcataatttgacattgccacaggtgaatcgaacaatcgctcactgatgctcgttaatgcttattttgattattgtatactgaatgctgcacccattgcccatgcagacacaaataacacacacagaactcttggacttgaagcctcttccactgagtgctcttggcaacaaaacgtatgaggatctgtacag

SEQ ID NO: 198988 - DNA, 429 bp, Zea Mays
cccgagaccaagatcgcgctcttgtgagaagagacgatggtccagaagaccgacgggttgccgtgtgcctgcagctgcttcttcctgttcaggttgtccaagaacatcaggtactggctgtacgctcggtccgaggggcctaggagcggcatgtctttctcctcgagaggcttctcgtaacccttcttcatcatggggttcagccaccagaacgtcatgatgctgaaaaccccggctttagcaaacggggtgacacgcgagtcggccgcaccgtcgtcgtgagcctcggcgttcagaggcttatacaaagaactttcggttcctccgttaccatctccttcttcttcttccctggcgtgccgaatgccgtacacaaggagcagcagcgcaccaggcagggacagaacatccaagcacgtcttcacggcc

SEQ ID NO: 198989 - DNA, 250 bp, Zea Mays
caactgttttaacgagaatatataatattacgataatctctactactctacaagactctaacgtagaccatctgtgcaccgtaattctgcctccctccttctcgccccctcacacaagcctcactgcctccgaaatgtcgcccacgcctcggccgccacacgcagccccgaaacctcgtcgtctccccggtcctcggcgtccccggtcctcggcgtccagacatagaattgaaaaaacatgaaacagtta

SEQ ID NO: 198990 - DNA, 282 bp, Zea Mays
cataaaaattccattgctgagtcgctgtggctcccaaacaaataatgacagggtgccgacctatggtaacggtgtggtccactctgtatttggtggtactggcagtgatcgcctgcccaggttacggtgagcctctatagggagaggccaaggttagggtgttttctcatccggattctctgaggtttctgcttaggtggcgtttggatactgggaaatgaggggagggaaatatgctattgctatcatatgtttggattgttggaatgggaaatgagaaag

SEQ ID NO: 198991 - DNA, 331 bp, Zea Mays
cctgactcggtgaagaaaaaattggctcatgcttcacaggtgacatcctaacactccttgatttctcttctcttgcagggcctaacttttttccaaaaacattgccaacatgagaagaaaattttccccgaatacctgctttctcagttgggactatatgtgtagagagagatttagcagaagttctatgaagtggtgttcgctgtccttcatcctcatcttcatcaaaacgacatgctcttctcttaggtttcaccaattgcctatcaacacgtgaggcatcctccttcatgctggaaccctttttaacagaatcagcaacagttgacag

SEQ ID NO: 198992 - DNA, 327 bp, Zea Mays
tttgtagtttcccaaatctgtgattttgaggcactatgtggtggttttaaataccccctcccttttgtggttgaaccagttaatattttttcgtgagctgactgagctctcaccaaatatgtagttgcattgtagttgtaggtattggactatggctgtatcgaattatttagtgacacatatttgctatacacagagatgatttagggggcgtttggtttatggaataaagtggtctatcatcattcattctttagttttttatttgattgtggaatagagtgagttgatccatcaccacataatttccttagaagctaatagtta

SEQ ID NO: 198993 - DNA, 1276 bp, Zea Mays
gacaaattccttattgctataaccgtgcagcatagctgggtatatatggccgtcggccacctacaaatggagcaagtctccttgattttctctagcctgattgattgcttctttcctattcttatccctctttcctaatctcagcccctgctatctgtggctgatttgcagcacctgattttagccctctttcctaatctcagccacttgccattggtggctgatttgcagcatgcgctgctgcctgctctgcggccgcgcgctcggttgctcgccggacatcacgcgcgcgcctgcgcctagtgaatgtattaccgtacatgacatactttttctgggaagcaaccttttggaggatgttattcctgattggcttacaaactgttctaacttagtccaactagatctctctgaaaacaatctcaccggtcatattccttcaaacatagacattctaaaaaagctagaatatataggcctttactataataatctcaccggtgtcatcccaccaaccttgggaaacatctccacactagatgtagttgatctttcaatgaatcaactaagtggaagcattcctgatgatgtttggaaaatatcgaacataacacagttatttctacaacaaaataatctatcaggcggaatcctagatactctctctaaattatcttctcttgtgatattaaacttgcacaccaatatgttgggaggcacattgccatcaaacattggtgatgtgctccctaatctgcaagaactatacttaggaaagaataattttgtgggtacaattccaaattccctaggtaatccttcgagtcttaaaatcatagatctatcaataaactattttaggggcaaaattccgaactcttttggaaatctttcacatttgcagtctctaaaccttgaggtaaacatgcttggatcaagggatagtgaaggcttgcaattctttgatgccctcgcaaattgtagatctctcgttacactttcagtgtccaataatcagctacatggtcctataccaaactcgattgctaatctgtccactagtcttggacaactagtgatgggttggaacagcctatcaggaacaattcccccaaccattggaaaacttagtggcttatatagattatcactacaaaacaataatcttacaggtaccattgaggaatggatcggaaagatgacaaatctacaatttttaacactacagtcaaacaacttcatagggaaaattccaccttcaattggcaatcttaca

SEQ ID NO: 198994 - DNA, 347 bp, Zea Mays
ttagacctcaaaagaatggaaataatgatgctttcacatgattgctgtcctttctctaagagcagcaacataaaacaacaaatcttggtccgcctttgatacagctttcttaatcatatatatagtaaactaggaaacagtgaagcgagatcacctgctcttgcgtccgaagaatcgcaatcgaagctacacaaaatattatgccacagttcagatgccccattacccacatagagcccaatatgaacatgtgggccgtatcaacaagcatgtgtgtactccagcccaataatgaattgtacaatataatcatacagcagtatggcacaaccactgaacatgtggtt

SEQ ID NO: 198995 - DNA, 1239 bp, Zea Mays
gaccttttcaatcattttgattctttctttgagagttatatcaaatcaaggaaagatttgcatcttgaagataattttcttgatgtggatcccccatttcctcgagaagcactacttcaaattctccgtgtatcaaaacttatattggaaaattgtacaaatagacacttctctagtttttttgaggtcagcactttatgcgtgtcctgtttatctgcagtcatatttgtttttctcctttgtatttattttatataagataacagcataactttctggtttccttcatttccagtagtgtactgctaatttatgtatctttttgttacagcagcatctgtctgcccttctagcatcaacagatgcggatattgttgaagcaagcttgcagacattaatggcatttgtagacaagtcagttgggaaaagctcaatacgcagtgcatctctcgcttcaaagttatttgccttatctcaaggctggggtggaaaagaaggtggtcttggattagtagcatgttctctacccagtgtatctgatccagtttccactgaggttggatccacactccattttgagttctatcgtgctgctgataaatcagagaaatcccagtgtctagagaaagagaacaagttggaagtaattcatttatcgaatgtcaattcgtgcaaggaggcagatcttgaaatattggacaggttggtcaaggattacagtgtgccacaagctttaaggtttcttcttcttacaagactgagatttgcaagggcttttgactctttaacatgtcgacaccagtatatctgtatccgcttgtatgcttttattgttcttgtccaagcaggccatgatctggaagttgtatcaacatttttgaacaatgaaccagaattcattgatgagctgttatcactacttagctatgaggatgagatacccgaaaagattcggatactgggagtcctttcattagtcgcactgtgccaagatcgacctcaccagcctactgtattgtcctcggtaacttctggtggtcatcggggtatccttcctattctcatgcagaatacagtggattctatcatcaatggttctatgaaatggtccataatatttgctgaagcacttctttcgcttgtatctatgctggtatcatcaacaccaggttctctagctctacaagaagcaggttttataccaactattttgcctcttctcaaagacacaaacacgca

SEQ ID NO: 198996 - DNA, 721 bp, Zea Mays
tgaagagaggacattgcagctgaagtctttgcataataactttggctgtcttcaaacagcaggcggtgagctttatcaggagatcaagatgatgaacaagaggcttggagacatagaaatggagaacaagtaccttggcaaagaactaagtagaactatgagtgtttatggtggatctattgtgcaaacagcaacaggaaaaggaaatccagggcgaagagatgccaaccttctgaattcaaacaggaaaatccaacaagattgtcatgtaaatctggaggtggaacaagaggaagtttgcaatgctgattttcaggagtcaaatgaaacactacaggatgaggtccgtaagttaaggagcgaagtggaaatgcttaggagcaaggagaaggctgtgttcaacatcaaatcctgtgatgaagagatcatgaaattgctggctaacatgcaaatggctatcatgaatgcagctctgttcaaagagaaggttcttgagctcatcataacatgcgagagttttgagataagtgccatggtacagaaggaggttctgaaggaagaaatcatacaaagaaattcatatgtagatgagctgaaggacaaactaaatgctgttgagattgaaaacagaagactgaaggtcgacctaaatggtgatttcacaatgttagggtcattgcagactgaagtcagtgccctggaggagcaaaccttatctctc

SEQ ID NO: 198997 - DNA, 278 bp, Zea Mays
tgatagggaggcgccgaagcaggtcgtggcggatgtgggagagagggaggaggaggaggaggaggtgagattggaggcgaagagtgagggcgttgcgggtccagaggccgagaacggaaaggcggagggtgttgtcgtcgggggacatgatggcagggatgtaaatgaggcggaagaggatcgtagagttgggaagttgggcgccgcgacggccgtgaaggatggcggcggcgaagaaccggcgtcggaggatggagaggcggccgcttctgtgtcag

SEQ ID NO: 198998 - DNA, 351 bp, Zea Mays
cgatcagctcgagccagctgtgcgcgagtccccctggccgcgcgttcctctgctcggcgtacgtccttggcccggcgcctcctagtgtagacttgtccccacatgacatctccccctccgtcgagacccagctcgtccccgagctggaacgctagatgcttggcacggaatgtgtcgatgtcctcccaggtggccgatgcagccgattgacctttccactgaatcagcactaggcgcacaccacgtgcaagacggtagcgcaccgctcgttccggctccggaacaaccgcgccatggtgaattgtcggtagaggtggaggtgctgctggcggtgtcccatggaatttcttg

SEQ ID NO: 198999 - DNA, 246 bp, Zea Mays
ggtccttttattggtgctggtcaatgcttaagtgttaagtcatcttgaaagttgaaacacacacaaaaggttccttaggtagcccttccgttggtggtgaaagaattttttgtgggaatctgttgcattctggtcacaacaattttacaggtcatgctagattcattggatcaacgtaacaatgccatacttgctgaacctgtgactctcactgtggttctttgctaggtccaatgaacaatgtcc

SEQ ID NO: 199000 - DNA, 326 bp, Zea Mays
ttctaccattattcacaatttccgaatgcaagcacacacacccaagaaaacacacaggaagtgatagcctaatcacactgcttattatactagtctaatgaggttggttatttagtaatattagattagcagcgcaagtattagaaatggtaacatatcaataattgtgtttcttgtcaatataacgaatcttgctaagttaacgttgattgaagctaattcacttactagacttcaacaatttaattcactacttagggaggcgtgcactagttacttatatatatatcctcaattatattagttactatcattattacttcgtt

SEQ ID NO: 199001 - DNA, 265 bp, Zea Mays
cgggtatgcgcgaccggtctctggcatcgcctagaattcaacccacgcatccacacgcgtatgcatatgtaatatatatgtacgtgtccatagagtatttgtttgaacatgcatgatgcatgcatggataaagcatgttcgtttgagagctagctactggtggtagagctagtctagagcttggtctttgtgatatgagggagagattttgtacaacatcatcatatcatgtttgcaagctagatccatgcatgtatagtactcc

SEQ ID NO: 199002 - DNA, 415 bp, Zea Mays
gtcgaggaccccaacgtcgcgcggatccgtgagtcccttcctcccacgtatctcgcctagttaacaacagtgcaattcatggatggagctgactgctgatttgtttggggtagctttggatgggggttttggagtcctcggtttgggggattatctcttgttatcctgctgtgattgcccattactgcctgcagtgcgtgctactgagtactgaggatgtcctcagtgttggactccaacctcggggggggggggggggggggggtcatgtgctatttgctaatgctatgtacgagcgcccatacttacactacctaagatttagggtttttctggcttgtggtttggttcgattcgtgtgatgggaaacacaacagtccttgacatacgccctgtttggtttgccttatgccta

SEQ ID NO: 199003 - DNA, 216 bp, Zea Mays
gtcttaaggaaggtgtgggatttgtccgaccaggataaggatgggatgctatctttcaaggaattttgtattgctgtgtacttaatggagagacatcgagagcaccgtcctcttcctgacacagtaacagatgctatttgggctgagggcaccgcactaccctctactggacagtttgcagaaaatcctagtgcccccgctcctcaagcaagtgcc

SEQ ID NO: 199004 - DNA, 229 bp, Zea Mays
aatgtttgtttaacatttcagtttacatactcttgaccacctttgtttcttcatgatccatgagcgatcgttccattcctcacatccttaatgatctcatcgtttccatataacttccctcggtaatgttttattttacttcaaccattctattggaaccttacctaccttactcgtgattgttttctccatttcgccattttgtgagtcttgccttaactccatcctt

SEQ ID NO: 199005 - DNA, 532 bp, Zea Mays
gctgcactgctgacagaaccgatgctctacattattgatgcagaccactgttgtcctggtatgcgcttcacacaccttgtgcctcttatggtagtccctggcaccactaagatcagcttggcagccgtcaacctggcaagaaggagtggtgctcgaattggcacctttcctgggtctcgtctcctcagtgttccgccctctctgaacacacaccacgtgactgttgtctccatctgctaccgcagaattgctgcacccaccgctgccgtcctcctctggtgagagccgccgcctcttgtcaacgacgacgccgaaatcgatctccccctgacctcggctcagctccctgctgatggactcggatggcgcggcggccgctggtgtggccaggaacaggttggcgtcccacctccagtcgttcaaatcccagtcgaggctcctgttcttgttcccaccggacattctcgccgcaccggcttggtcaccgatctctttccacaggaaaccggcttccatttcctcggccttctct

SEQ ID NO: 199006 - DNA, 276 bp, Zea Mays
gggtctgggcaccgacggtgtggagattggcagcgcggcggaggaggctgagggctggatggtggtggatggagggcctgacatatccgatatcagattgttagggatcgtcgtggtgctacagtactgtgggtgcgttcacaaggtgggggctgcgcgggttagagggcgacggctagggttaggggcgccggggataccagccgcaaggatttcctcatggccggcaagagagaagggattttcttctaatctcttgcttaccttcaattgata

SEQ ID NO: 199007 - DNA, 248 bp, Zea Mays
gtaaagtgataaaaaagatgactacacatcctacagacttgaagaggttatagacagatggacatattagcatctattcatgaatattaatagtgtatcgaataatgaacgtggtttgaaatatgcagggaacacatgcaagctaatgcagtccctcacaaatctaaaactgctttatcaaaaacatacagcaagctagcatcaaatgggctattggccacctccatgaatgccaaagttgacacgaa

SEQ ID NO: 199008 - DNA, 636 bp, Zea Mays
cgcttacgagcactgctgaattctaagatgttgagtagtttatatgttctgaaacaaaaatagcatcatgacgttggcaacgttgacacttttaaagaataatcactaagaacagtggaaatgataagcacctatcaacctttccaccaacgacaggatcgtactcatgcactgatatagttgtttgtgtcctatgataaaattcaaagccaaactctcttgcagctgtaacaagagctgcttcatcaggagactcagcttcataaggcataccagcagaatttccatctgccacaggaatcgcagtatggcaaacagctaagactcggaaaaacatttctatagcatccctagaacattctttggcccatcttccattcatcaaatgactatcagtgaaattaaatcccttgactgatctcttgaattcagtagtgtccttgcgcccaaaactgccattagtttcaactatttctccataacacgtttcaacttctgtaggcctacttccataagcaacaccagcaatggaacatttcaagaactccattgaattgcatgttaatgtccctgttttgtcagacagtatagtatggacttgaccaagttcttcattcaaatttgaagtgcgagctc

SEQ ID NO: 199009 - DNA, 698 bp, Zea Mays
caggttgtatcagtttatcttgcctcaggagctttgttaattaagaatttgacatcattggcatatggcgtcccagaagagttgtcttctgatcactttctcccaggagattgtagatggggtgcctttgtatgtttcatcaaactgccttcctgtaaaagctttgaaatatgaacctgctggtcattcgttccatgctgcggcaatgaagcttcttggtcttgtggagcatgaagatatagaaactgatgatcgcagcgtttcatcggatgacaaaagccaagattttaatactgcttctgatacctttagcagcaaagggaagaagaagtcatctggcagtcaacagcaggaccactatgctttgcttgggttggggcacttgaggttcttggccactgaagatcaaattcggaaaagttaccgtgagatggctctcaaacatcatccagataagcaggctgccctgattcttgcagagacaacagaggaggcaaaacaagcaaaaaaggatgagatagagagccatttcaaggccatccaagaggcctatgaagttctcatagaccctacaaagaggaggatttatgactctacagatgagtttgatgatgatgtcccaacagactgtgccccacaagacttcttcaaagtttttggcccagccttcatgagaaatggacgctggtctgttaccc

SEQ ID NO: 199010 - DNA, 473 bp, Zea Mays
agacgatgactgtattggacctcattcggaaaagctgatgcggacatgtagctctcaagtgacaagtaacacagtgaagcaagaaaatcctattgtagcggttaaggcaaggccagctgctggtactttggttgtttgcccaacaagtgttttgcgacagtgggcaggagaactgaagaacaaagttacaagtaaagctaatttatcttttctgatatatcatggtagcaatcgcaccaaggatcctaacgaacttaccaaatatgatgttgtgcttactacatattctatagtaagcatggaagtaccaaaacaatcaaatcctgatagtgatggagaagagaaagggaagcctgacccgtatggtgcacctgtgtcctcttcagggagcaaaaagagaaaggcatcctcttctaagaaaacaaaaaataaaagtgttgcagagagttgcttgcctgaaaaacctcttgcga

SEQ ID NO: 199011 - DNA, 756 bp, Zea Mays
gggaacggcgttgttcacagaggaacagggccggcggttgaggaggtaggtggcggtgacgagcgcctcggcccagtaaggaggcggcatgtgggcatgtatgaggagagtgcggctgatgttattcagcgtgcgaagtatccgctctgccttgccgttttgctgggatgtgtaagggcaggaaaatcggaaaagaatgccacgagatgaaaatagagaggtgagagtgtggttagcaaattcagtgccattgtcagcctggaaggattttattgtgacgccaaattgggtttgcacaagagcgcaaaaatcagtgatgtgagaggctacttcagatttgcgaataagtggaaaagtccagcaaaaatgagagtaatcgtctaacaaaaccaaatagtactggtaccctgatatgctagccacgggagacgtccaaacatcgcaatgaatcaaatcaaagggtgcagaactgcgtgtttgagaaggagtaaaaggtagtctcacatgtttgccaagctgacaggaatgacatagaggtggttctactttattacaagaaatggcggaagtgtttctaagagtatttattgcagtagaagacggatgaccgagccgagagtgccacagggaggtggtgatggcaatggaggcgtacggcgaggtgtgggtggcagctggaatggtgtagaggtccccatcactatcgcagcgaagcatcacgcgacgactcgccatatccttaacagaaaaaccaag

SEQ ID NO: 199012 - DNA, 451 bp, Zea Mays
catctgttgccttgagccttctagtcacctcgatcgagggcgtggagatgttgaggagagtttcaccggagatgacaagttgcttataccttgggcgtgtgatgtgtaggtactttgcaaccaccttctcgtctggctctaggtcactaagagttgctagatgttggacgatgttggtcagacatagtcatatagtgtagtcctcaatcaattcaccatcctggatcgcgatcaactcgtaagtgcgacgttctgtgcggctgccttttgcacccggtcatcgcaactgcaagggttcttgacggcctcccatgcccccttggccaatggcttggtcgctagggtgaaaatcatctttgggggaaccccactatagattgcctctagcgccatccgatcatcgtggaactcgacatcaccatgcttgatggcgtcccgtagatgatgagct

SEQ ID NO: 199013 - DNA, 441 bp, Zea Mays
gccctcctcgcatcacccgccaccgcgtcttctctcatgatgccgctcgctctaccgctccttcggcttgccactacatcgtcgtctcgctcgctcctcgccaacgctcactgccttgccgctgctcgcaggcttctccgctcgctccaccgcctccgccacatcctcggctgagaaataaagaaccctaactccccccgccgtggtggccgcgcaggcccgaccggcaccaatatcaaagatcttgcggtcgtggatggcgtagggtgtgacctgtactgggggagacggacgttcgacgcggccgccgagcagacgctgtcgtactggaccgtactcctctcttcctgtgctcctccatttcaattccatggctccgcctccgtctaactaattgatgatgaaaattggttcatcagtctcacggtatcattaaatttg

SEQ ID NO: 199014 - DNA, 369 bp, Zea Mays
tgccatgagtttctctgacatggggatatgtcagctccaaggaaaatggtgcacgtgagggagcaggaagacgtccgattggcggtgagaatcagaaacagctgaagaaagaagtgttgggccgccgtgtgcctaggcccagtgggcgatatccatcggacaagtggtccgtgtaagagtgcaataaggaatacttaaactaagactggctacagtgaacgctaggaaatgagaaaatactattgctctccttccatctcctacctctggttctcctctgtaccgtagctgtagtaggctgttaacaattggtatcggctagggtttcctcgatctggcgtactacacacgcagcaagcagatggcggc

SEQ ID NO: 199015 - DNA, 268 bp, Zea Mays
tgcatcttcgcccatacaagcttcagggttgaaattgccccccatagacaccctttcggtatactgagaagctgttgtcatattttctagaattctataactactgaccatctgataatgtctgggtgatttttctggacaatcttgagatgtgcttatgtattggtcaaaattgaccgaggggtgtcgtgtgtgatctaccgagctggttagatgaggcaataactggtttgttcgaacttcttctcttaaatcaaaattgaaaaat

SEQ ID NO: 199016 - DNA, 304 bp, Zea Mays
gtcggagctcaggttaggcgacggcgaggatggtcctgatcttgaagaacgtcaaactgcacacgagaattggtcgcttcatctgccatccatcgggttagtgtttggcccccaccgttctctgatttcgtctatcagtaatgttgtccctaagaatttcactacatacctaggcgtagcagtgtttgaattttatgactgaaattacacgaggatatgcagcacaggtgttaaattaaaacaggctatatatataggaaaatctgatttcagtgtacacacattttgctgcatatttctattt

SEQ ID NO: 199017 - DNA, 248 bp, Zea Mays
ttcaatggttcccatccaaacttggtggtggtcgttcggctggccagggaggaagctttcttgtggtctttggctagggctaagggtttttcttacctcctagctcaaagttgggtggtttagttttctgttttagtgttggggtgtctgtcagctgacaaacgctctgtccctgcccctgctccagatgttgtttctagctgggtggggttcggtgtgtgtgtgggtgtttgtgtgtgttgtgtgtt

SEQ ID NO: 199018 - DNA, 364 bp, Zea Mays
gcatcttgctagagatttgatccatcaacttgagattgcgcaggatggtcgtattctgtctgtgttggaaaggtggctgttaagtaaactgaagaagctcgctctggctttggcctcaaccaagcgtaccattgcccgccttagatcaagaatttcttggctcaaggaaggagatgcaaattctaagttgttccattcctttgcacggtacagaaagaagaaaaatagtgtatccaagcttactgttggaaatcaagtccttactgctcataacgacatagctgtagcagtggatcagttttactttgatttaattggggctagtaaagacagaaatatttcgattaaccttgaggctctggaa

SEQ ID NO: 199019 - DNA, 865 bp, Zea Mays
ggaattcatatcacaatacaactggtgcacatcatcagaaaaacactagcttttgctaactaagacacatttgtttgcttctgttgcatttttttttgcaatatgtagaacaaaaaacaaagcaggatgcagcatcaaatggtcaaaacagtcaggcagttgaacatggtttttaggaatttgaatgctgattgctcactagcgtcatatctattgtttttcctattcagcgtgcaaaaatgaaggagttggctgcagaacgtgcaaaaaagttgaaagctgaggaagaggaacggataaagaaccaaaaagcaaaagcgctcgcaaagttggaagaattgaacaggcgatcatcagtacttcagaagaaatcaaatgatataaaagtagaaacttatgatgcacatgataagcaacatgctggacttgatgtgactgctaaacttgacacttcaactgaaccacatgatgttattgcgcctgataggcttactgatcttctgcctcctaatgatcccaatcatactatggttcatatacaggcccagtctacagcacaatcacatgctttagatggtggcaaagaccctgatgctcatgcaacctcgtctttggtcaagaacactcacagcaacatggagcctgttgtgcagaagagtatctcgcagttgcatgacatcactgtggtaaaggccaagcaagggtacaggaaaagacatgtgtcagaagagaaaatttctgatgagaaggcaagtgcttcaataaccactagaaatattacgaaaaatgttgatgttctcatcgacacagtgacggctgttgttgcaccacatgatgatccacctactcagaacaagaagggaac

SEQ ID NO: 199020 - DNA, 291 bp, Zea Mays
atttgggactgctttaaatatagagacacttgttgctgccgcggaacaaagagatacaccaattgaggttggttttgttttctgagtttcctcttttgggttaatacataactcatcccgtgctaatagacttctcttaacctagacacctccacctgaagttcaggacaagattctttttatgatcaacaatatatccatctcaaatatggaagctaaggcaaaggaatttaatgaggtcatacaggaacagtattatacttggtttgcacaatacatggtcatgaaaag

SEQ ID NO: 199021 - DNA, 390 bp, Zea Mays
gtgtgcctgaaaatagtggcgcaacttcctggacgcaacaagtacaacatagataagcttgtgcgtctcaaggtacctggcctttgcctcatggaggacctcgctgacgtagtagaccgacttctggatggttcggacccctatggttggtcccgggtcctcaaactcctggccttccgtcaacatcgtggtggctggaccaccaccttctcctaggggaacttcctgactcccctggggatgttgtgccgtcctttcggcgaccagcaccatgctcaccgcctctgaagccgctgcaatgtataagtacaacagctcccccggctctggagctaccagtattggcagggacataaggtgctgctttaactcttgaaaggctcgttctgc

SEQ ID NO: 199022 - DNA, 627 bp, Zea Mays
atttgagttttaggatttgaagtttggtgtttaggatatggagtttaggatttggagtttaggatttgaggttttgtgttttgggggttgggttttagttttagggttcggggttccggattcatggtttagggtttgggtctcggggtttaggattttggggttcgaggtttagtgtgctatagctcactggatgctaaaaacatccttacctgtttcagtggccaaaacatgggtggtggacgggaggaatgaaattgttgttcgacgatgaaaacatgtgtcgcgggaggccaaaaatagccttaccggcctccggggccaaatgcgtgtacaatggttcggacactagtgtactatggtttggacactaaattggttgttcggccatgaaaacatgtgttgtagctcacgcgaggccaaaacagccttactttactttttagggtttggagtttggggtttagagttttgtgttttggtggtcgggtctttgttttagggttcgaggtatagggttcacaaattagggtttggggttcaatgttcaggctttagggtttggggctcggggtttagagattaggcttttgggattcgagatttcgggttttgatttgagggtta

SEQ ID NO: 199023 - DNA, 324 bp, Zea Mays
cgagtgaagttggaaaaagttccagttggtgaatggttttgtgaagaatgccagcttaaggaagatcagaacaatacaagtaactatggtatctcggtggttaatgtgacagaaggaaagaaccaaaggacagaaagtcgaagcaagcctaagacattgcaaattgttgtgcctgattttgatgctctggaagtcacacacagcgcattgacagctgatcggtgtgatggtaacagtaaaaggttgcatttagcttcgactgatacacaaacacggcaactaaaggataccaccccagctgctcaaaggttggatgtgaagaac

SEQ ID NO: 199024 - DNA, 284 bp, Zea Mays
gatgagttggctgcttatgaatctagaacagatcccttgtattacaccatgcgatttattgatgggttacgttcagacattaaaccagtggtcatggttcagcgtccttccgatctagacactgcctgtgcgcttgctttggtgcaggaggaagcggctgatgctacacgccctcgacgacatgagccatcgttccaccggacggctcacaggacttatcaatcatcctctgatgacatcaagcatgagggagcttcttcagatgctaagtctggccatatgag

SEQ ID NO: 199025 - DNA, 605 bp, Zea Mays
ccaaggcttgggaagttgatacgttgaggggccacatgaataatgtgtcttgtgtgatgtttcatgcgaagcaagacatcatcgtgtctaactcagaagacaaaagcattcgtgtttgggatgccacaaagagaactggcattcaaacatttaggcgggaacatgaccgtttctggattcttgctgctcaccctgaaatgaaccttcttgctgctggtcatgacagtggcatgattgttttcaaattagagagggaacgcccggccttctgtgtcagtggtgacacagttttttatgtgaaggaccggtttctaaagttctttgaatactccacacagaaggaagttcagttggctccaataagaagacctgggtcagtcagcttgaaccagtcacccaggacactatcgtatagtccaactgaaaatgctgtcttgatttgctttgatgctgatgggggttcatatgaactctacattgctcccaaggattctgctggcaaggctgattacttgcaagaggcaaagaagggagctggtggttctgctgtatttgtggcacgcaacaggtttgcagtccttgagaggagtagcaatcaagttttg

SEQ ID NO: 199026 - DNA, 485 bp, Zea Mays
cctgaagaaggcgaaggatcaactggcattcatcctcggagagagggaccgtcttgtcggggagctcaacgaggccaagagagtcgctgatgagactcacgagaagctccaggatgccctcatggccaagaggtgggccgaggaggccactgagatcgagaagttccgggcggatgagctcgagcaggcaggcatcgacgaggcgcagaggcgggaggacgagtggcagagggagattgagtgtgtgcgtggccagcatgccgctgacttggagagtctggtcaacacaacggaggaggtggagaggctcaggcgtgatctttccatggcgaacgaggccaagaaggctgcacttggccacgccgatgatgcaatgaagattgctgaagtcaatgcagagaaggtggagattctctcaaatgaagttgttcgcttgaaaggcttgcttgattcgagtgctgccagcgaagagagtaagagccgtg

SEQ ID NO: 199027 - DNA, 325 bp, Zea Mays
gttgataaagagagtgagccacaagtagacaaggacattgtggattcaggaaaaagacatggggatgcgggagcgcagaaagctttagatttggtcaattcacacaaagagaccatcacgacagctcaggaatgcactgacatggtttacagtgaacatatcctggacaaaaacagaatagagaagcaaatgaattcacatgccaaagaagatattaatcaagacctaatcttgcatgaacaaaatgatgagaaaacaaattctcatgaggcggagactcctgtagctgagtcaggtgactgtgattctccttccaaagcaattg

SEQ ID NO: 199028 - DNA, 231 bp, Zea Mays
ggaattccctattcagcagcatgtcaggaaattctttgcttcttcagttattaccttggttggtgatgggtctaatactctattttggacagataggtggttggatgggtccagtatcaaggatcttgcccctgctgtagttgcgaatgttgggacaagggctaggtcatcgagaacggtggcccatgctcttgagaactggcaatgggtcagcgacatagagacccctct

SEQ ID NO: 199029 - DNA, 218 bp, Zea Mays
gtacgagacgagagtgagcaggggagggagttgagctcggcgtccattttatagaggagggaggagatgagaggtcggctgggaagagatgtatggctggcggtttcaggccattgatggcattcacggagcttcaatgagggagagagaaacggatgcattgaagttcataacgcaggagagaaacggacgagcggtcgaggtcgcttgcggttcag

SEQ ID NO: 199030 - DNA, 605 bp, Zea Mays
ggccagcctgggatggctggaggtggtggtggcggcatgctttcttcacagtcgcccttctcctcgcttgtctccccgctcacacagtttggcggcaatggtcttcttggaggcgcctcgaatgtctcctccctgctgaaccggacgacgttcaggaatggtggccctatgccaggtccggggtcgatgcagggtggtgggatgcagatgagtacactccagcagagagctgggttggatggtgccagcgatttcattagcacgggagggtcagaccctctctcattcccgtcttcctcacaggttaatttggtcaatcagatgggatcagataatctgcaagtgacttcacagcagcaacagcagatggatgcagtgcaggatatgcagcagcagcagcagctaccaatgtcttacagccagcaacagttgccggcacaacactcgcagcagctccagcagccacaggctacagtgaagttggagaatggaggaagcatggttagcatcaaatcagagcagcagatgggacagcctgaacagaatggtcctgcccagatgatgcgaagtgctggttgtgtgaaacttgagccacagcagttgca

SEQ ID NO: 199031 - DNA, 352 bp, Zea Mays
ggaagatgcagagggcagagcgcggggcaagtttgtggggagcagtggccgacaaattggggtaacacttacagccaaaaacacgcagatgatcgtacgacggggcactgccaaagagagcaaagtgcggagtggaaaactgcagtgtcttggttggcaagatgtttaggaggagagttgcagtgtgcaacgcttcagcccaatatgaaggaggcatgcttgcctgaaatagaagagagcgaataatatcgttagtggtacgaataatccgctcggcgcgaccgttctgcgaggacgtgtagggacatgacatgcgaaagtgaatgccatgtgtgaggaagaaggtgcgcat

SEQ ID NO: 199032 - DNA, 528 bp, Zea Mays
cgtggtccgaccgcggcggcctcgacgcgcccatcgccaacggcaccaagctgtacagcctctcgctgtcgctcttcaccagggcatgggtgccaacggcgaagccggctcactcgcacaagggtggcagcaatgacccgcaccacggccacggccacggccacggtgacaagaacaagaagcacccggcggcatccgcggcgaggaggggcctgtttgacgtgaccgacgacgagatggtgcggcggatggcgatcgaggggccagaggcgacggtggaggtgaataccgtggtcacggtggaccagagtggcgccgggaatttcaccacgatcggggacgccgtggctgccgcgccgagaaacctcaacggcagcaccgggtactacgtggtctacgtgcttgctggcgtctacgaggagaacgtggtggtgcccaagcacagcaagtacatcatgctggtcggcgacggcatcggccagaccgtggtcaccggcaaccggagcgtcgtcgacggctggaccacct

SEQ ID NO: 199033 - DNA, 510 bp, Zea Mays
gagttacttaagtaagttagacataaattaggccctgattctataaacatatcttaccctaaattaatgccttggactaactcatccgtaaacaacaacctaacctacatcataggttgcctaatccagatatcctaaaagcaaagtaaaactctgtttaaatctaactacctcatgtaccctagctatcctagctatagccatatgtcctcaactcggatggcaactctaggaggaaggccaaagaagaccaacatcgtcaaggaaggagaaggagatcaacctcgacatggaagaatacgagtcaaatcagatctcgagataattcaagattcaccacccaagatgaagtctttgcttattatactcatccttgccacgacctatacatgccataaccgtacctcatctgacctaatagatggctagacatacaatatccatgtgttccaaatcgtctactaaccgttatgtaaaaacttgaacaaaactttgatttccaaaacccaa

SEQ ID NO: 199034 - DNA, 513 bp, Zea Mays
cggaggagcacctgcatggagcggtaggagaggatccagtccgagctcgctctcgtgcgtcgaggagcacgggagaagaggatccacgtagaaggtgttcctgcccacctgctgtccatggcgtgcgtctggccagggtgcccacgtcgtcactggtgagtaggtcggagaagaaggacgagggcagggtgttggatccagcggcggtggggtcaagcgttgaggaggaggcagatgaactcttctcagtgaggctggcggcgcggtggaggagagccgggcgattccggacttccaccgaaggcgccgacgcgaggatctcagacggggacaggagtgcgagcatgtcggcgaggatgtcgggaggtgcgtacagggaggcgtggtcagcttcgctgggaaaatcacggacgtggacgggaagcgagaatcctgggtcgtggtcggcgtctcggacggggcgggggcatggcacagctgtggacgcccccactgcaacgccggaaggagcgg

SEQ ID NO: 199035 - DNA, 295 bp, Zea Mays
caccgagggcatctgccatggttttgaaacgacgacagtaatcggagacatgtagatcaccttagatgaagtgccggaactgagcgtcgaggtggagggcgcgagttttccgattcccgagaaactgattctcgagagtcagccaagtggtgcgggcagtggcgtcgcgttccatggccatttcagcaaggtccagggagatggagccggagatccaggacttgacaacgcagtccatgcgtgcccagtcggggaaggcgcgggagtgtcgtcgaggatgtggctgtccagggag

SEQ ID NO: 199036 - DNA, 439 bp, Zea Mays
ctcaacagaaggtgaaccaactttccttctccatctggagactggtggtacagtcgaaaggcgatgatcatttgcagacaactgtctctttgaggcttgagacaaatgtgtctgcttacgtacagggtgttccctccaacggaactccactttgaaggagagatatcgcagaaatgcaagtataaggattgacatgggcacatttgtccacattgatttacttgtatctatttgaaacaaaatgatatggatcttagcatggacacaagcgactggactatatatttaagaagaaatatactgcgtatacaataatacaaacataaagaaacctctgcgcacaaaaataaatcaataataagggttgaaagatcaataattactaagtgttcaaaggttgccaacacgttcacagagcagaaagtgaaacagaaaaaaa

SEQ ID NO: 199037 - DNA, 413 bp, Zea Mays
tgtcagcattgacagagattgctctgtcaatcttgaagctgtgggagttccgacctttgatttggctgctctggacttgcctttcttggagaaagaagtgtgggaaacagttaaattgctgcttcagataaggctccgggtcctgatggtttcacaagtggattttataaggcctgctggtctataattaaagtggatataatggcagcagtttcagcagtttggagcaggagatttgcacagttcaataggatgaacacaacatacatcacattgatcccaaagaaggagggggctgatcaagtaaaagacttcagaccaattagcctggtgcatagcttcgcaaaattgatcaccaagctgctagctaatagcctagctggaaggttaaatgagatgatttcacccattca

SEQ ID NO: 199038 - DNA, 415 bp, Zea Mays
gtttgcactaactacttatgcgatgaaactgcgcaagccaatgatttttggtgccacaaggtgacttcacatttgtgcagatgttacctattttcttctaattttgcccttatttatctttgaatcatttagccatgctgagaggacaagaattctctaccaattcaagaacagtccagaagtcaatacaatttttctttcaaaggtgtgcttagtaactatccaagcttgagtgtatatttggaatcaatttattatcagcaatctttgtgactatatgttgttccatgttaggtcggtgataactcgattgatatcccagaagctaatgttatcatacaaatatcatctcacgctggttcgagacgtcaagaagctcagcgtctgggccgtattctcagagcaaaggtactgt

SEQ ID NO: 199039 - DNA, 394 bp, Zea Mays
taaaacttgaattgtgaatatgcgataattatcagaaacagtcataagtgatatcgctattacggaaacatcgcccaatgaacggaatcttcaatccttgctttcatctctatttccatttatctctggagcactagcttaactctgttgactgttgaagaatttaaatactgacgagaagtaaagtgacagctaaatctcaagtgtttcaagaatagttgtttcagtgatcctttttatgtactaagaacataggaccaattcatgtaacctgttagcattgtttttggttctgttcctttcattccagactccaaagattatacagcttgtccattcccattgtttttggttctgaaacatcttcaattactgccatacttctgaaacattt

SEQ ID NO: 199040 - DNA, 564 bp, Zea Mays
ctagatctcggggccctctagaactgtaagattgtccccataatcgtcgtatgtaagaatggctaaatcccgaggcccctaaggcctcagggccctccagtctttgatgcgcttccagacttagatttcactcggttgctcgagcctttatagagcaccactagatctctaaggccctcgacctaggagtttttaccaatggccaagtcatggccccctaggacccaaggtccttcatgaggaaaacatagtccctaattcagctacggagcacctaaagaccaaaagaatatggttggcccctgcccctacggcaagacggtccctcaaggtacagctatattcaaccctactccagatggcgttagcgatctagataagccttccatccatcacattaaatgtgacggacgatgttacagtcaaatagggacattgttgccacgatataggcaacaagaatactcaagtccattgttggatatgtgccatcatttatgtagccatgcttgaacacgtcagagtaccacgacgcattataaagtacagacggctataatgttt

SEQ ID NO: 199041 - DNA, 279 bp, Zea Mays
ggatggagaaggcacgtacgtatgtactaaacgttgccaggcacacgccgtgaaaattccgagctaaccggctgactcgagcatgcgagcatcggagatcagagttcagacttcagattcagagcagctcaactaacttggaacaggcagcaaagtctatatcgagctaattaaagcgggagaaaatcgctcggcgagagacgctcaataaaccagctcatgcgtgcacagcatcgctgcaggcgctgccgcatggatggaccagtaaatccctcgtcc

SEQ ID NO: 199042 - DNA, 237 bp, Zea Mays
tatttgtaactgccagcaacgccattgacatgtgcttttctgtagtctgcctcaggattgtttactttgtcctgtgcatacaacagagcaagtattgaagctatacaaaatggaaagagaaatacatatctaaataggcctttgtatgaaactggaaaggatgttaagaatgaagttctaaaagaatcactcatgtgcttggcgatagaccgatattgcagttgtagtgatcataac

SEQ ID NO: 199043 - DNA, 705 bp, Zea Mays
tgaccatcgatgcacttggaagccgaacacacctttgttggctgatggagaagctagacccgaaagacatgactcttcgcattggtccaggcaaagagctgaaaatcaccaaggagaccgtccatctcatcctgggtttacccaatactggtggtgggaagcctctaaacattgatgaagtaaatgcagctgttaaccttaggtcatcacttggcatcagcaaagatgagtttggagttgcaaagctgcaagaacgattaagattaggaggcgatgatgacctctcaattcgatgttttttcttgatccttttcaaccggctgctattcccaactgctagctggtctatatccaacaatgaggtgctcttgacagaacaattggatcgtttccctcatattgattggtgtcatctcatattcaacgacttatgtgaagctgcccataaatggcataacagaagcactacaaatgtgtcggcgacgatatatgggtgttccattgtcgttcttgtaagttttctcatgtctgccggttattcatttcattcactccattgcaaattgccaaaattcgaagtttacacatatctattttatgctattttgtcgttatgtacatatgattcacctaatatcaatatttttataggtgtactacctggaccacctccaccacgctgtagcccccaacaacaaaagcgac

SEQ ID NO: 199044 - DNA, 1341 bp, Zea Mays
cttaaggttacacctacccctgtgcaaccaactccaaaacagcagctgttgcagcagcatccgcatccgctgcagaagcaacagcatcagctgccgcagctgtcgcatcagccacagcagccacagcagcagtcaacaagaaaggaaactgttggttccagccaacctaactccatcaatccccatactacatcacaactgaaaagagatgtgcacccatctccgtcggtccccaatgttacatctgttagacctaccgttcaacaaatgcctggtgttcagatgccgatccccttccaccaccagccggcacaagtttccttgcagtttggtggccatggtgcacagctgcagccacaagttgtgcccagctcatttcaaatgtcaatgggattgacaggcagtagtacaccgcaagtcccacagcagctgtatgccccgactctgcagcatcatcaattgcaacagcaagcaatgatgcatcctggccagggtatgggttatgttccttcagttgctcaccaattcccacagttgggcagcattcctatgaacattgcatcgcaatatcctcagcaacagccaaacaaacctgctgctgcacgtaaggctattgtaaaaattactcatccagacacacatgaagagttgaagcttgataagaggatggactcttctgggcagagagctgcaccgagtattgcacaacaatctcagcctggtgttaattatgctcctcatttgggcttctttcatcagccaccgaattcctacaaccagtcaggaatgtattactctactacagctagtgtgaaccaggttgctactggatcatcgggtcctagatataattatcctgtcactcagtctgcgcaagcgatgacatatatcagtccatctgcagcgcctccggtatctggtcagtcacaatatacagttaagccgcaccctatggggttgctgtctgaaaaatcaggtactcatgtcacaataagtgctccaccagcaaaatctgatccacctaagttacatgctgctggggatgctgcgtcaagtctgaaaaaggataatgaagttgtttctgggatcactgttttaaataaaccaacccttgagagggagagtaacgatcctttagtcacagtgaagcattccactgtgataagcccgtccttgccaattcatggtgaaaaaccacaaactttggtgacatcgtcgcctgttgctaattcagtctcacctgtgactggagctgatgggaaaagcaaagaacccattcaaaggtctggatcatttaaagatagtaagaaaaatgtcactaaaaaggatgtcaggaattca

SEQ ID NO: 199045 - DNA, 458 bp, Zea Mays
agcacgaacgaggctgcggtaaacggttgggtcactgacaggagcaccgtcgccaaatagctttccttgagtgtccactagggtccaacttgcttgattatttctagggtgtactgccactactagaggaaaggcccttgaagctacgctcaatggcaatctctagaaagtgaagggggctcaaatccgtcatggcgaactcatgctaaataggggcgatgattcggtgttggagagccgaagaggaggcagtgagcacgttatcatcaacatagaggaataggaggtacatggtgtcactaccacgtcggtagatgaacaaagatgcgtctgatttaaccttaacaaaaccaagagcatatatgtggcaaagcggctgtaccaagcgcaatgggcttgcttcagaccatagaaggacttcttgagcttccaaactgaggtgagtaggaccaacaaag

SEQ ID NO: 199046 - DNA, 487 bp, Zea Mays
gaagtgccgagatctgtgatacatttgatatgataaaagaaccgggggagctcattgtttctcctaaggtacctgtggtgcaggatgctgatgtcaaaggggtcgatatgatggaggttgaaacagctccagttcgcaatgcaaaaacagttccttcagaagagagtgctgtaactcctggagttgctgagggtaaggcatgtgcagctgctgatcttagctcattgatagcttctgaagaagctgggtctcaaaatgatattgacaatgacaggccgaaaacttctttgtgccatgctgattccatgaaaattaaagttagtgatgaactaccagtgaagcaatggacatactgtgatcatatgtctgatttacacagttctttcacatctgcaaataatgatatagccaaagaaatgaatgaggtgctatttaaatcattgcctgctggtacatctgcccttgatttgttggcatcaagtgatct

SEQ ID NO: 199047 - DNA, 355 bp, Zea Mays
cactaagttctaggggacgtggttgtcaagagtctaaggccaccatacgtgcctagagagatggggcgaagtcgatcaacgtcttggagattggatccggtgatggctcatcggtaccgaagcgtgagttgcaaagctctatgaagcgctactaggaaggctgtcatgtttacatcctgttcgagaatgtagtaccacgtctgcatcgcgccgtgtagatggtatgatgcaagccaatcacgatcagatgcgagcgtgtgttgccctcgaaaaaattgctcacaataggtgagccaaattacagggcaatcgagcttgcgggggatggcagtggtggttgagtaagttagaagcg

SEQ ID NO: 199048 - DNA, 261 bp, Zea Mays
gtgagagagagaggaggctccctgccctctcgcggtgacttggcgaggagggggagggactgggaaagcgaatggttttcgggaaggcgctgtgatttggcctggaaaggaggaacctttccttcctcttcccgtcctttgccggctcttgtaccgccctcagatcggcgacccggttgtttcttcggcaacgggcggaaatgaggctctcgtcgtcgtccggcagcgtcctgccggctcagccgggctcgccggaaggta

SEQ ID NO: 199049 - DNA, 409 bp, Zea Mays
ttgaagagtatcaagaagttgcataagcctctctgaaagctttagttcattatctttgggatcacaaggctctgaagcaccatccccctgaatagttggtgtgttgcaatcaataatagcgtccagaaaaaggcgtgcacggagaggtataaatggcaatatttttgaattccggtccggactatgactttcaagcattgctgcaaacttcgaatcaccaacatcagaagccagaagattatacagccgatgtgtattacggaagtagatctctcgaaaaggctgatgtctggtaatatcgtttattgcatttgaaaaagactgataaagttgtggatcttcacagttaaaaatatatcgtctccaaagaaccatggcaaaaattgagtaggctggaggaaaaattaca

SEQ ID NO: 199050 - DNA, 261 bp, Zea Mays
gttgtggggggcctgttcccttccgaaatatggtgtgggttatatgtgatctgtgcgtgcggtatccttgcgactggagatgagtggcggctgcctctgcctgcgggctgtggccacacaggtggggtgggttcatactttgcacgtaccatagttcctgtttgcggttacacatctggttgcagctgcagcaagcatttctggacatttgtttggacatcttccctcgttgagttgtgtagtgtttggttgttgcaagat

SEQ ID NO: 199051 - DNA, 849 bp, Zea Mays
ccggtccatcatctataacaacctacgatcttgtttcagatcttgctgaatgaattttgtggtttttgagccatcctggtaaaccttggcatggccagtggagagacaaacgcagggaacacccagaggtgtgcttatctcatctttaccttgaaacacactgtttgttttttctagttctagttactactggaaggctcttcagtgtttttttaaaaaactacccactgatgtgctaactgcgagacttcaagatttttgtttacagaaatcttttgctatttaagtagctgtcagaaatcttgggagcactactatatagacattttaatataaattgtgagtgctggtagccttatcttgtctttctgtttagggggaatacccttccaaatggtgacatctatgttggcaactttgctggtttagttcctcatggatttggaaagtatatgtggacagatggaactctttattatggcgagtgggatacaagcaagatgagtggtagaggagcaattcagtggccttcaggtgcttcatatgatggagatctttgtggaggtttcattgacggaacaggcagtttcaaaggagttgatggatctgtatataaaggttcttggaggatgaatagaaagcatggaatgggcacaatggtttacgccaacgatgatacttacgaaggtttatggaatgagggcttgccagatggatttggtaaatatacatgggttgatggcaacatctacattggactttggaaatctggtaaaatgaatggcagaggagtgatgcaatggacaaatggcgatactcttgactgtaattggcttaatggactggctc

SEQ ID NO: 199052 - DNA, 613 bp, Zea Mays
ccagcaaccaatcatgtttcaagaattgattatggaacaatggccaatgatgatagtaataagaaaccaagccctgctaacacgagtgtgcagagtgctgagagtgattttgcagttgatcagaagcagcaaagtcaatcatggacacctatttctggaagtatatctgcaaacgaaaatcacaagaactctgatagtcattcaacacgtagtactgtaacgcctcctgattatgcatttcttcaggtatctgacagtgatacacagacacaatcaatcaaagtacaacaaccattgaagcaacaacctaaactgctcaacaagaaagagagtgcagctaaagaagacgtcaggattgtagacgacaattgctctccaacttctgcacatatcacttcaagtagcaacatgtctcacactgacaagaaagttgatgccaatccaacttctgcatcagcagctatgaaggaggcaatgaattttgctgaagctaggttaaaggctgcaaaagcattgttagagggaaaaggtgacagttttaaattgcggaagaagccaagtcatcttaaaagcacaaggtctacagaaatcaagtctcctatttctgtagagg

SEQ ID NO: 199053 - DNA, 385 bp, Zea Mays
acggggttgcatctagtcctagctttcatggagcttgcgcatccagggaaaaggaccggcacgtctctaaaagcacaggctcgttagatagaggaaggaaaagctggggtagtggtagctccacattagcctctgcctcggcatggtgacagctcgagacggaggggattagatctcggcctatttacagctcagaccgtagcagtacctggctctggctgtagaggactaccacgtactttccaagtccacgctgtacagcagcactgcgtgcatccctcacacacaccacaccgtatcgggctactaccggagcatacatacacacacacagacatgagtggtagggaagcttgccaggaaattattccaggcgggcccctga

SEQ ID NO: 199054 - DNA, 464 bp, Zea Mays
gtaacatcacaggccttctccgcttcaacaaaaacaaaccctcttatgtgatcaagtgcaaatgctgtaataattggcactttggtaccaatttttcgaaggtcaacaaatttttgcatgaagcagaaggccatttggcgctcacgcccaacctggaaagcagttaaccaaatcagcacatccacaacaaatgctagtcgagcaatgccaagtcaagagtttggtaatcacaaaccatgcatttaactctccaaatagtcggctctttgagtgcacaatccatggagaaaatgtcatcgtcttctctagaatagctccgatcagcagcgtatttcacacgattactgtatcggttcttgatgaattcctcaagttcatcgccactaagctcctcttccttcacaagaaatggaagagggtgtgacctttcagttcttttgtgactcagattttgtgcatgttcc

SEQ ID NO: 199055 - DNA, 251 bp, Zea Mays
ctcggaagaagatgttccaacgatggaaattagggcgtgcgatctgcaacgtcattgaggcatgagtcttcatgttgattgtacataagggattgaggatggctgcggtggtggtggacagcagctcgacggaggaggaagcactaaaagatgtcgaggaggagttggtgttggaggcggtggctgcaaccatggcggcacgagctagggttgggagatgaggggcgaaatctacatgacaatggattgag

SEQ ID NO: 199056 - DNA, 279 bp, Zea Mays
caacaaaagcagcatataaaggcctgttcttaggatctgctacctttgatcactacaaaagaatctagagatcttgggccccctcaaagtgccgttttttcatttggttggtggcacacaacagatgctggactgctgatcgtccccacacaggtgtcctctttgtgaccaagaagatgaaaccatgaaccacctccttatttcctgcgtcttcacaagaattttctggtatatgctcttaaggaaatttgggttacatgccctggccccacagcctgg

SEQ ID NO: 199057 - DNA, 272 bp, Zea Mays
ccgatgcgggcattagcagacgagcgaccacagtggatgaagggggagctggcaaactcagtcacgtttcgctcttatgttggggcacactgatcaattatgagtccctgaggattacaacctgggtcaaaaaaaggtgcaaacagtagaacaaaggggacagacaaacgagaggcgcacgagaaaggaaacgatgctgatgccggaagattctccggatgcaaaaagtggggagtggggcgaaattcggtaagaaactcacaggtcacaac

SEQ ID NO: 199058 - DNA, 365 bp, Zea Mays
cgtgtcttaccccgctacagggtggagatatttataggctttgcccggagataggtggtccaaagttcgatcctaccccggtcaccaactatatccggggaatattccgtgtatcagggtaacaacggtaacaacagcagtgcacgcgcagcgaccaatgcacaccgaataacacacccgctaactaagctgacaggtggagcccctagaggtgcctcatggtgggctaatgacgtaacggtgtgacatgtagcttccgccggccttagagccttcgtgctatggtacacttcgctgcgcttggacggaaggcggtcgccaccgttggagccttcgcgctatggtacccttcgctgcacttggac

SEQ ID NO: 199059 - DNA, 324 bp, Zea Mays
cgaactcggtggcgtcggaggcagcgagttcggcgatgagcaacagggggcagggccacagcagggtgcagacgagagcggtgacaaggacaggcgtgcgagagtgggattctcttgcttctctgccttctagtttcccgaggtcaagttgcatgtgtactcacgggtcacggtaaaggagctatgtgccaattaatttaagttgcatgtgtactctactaccggtacaagatgaatcaattgttgatttgtgataagtttaaactattggggaattgatgattaggaactgctgcgtggagacaaggatttggagaaaatttt

SEQ ID NO: 199060 - DNA, 732 bp, Zea Mays
gttgatgtcaaggaaccgacatctaagcgaagaacaaatcaactatagaatctccctattgtaggctgctctttacgaataacaacaagatagatagattgatcagtaggctcataaaggtcacacacaaaagactatatctgacgtgcaaactcaaactcaataatatcaatagcaagatgattcttcatagtctgcaagactgcaactaattccatctagaggcaagaatagcaccgacacgagcatcttcatccaaccaattcctgtaggcactaaactgagtcacaagaggatatctctgaccatcatagtttgcaagcaactcctcgtcagtagccttctatggaatcataggcgatgtaggagcagtaggacaagcaggaattcgtgccattaaaatgcaccagacatcgtagaactggaacaccactagacgaaaaggtcaaagacggggccataacaacagtcgacggtgagagtggagcagcgacggccgacgaaaaggggtcacaagctgcaatttttttactgaaacctaataaaaactgttagaacgaaatccgcaaaaccggatctgaccaaatccggatcgggaagaagggctgctggtgcaggcagaatacaacaacacacgagcagcgggcgccatcgaaaaatgcacgtgccactgtagcaggtgtataaggatgaccgagggcaataaaagtgtgcatatttagagaatcgatc

SEQ ID NO: 199061 - DNA, 285 bp, Zea Mays
ctccatttcgccttcggattcgcccatgtcagatcagctcagatcttccttcagatgcagggttaccaagtctacaatgcatatcttgcctgctcctcagactggcagaccaggggctgcgaactccactgctgttcctcctcgtcgcagccggcgtattgccggaattggtgttgagaaccttgccacttccagcgatggtcagacaagattcagaaagaaggtgatgagggtccttcacgtgattgatgagaacgaaggcatcaatccggaggctctggatcg

SEQ ID NO: 199062 - DNA, 352 bp, Zea Mays
ggatcaaagagggtgtttggttgctagccacatttcaccttaggcaagtttgattaagttggcaagtgtttggttggcaattaagcctaggcaactttatattaggatctatgtgtcacagagtaagaaagagtgacaagatctgttagaattgatctccatcagttggcccaacggctaactgggcccttgacctcgcaccttgatcggggggtgtccagcccaagacgaggttggtgggcccctgttgcgcagtctataaatagaggggtgggggttgacggctcagtacaaggttcacttccgtctacgtttcctcggccgtcgctgccctagtgcagaccttcaccga

SEQ ID NO: 199063 - DNA, 304 bp, Zea Mays
agaagccacccttggtgctccgtatgcctatgagttctttctcatctccgcacctcaaccttcactttcatccgctcccaccaaatccgctaccaccctgaggatcgaccttcttcctccccccacctattgtcgaatccgcaggagttggtctcatcacgacgctccacctctaagcccacctgctgctcaaggaggactgaagggagtacgtctaagtctgctcctgcatcaacggtgttgcatcctccgtcgagcatcgccattgcgtactctgctccatgctcacgcaccacgctaacac

SEQ ID NO: 199064 - DNA, 343 bp, Zea Mays
gtcaaattctctgacaggaggtaactgagtaggaatagaaaataggtctgcgaactccatcagcaaagcctgaatatcttcatgctgaacagtgctgttatcctccttaacctcctctagcagaaccatgatccacacgtcatgacctttgagccatttctgcacttgcagaactgacacattctgaatggaagaattgttctcagcaccatctccatacaacttcacccattggccagcatccttaaactgtaatactttgtcaatccaatcacactccataggactgtgctccatcaaccattcataaccaagtatggcatcaaatacccccaaaggtaac

SEQ ID NO: 199065 - DNA, 307 bp, Zea Mays
ttcaaatcgaagtcttcctacacccagcgacgaaaaggctgcgacaattcgaatcaaaaatccatccgagtcgaatcgagccagcggaaactccgcggccgatctcctgtgctctcaccgcccgcctcccccgattctgcagcccctcgctgcgaatctggacgcgatttcgaggctagggtttgggaggctccggatcgcgagcccgtgcggaggcaagggtttggattcgggggttgctgctgcatgtcgggggtgctggattgagctactccgcgccggcttgtgatggtggtgaccggcggtg

SEQ ID NO: 199066 - DNA, 643 bp, Zea Mays
agcaccaagatggttaaggggtaaggtgaaggctgtgacatctggggattgtcttgtaattatggggtgcacaaaggctgagatcgaacctgagaagtccatcaccttatcctaccttatggccccaaggctggtaagatcaagctgcacttgatgaatttccttgtcggtaatgagcaatatttgtggccttttcacagtttttatttgtttcatgaatcagtaaatcattgggttgctctagacaaactaggttattaggttgaggttatgcttgaggactaatgaatgcgggcaattctcaagtttttttggttgcattttgttactaaattttgcagttggaactatttactgagtatcaattgtagcttcttgacaattgacattcttctcatttctctagttttcatttttcgcttgtttattcatggtgctataggctcgtcgtggtggagttgatgagccgtttgcatgggaaagcagagagtttctgaggaagctctgcatagggaaggtgctacatttgaacttcatatcttctccgagctctcatatcattcattgtattcttttttttttgacactgcaaaattataatctcctgttaacaggaggtcacattcaaagtggattatacagc

SEQ ID NO: 199067 - DNA, 2445 bp, Zea Mays
atgtgtgaagagtaagcggtttggccatgtccgagaaaggatagttgagtgctccagctgctctcgcagttctgtgcaaccaacggcttgttcttaacccccttctctgccaccaaaaccgatctatttcaggcaggagattcgctctgccacgagctcgatgacttcggttccaaagccactgaaattcctccgcccacactttggaactctcaagtcctatttcgaaacaatgcaagagtctgagctcaaggtatgtgcgaacactttgaatcacccagcttcggtatgttgtagattggtttgatgcggtgctgaactgctgatgcaaccatcttattgatttgcagaagtacatggctgacattctgtcagtgttagctttgacaatgtctgttgaaggggaaagagtatgtgcctgccgcaatagttctcttcttactatcatttacatgattttttgtttgaaaaaaaatggaatcttcagctgttcgcatgaatctggaactgagccatcttcttgttgcaggagagcctgaaataccgtttgttgggctctgaaggtgatattggttcatggggtcatgaatatgtgaggtatgattgaactgaaataatatatttcttgcctactttcctggcttcaatcagcaaagcctaattttttagtgttctgtattggcaatgctactagcacaaaactatggaaaaatgataagcattgagcttttattggactgatatattgcactataccatggaacaataactgaactcctacaagtctacactgtttacaagttgtgttgcaccccgatcaactaacaacagggcacatgcctgaagcttgattcctttttgtacttagttctatttcagaggaaattttctgcatagagtaacctcttcacaaaatgccgttgattcagctatgctccaatacattaaggggtttatttcaccttttggatatgcttcattttttaataaatatactgcttacatgctatgaaaaactgttagattttgaatgaataacttgtcttctgtgcagaaatttggccggcgagattgcacaagaattccaaaagcgtcaggtttgtattgttatctacagcttgtatcatggttttggtgtgtctgataacgccggataaaagttgtaaacaatgtttctttagttttagtgttaatttgctactaaatctgacctattgattaatattctggtaatcatttattcttttcttagtaacagttgaaaattgaaacaacactgtctctatatggttaacatggtaaacaactgcattttgttcctttttttcttgaatgatgcatgagagctacatgctatttcattaagatagaagaaacagtacaacacacgaggggaggcatgaagtccgcccctatccagaacaacactagattacaagtgtaccacacgcaagaaaaaacaaccacacaggacagctcagacgtccagcctttgcgcccttccgagttccgagcagctcctggagagccgtgtttccgtccaaacactagagcttgctcaccttccccacttcttggcaaactaaagggacactaggactaagaccctaaaaacgcacacattcttatgcctccaaagagaccaagcaacaaggatgactagagagttaaaccctttccttctctccttttgcaacttgctgactgcccaacaccgccaggtagagaaagccctcacatcgagttgagggcaatcacctgtggactaacgcaaaggaggatttttgtccaaacctcacaggagaagacacatgacaatagatcacatctataggcaatcacaaaggagcattttgttcctttctatcccattttatttatcctcgttgtattctggtaaccaagatcacattttattgtgaattgctgcaatttttttattgcttcttctggtcgtagttttgttttgattcatgctactgggctgcaataatggaattaaatagtgggcaggtggacgctgtttatacattattctgttctattctttatttttcaatcctcatatgctggttttcttgtttccaggatgatgacttgcccattgatgtcctaatggagctagtgcagcaaattgtttcatttcacatgaaggtttgttctgagtggagtgcatggttgaatacttatttattcagttcatattgaattatgtgtagttcttttgttttgctaatttttggtcttctgtcattttattagcataatgctgagcctgaagctgtggatcttcttatggaggtgacctttgctattacaaactacaatattcactattgccaagagtacagtcccaatgtttttctgctaatgaactcataaattttatttttttggtaggtcgaagaccttgatttactagttgagcatgtagatgctacaaac

SEQ ID NO: 199068 - DNA, 260 bp, Zea Mays
aattaactgtcgccgtacctgcctgccgaatctgccgctcagctctgcttgcatttccagaggtgtcaaatgattggattcagttcaattgacctgaatcgattcctggcgagctggtgctggaatctgcccgtcttctttattcagtttaactgactcgaattattcccgagttagttttaaaaatcgccgaacctgccgcccgcttagaaagcgaactgtttccactttccagtgcttgtgccgcatgcacgtatatc

SEQ ID NO: 199069 - DNA, 428 bp, Zea Mays
gttgtgtatggatggagcaaaggtttaggggttttcttgaccggcatgagaaggtcttcttaatgtaatgtcgatgcctatcaccccccccccccacacacacacacacaacagatcaagattttttaaaaaaggagaacttattcctgtctctctgtccgtctctctctcctatatgtccatccacaatgattttaataagaatagtagtacatgatgaattagatatgagctctaggtttactgtcccatccatgactacaagttagaatagtgtgcgcctagccacagtaaagagttaaattgcaggacgtattgaaatgtatgataatagtacactcaagttgcaacgcacgggcatggtagctagtttaaaaatccaacacagttaagttattggaatgtaaatggctaatttacccaagaga

SEQ ID NO: 199070 - DNA, 485 bp, Zea Mays
ctcgccttcatgtccaatgaggtgactcagataatggcaaggagcttctttgtaaaactggatgctaggtgttattggccatataattcttagatagtccccttctactattggcagtgctttgacaagaagctgtataacatatgagaaatcacccacatttgcgtctaacaaatagaactgtcaaatgcactgacaaatagaactgttaagcagtccatcctctacctgtaaatgttcctctgaaagaggatgacttggacatttcaagcttctctgatcagtgttttttatgtcactaaacatacgctcaaccaagccctgaatgcaatcgaggttctctacaaaatcattttatcagtaacaaataggcttatgtactccaatgtactaatttgcaatacttaccctttccataaacaacaaggtgcataacgtttgctgaataattcttgtaaaacttcagaagttcaagtctgatatcc

SEQ ID NO: 199071 - DNA, 505 bp, Zea Mays
tccgtcctgagctttctgggtgtgttgagaggttgaacaatgccatcactgcgtctttctttccccttgctgtccccttggtcagcatagacgcaagctcctccacagcccctggctcattcattatctttttcttgtagtcatggaccacagataaactgaagagcgtagctgcagcattctccttggcctctgttgtcaaaccgttcttcaacacactgacgataagatgcaggcaatcctcttgttccataatccgggtcttgttcggctcaaagattgatagattgagcaatgcagtcactgcgttctcctgcgccatccaatccgatgacagcagcaacctgcatagcaacggtatcgcacccaactcagcaatgaacgcccggttttgcttcccagtctttgccaacaaccggatttccctagctgcgactggctttgcattatcggatccctccatcagcatcttgaccaaaatccttgctgtggctttgtttgcctc

SEQ ID NO: 199072 - DNA, 661 bp, Zea Mays
tgaagatcatcatttgtactcactgaactacatgcattggggtgctccaaagatgtggtatggagttccagggaaggatgctgtgaatttggaggctgcaatgaggaaacatcttcctgagttatttgaggagcaacctgatttgcttcacaacttagtaagttttctctgttggttggtgatttcccccccccccccccccccccaaataatagtttcaggtataaaagcttacccagataatggttaaccatggattatgcttatgtggctattctgtgatttatggttttttttccacttcttaggcatttaaaactctgttcttccctcgtatatgcaagtcaaaatcagatatactcctaaatgaaaatgctaattccttgattccttctccaggttactcagttctcaccatcattgcttaaatctgaaggagtaccagtctaccgatgtgttcagcatgagggagagtttgtcctgacgttcccacgggcataccatgctggttttaattgtggcttcaattgtgcagaagctgttaatgtggcacccattgattggttgccggttggacaaaatgctgttgatctttatcgtgaacaagctcggaaaataactatctcccatgataagctgttgcttggggctgcaagagaag

SEQ ID NO: 199073 - DNA, 298 bp, Zea Mays
gagaattcactgcggcaagacaagagacggcggtagtttcgagagaactgacagcagcgagagacgatgatggacgacaacgagaggaagagaaggaaccacactttcctttggaaccattcgctccgttgcagacggcggcagacatgcaagaacaccggcacgacgaagcagaggaaacagagttcctggcggaggagccggcagaagagcggagcggagaggttgcgcaggaggaggcagcgccacccaagaccgtcgcggccacgcacaactatcagttcctgactgagcgcga

SEQ ID NO: 199074 - DNA, 374 bp, Zea Mays
gttgaattgttgaaacgttggttaggagcattgcaagatgttgatgctgaaaatggaagttcagatttaaaggtgtctgaagctaatgacccttctggtgaaatggacactttgaaagcacaaactgtgagtttacatgctcataaattaaatctcatggctgttcatttcacaaagttatgtgatacttttgacttttgtccagtcgcttatacacatcttagctgttgtaggctttctcaagtacatatatccatcttaaatttaaaattttggaagcaggttttgttctatgatgctgatattgatggtgcacctatgaatttttgtgatgtattcttgtacagccaagcacttgaaggtattacattgtc

SEQ ID NO: 199075 - DNA, 827 bp, Zea Mays
gccgcttctccctgccaaattttgccactggatcattatttaaaggccctttattaccaccaaagggctgcactttggaaccaacattattctggaaagaattcaacctaggccaattatttgaactgtcgccgtaacgctcgctagcagcttccaccccattctgtccataggcactcataggaggctccttaccattactccacacatccttggatccactggcagctatgttttctcggtatgattgcccactgcttcctctgccaccactgtaaggtcgaccatctgttcgctccctgtcgtgttggtttgacacgggagatcgccacagcctgtcctgcccaccttctttatttgttgcagccacatctctcccaaacatctcctttttgaagggatccctcatcgatacataaaggtcgcgccctggaagcatggcctcagtcctgccaaatcccctctccctgctgtcccgctctggaaggctcagccctgtgtcacgctcgtcatcagcccagtcagaatcatacctaagccggaccatcggaagcggccccagatcaggcttctgcaccctctcagcggaagtgcggccaccaggtcccaagctgacaccagaggccagcgtctcagtggtccgcgaggttgtcacctgtggccgcatcccaagagatcctggtcgcgcctctggcgtgacgacccggaccccatcagcatccttctgccgctgcgcaggctgcgggggtgttggcggggcaacagctgctttcaaggacgggaagtcctccccacgcaagacgccggctttctccgcaaacccatat

SEQ ID NO: 199076 - DNA, 256 bp, Zea Mays
ctcctcgacccttcttccttccccaccaccgcgttccaatcaatcccaatcgcgacccagccagaggcgagcgcgagaaaatccccattccccaatccccacgccacagcctcccttccctccccgtctcctccaaattcaatcgtctccaagcgccaatccgccccgtctccaaatcccaggcaggcaggcagccaaccagccatggagtgcgagccggaggagctgcagttcctgggcgtcgtcggcatctacc

SEQ ID NO: 199077 - DNA, 230 bp, Zea Mays
aagaaattgggtgatcaatgcagctaaacaatgaaatgtgcaagggggcagtgttggctgattcagtaaattcagaggactgaaactgtgttttagtgatgtgtggccaacttcagagccacataacttgtgatctacatattttgggtcgtggatttttatagtaaacctgaagagccatggttggggaacaaatctgttcaggaatgcttgagctatccttgtttgga

SEQ ID NO: 199078 - DNA, 351 bp, Zea Mays
ctcacataggcaccccttgtcacgtcctgcctctgcacgtgatcataaaagatgatcataaaagatatttttttctcgactaacgctaagaatggctatcactagactagtctaaaacatgatcataaaagatatttttcggattatgtttggaaaaatcactctaaacgatagtcgagggttgcaaacaatggacatgcgcacgaccttgggctagtttagtgatagacattcttagtgttactccaggcagataatctggattcctgactatgactggaaaaatcactctaaactatagtcgagggctacaaacagtggacaagactagtcggctaattaattttttcg

SEQ ID NO: 199079 - DNA, 305 bp, Zea Mays
ctggacttactgatacacgcactgttgcaacaccgatggatattcatttaaaacttcgtccgaaggatgggaccccactagcaaatccaactcggtatcatcatattgtgggtagtcttgtttatctcaccatcaccagacctgatattgctcatgttgttcatatgttgagccaatttgtatcaacacctacttcagttcattatggtcatttgcttcgtgtgcttcgatatttacgtgggacaagatccagatgtttactctatgcttcagatagcccacttcagcttcatgcgtattcagac

SEQ ID NO: 199080 - DNA, 496 bp, Zea Mays
tgcaaattcaagtttctcagcaccccaaaggagaaggcggtcaacactctatgtcatgaatgccgcatcaaccagtgctccaatttcacctcaaaacataacccaacttccacggacgaacagcacagttatcaaaagtatatccagcgacaaacccagcagtgcaatggagcaacttgatattgaacgtggtgtctgtattccgttccgaaagtacactcctgaaatggtactgcaatctgcattcttttatgtttatagaattggttttgctaaaaattgttgttaattgtgttcatttctacaattgctaggtcaggaaaaaagtattggattcaagaggttccatactgtcccttgcgagccggggagtggagataatttggaaacttggattttactggtcatctcttgtgtatgactttttggttggacaggatgaagaaattgttccatatcgtgcccggcagctccgtaatcttttatgtgatctggg

SEQ ID NO: 199081 - DNA, 320 bp, Zea Mays
gcgtaagtgtcaacatcaaacccacgagaaactagctgagcaccttccgcactggaacagtgcaaagggattataaaaatcaacgatttgagttctctgggccaaaagaaagcaggcgtgcaatgcatacatttgagctggaacaattgagtccagttgatgctgctacgcaacaataagcagcagtaatgataatgccctcaggtttgaagtgcggaatttaaggcgtgaaggtgtgacagctgaaagggccataaataaaacttcgcataaattcgttccactaggaaacgtccgtgtgaagcgttaagccatcctgg

SEQ ID NO: 199082 - DNA, 679 bp, Zea Mays
aaatctgctagtgctctaaaaatattctattttgcttgtataccttattcaggcacttgtggaggaacttaaggttacacctgcccctgtgcaaccagctctgaaacagcagcagttgcagcagcagccacagctgccgccacagctgccgccgcagcaggttccccagcagccacagcagcagtcagcaagaaaggaagctgttggttccagccaacataactccatcaatccccatattacatcgcaattgaaaagagatgtgcacccatctccatctgtccctaatgttacatctcttagacctaccgttcaaattcctggtgttcagatgccgatccccttccatcaccagccggcacaagtttccttgcagtttggtggtcatggggcacaactgcagcctcaagtcgtgcctagctcatatcaaatgtcaatgggattgacaggcagtagtacacaagtcccacagcagctgtatgcccctactctgcagcatcatcaattgcaacagcaagcaatgatgcatcctggccagggtatgggttatgttccttccgttgctcaccaattcccacagttgggaaacattcctatgaacatcgcatcacaatatgctcagcaacagccaaacacgcatgctgctgcacgtaagactactgtaaaaattactcatcca

SEQ ID NO: 199083 - DNA, 273 bp, Zea Mays
gacacaagcaaaggcaggggtgaacaggctgtttgagtaatggacgcctagaaattgccccgcctgtggatcggagggttaatatatatgtgtgtgtcggttgggctggcaatttgtaactgggccgcaagtttatttttggtccaatacgaaccaggagagcgtgttgccactgaccgacagcacacacacaccaaatctaatcctccatggcctctagtctgtgcgtagtattcaggacgagcgagcgaaagggaagaaacgagcgagcgg

SEQ ID NO: 199084 - DNA, 458 bp, Zea Mays
tcatcgcctccatcgtcgctacccaagggtgcaattgatgtccagttagtgaccaacttgcactcgatggcgacacgggccaagctcggcttttgcattccagccctgatccatgctttgcacctctcctcgatgcccaagacctatcatggtggccttgcttacccgagttggcgtgccaccatggaggagcatgctgctcttctggagaatcatacttgggacctcgtacctcgaccatctcatgccaacgtggtgacaggcaaacgggtcttcaagcacaaatttcatgcagacgggacactgaagcggtacaaggcgctttgggttcttcgaggttttacccagcacccaggtgtggatttctcagagacatttagtcctgtggtgaagtcagctacagttcgcacagttctctctctggcactgttccgacaatggcccatgcaccagcttga

SEQ ID NO: 199085 - DNA, 368 bp, Zea Mays
ttctttgctgaggatgtccatcgtttggcaaggtactaatacaaaatgatgggtgttcagttaccactgcactaaccagtgatctgtttgctggctattatctggttatctactattgcattttggaattatcttgttgcttctagtatatacatattacttttagtagactacagtctccatgttctaatttgcttcggatttctacagtgcgagcgtagatgggcggatatttgtgtggaggatagatgaagggcccgatgaggaaaacaaaccacaaattactggaaagattgaaatcgccatccagattgtaggtgaagctgaagcttaccatccaaggatatgttggcactcacataagcaag

SEQ ID NO: 199086 - DNA, 814 bp, Zea Mays
ccttttcatgatggaaatcttcaagtgcccatgaagaatcagttgttcggcctgttgaagattgcctaaccgaaacactcccaaatccatcattaagatccttcttggggaaatttcccctctttgaagcaaaagggtcatgctgtggcctatgatgcacattctcttgttctggaaatgcaggccttgaactatagtgtgcagtttctctatcaataaatgaagggcgtccatctgtaagagtgcgcacccttggaactgtctcactgaacctgttaatactagaggattccaatggtgttgaggtattgatgcgctcattcattttgtcaatatcctttctgtcaccaaagttagcagagtgtgacaggtctctgtccttgacatctccaggaataaattcatcattgacagctcttgtgctgtcaatgtttgtttttgcttcccttttagcaattcttgcctccaattctaagagcttctgatgtgctgcctccctgcgccgctcctcctccatagcgatcctctttctttcctcttcccttgcgattctctgctcttcagcccttctagcagcttctagcctctcttgctcagcttgccaagctgcctgctttgcctgctcctccgccagccgttgcctctcctcctcttctcgtatcatcctctcctgttcctcttcttgcttccgagcaacttctctggccctttcctgttcttccattacccgttgtctctcctgctcctgtaccctcaagatcctatcaagctctgcctcaaacgactcccttgctgggtcatgaaaatcagctgg

SEQ ID NO: 199087 - DNA, 454 bp, Zea Mays
ctcggcaggagcagttggatgactggccgggcgaaggcgctttgggcgagcaccatcagatttttgagcagtcaaggtcttttcaggctcagggacagttgcaatagctatggtttcagcagggacagagtcagatgaatcctcagccaacatgtccagcatagcacttttctacatcactcgggtttataggcatttcaaagtgaacttgcctttcatcgttggggagatcaccaagtgaagcaaccagagcctcaacttctttgggagagggtcacactctaagacccaggccactgtcgctagcaggaggattggacacaaaactgaaaaaagtcttagaaggtggcagattctaggcagaatatgcaacaggagcaccaatattcgacactttgcctctaaggatcatctccagccggcttaccaaatccatagcaggaatcctcctgtt

SEQ ID NO: 199088 - DNA, 773 bp, Zea Mays
tggagatgcaaaagtagaagtctcccctcgtgacatagtttacatggaaaatgctgagcctataaatggtgaacacccagagattctgcataaacttgaccttcgctatgcgtatgtccctcaaattatccattagctactttagatggatcattgagcttttcttcattgcagatgttacaatatttctactttctagcatgaaacctaaacaaataagaataccaataaagtttcaattctaaaaataataaggacaggcctggtgcagtggtgaaaaagctgtctcaccgagtcaccaggtctgggttcgaagcagcctctctacatggggcaaggcttgcctccgtttatccgttccctagaccccataacgtgggaccatatggcactgggcctgcccccctatctatctaaaaacaacaaggagtccagtacttcaagttgcttgtgtctctggtgcctggatgtaaacaagattgcatgttctttacactgtccatttgctacactttgttaaaagctaactcttctgatcttcttgtcttctggattttcattctgtcggaacagtggcacctcttggtgtgatgaatctcttgctttagtgtatgaatcttggtttaaaactcggaaaatcagaacatgggtgctctctcctgataaaaaagatgtcagcccacgcgttttattcgaccggtcttcagaagatgtatactctgaccctggctcaccaatgatgcgaagaactgtgatgggaacatatgtcatcg

SEQ ID NO: 199089 - DNA, 239 bp, Zea Mays
aatagacacaaaatctccatgtgccatctttcttttgcacaaggaggattggggaggcaaagggactcatactgggaacaattagaccggtgtctaagaggtgttgaacttgtttctctatttcagttttgtggagaggtgaatatctatagggcctggtgttgacaggaatggctccggggagaaggggaatggaatggtcatatactctatgtggaggtaaaactgaggggatagca

SEQ ID NO: 199090 - DNA, 314 bp, Zea Mays
atccagttgacctgctttgttgtaggcatccatgagggctgtcattacattgccatacgaatgaaaaccatgtttaagaacactactgtggagttgacgtgccaggccaaggtgtttaagatttgcgcataagttgatcactgttgagtatgttgactctgtaagcattgtaatactggatcgtgaatcatggaacagttgtagggcttcaagatcacgcccgttcaacacaaggcccgccatcaatgtgttccacgacaccatgtccctggtctccatcctacaaaacacgaccctggcctcttcaaccagtc

SEQ ID NO: 199091 - DNA, 323 bp, Zea Mays
ggaataggagggcaaatggaagaaagatgtgtacaattaggtgtcatatgaaaaaaagcactagtcaagaatccatgggttgatacctaaattggatggtagtcccttagtggaggactgagaagtaatagcagatagtgtaggggcaggagtaactgaactggtagttctagtaggtcaggtaccaagatggtgaagcaacatatctcatgtgtattagtattctaagagccactagtaggcgcactacccgtaccttgtgatgaacggccacctcgacgagattagaccttcttcctgtaacaataagcctcaacatctcc

SEQ ID NO: 199092 - DNA, 544 bp, Zea Mays
tcaacatgtgcttatatgatcgatcgatatgagagatcaactcatcatgtttctgacgcacgaaagaaataaggacgaaaattaggaacgagatgatctgtctcaaccagttcactagtgaaagaaaccaacagcatgaacatatatataccccatgcaccacatctcgaacgaaattccaacttaactcatcactgcatgcatgcgttgctaagctgacaatgatggctgccagtgcccagcagatgacttacagcatccataatatatataccaatgtttcgcactgacagagaagtcaaagaacgatgaaggaggagtgcccggcattctgcgagcaactggagaagatcgtcaggaagaaagcaggggcgtagccagctgcagcctgcaggaggagtgtgctggcgcatgcgttcaccattcctctgcgtgctactccagccataagcacacacagctagctaattaaggtattttagtctgtaaataatggactgtgtagtcgtgtgtgtgtgtgtgtgtcgtaactgtgaaagtcgcc

SEQ ID NO: 199093 - DNA, 576 bp, Zea Mays
ctgaaaataacattttagtttgttcatcccaacccctaagtgtgttgcatggatagacccattgcacagtagagccatccaaaaacatgcagcgggtcagacgcaacttggaaaggatcaagtgtggaagctggctgaagaatccatgaacctctcctgctagaggaataaaactcaagaaggctgtgacagcttttccagggcacctctgaaaacagggaagagcacaaaaagattcttgggcacttacaaacaaagaagggaattcagacaacaaccactgattccatgcactatccgcatccacttcctctctggaagatggtaaaacaaaatctccttgaagaatgaatttaagaccgtaattccttagaggaagaaaagcaaacacaggttgctgcttcaaataaggttcataatctccttcctcagtctgctgcaaagtaaacgccacagctatctctgtggtgcacacatcatgccgcacaatggtaccttgtagcctcttactgaccaccaaccaactcattgtctcaatcccatgcgagattctcacaataccatcaccaagaatct

SEQ ID NO: 199094 - DNA, 440 bp, Zea Mays
gacggaacgggggcttctacctcgagaaagctccccatgttcccatcgccttgtacttgcggctgcctagttagtacttcccctcgaacatgtttggcgcagttctctcagctgcaaatcacagatacgctagtgtgtgtcgagtacccagagttttcccttctctagaaaacatctctatctcgagtatgttgcgagtccttcatgccgtgggttctcggatcaactttaggctgaacacgggtattgtgggtgggtttgtcacaagacatgtcaggtcaggtgcctagtcctggtccacacggtctgttgtgggctcattcctgttgttgccgtttggattatctttttttttttttgacgagactagttttttttatatatgttcccttgctaaggactatatgcctatccgatccgcattagtccttctagattta

SEQ ID NO: 199095 - DNA, 720 bp, Zea Mays
tacactgaaaactgagattgaaacacaagtgcaagccatgctgtcttctggcatcattcagcacagtacaagcgagttcaactcacccgtcttaatggtcaagaagaaagataattcctggcgattctgtgttgatttttgtcacctcaacgcaatgacggtcaagaggcaatttccaatcccggttatcgaggatatctttcaagaattagcaggcgccagttggttcacaaaactagatttatggtctgggttccaccagatcatgcttcaactgggggaagaacacaagacagcattctctactcacgagggccatttcgaattcagagtgcttgcctttggactcacgggtgccccagcgacattccaaggcgctatgaacgccacactcaagccccttcttcgtcggtgcgttctcgtcttcttcgacgatatcctagtctacagcacggattaccaatcacatctgctcaacttgcatcaagtcctgtccttgctagcagctgaacactggaaaatcaaattaagcaaatgctcctttgctcaacggcagacaacgtacctggaacatttaatcagctctaacagtattgccaccgacccaaccaagatttctaccatcgtatcatggccagttcccagctccgtcaaggaacttcgcagtttcctcggtctcgcagggtactaccgaaagttcgtccgtaatttcggagttat

SEQ ID NO: 199096 - DNA, 367 bp, Zea Mays
gacatacgaaggtgaatgtcgtgcaaggagaaaaatgtgcgggcacgtaggttgtcgaactcacggtcgttgttgcactgaataccctggatggtgatcccaaactgggtgcgaacataggcaaagaaagtagtgagggtggaaaaggtgtcggatttgaggcgcaaatgtccacaaaaaatgggagtaatcatctaaaatggcaagatagtatttatgactagagacactagtcaaaggggaggtccacaaatcacaatgtattaactgaaaaattttagtagccctggaggtggatgtatgaaaagggagacgaacatgatgtcctaattgacaagcatgacataaaggagcggtggcactctat

SEQ ID NO: 199097 - DNA, 277 bp, Zea Mays
ctgttgatcaataatcacaagatccaaatgtttgattggatcatcatcatttttgccatgaaattcccaaactcttgatatccgaacacaaatgatatagtggtagacccctggtcgaacttgtgatagtggtgtaatgtccatctgcaaatacaatttgttaaaaatagtatcaatttatgttgccatggctctcaatagattgtagtacttctttatacacaatattttctgttattgttccacatgaaccgtcgtcattttctatcaatatttt

SEQ ID NO: 199098 - DNA, 280 bp, Zea Mays
gcaagaaccgcgacaggacgccccgggttcccggcgccggctaccatggcttcagagctcgcacgccgacggagcttctcgcattgaaggagggagaggagagggtgttgagggagcagacgaggagtggtgtgctgtacagtggtggtgggctggtggcggggggcttgggcagagagaagaggacaggtaggaatttaactcaccgggtaatgtaatgtgtttggggcttgggccttcttcgccgcgtcgccgacaccaacagtatgatctcactggc

SEQ ID NO: 199099 - DNA, 302 bp, Zea Mays
ttagaaggttgattgctgacacacaacacctgctcgtacttttttgtcgaaatcatgacggacaacaacgctaaacatatagtacaatcttcttgtcttgctgatctgctatgcccctttgtgaaatctgccggtgacatcagcgatggcgtcttgctgatctcgtggtatacctgatgtttcctcggtctcagcttttatcacgcagtagtgcacaagtgacatgtgttcgctggcgtggcgcatcagtcaggcacacgagtgccgttctttctagtcttgtctgtgtcctggacttgcct

SEQ ID NO: 199100 - DNA, 334 bp, Zea Mays
tgctgaataacatatctgatgcccaggatgtgaagcagaaggagcttgttgagaaatcacttgtagttacacttctggagcatttcgggcaagaggtggctgacttgaggtcagagcggaatgtcttgaggcaagatcagcagataaagattgaggaactgctccagctgcagagagaaaaggaggaacttatgaagataagtgatgaattcttggaagaggtggaggctcgtaatcacaaagtggatgagctaaaggctgaggcgaagttcttggttgtaaggttctccgaactgcaagagtctaggaggtcattgcaaagcgagatcaccaa

SEQ ID NO: 199101 - DNA, 310 bp, Zea Mays
cttcactttctttgcctttgacgcactagaagatgctgaagcagcagttttcctttttctcccgtgtttccaaacaggaaaacgataatcagggtagacaaacctgataacatcgaataccgtattcaacctttttctccctcgagcgccgaaggcgactgtcatagcttcgtcttcagccctcgagtaggctccaagcagcttgtcactagttgcctctatagcatcttgccagtcatcgtttggttcatcaaattggcttttgtatcgaaagatatacttgagatagaccaagccattttgactggag

SEQ ID NO: 199102 - DNA, 214 bp, Zea Mays
tgagatttcatctagaagaggacaaaaccaagaaacttcattggctagacctggagatacaagatggggatctcactacaagactttgcttcgtattgaaacaatgtgggagtcaataataggagttctgggaattgtgaatcaaggacagcgaaatccatcaagggctagaggtttggttgctaacatggagtcattttgttttgtgttaatc

SEQ ID NO: 199103 - DNA, 433 bp, Zea Mays
gtctgcaagagacgccatgatgcattccacgacacgcggttcacacatcattagggaggagatgatcatgtaattgacactagttattatcgtttcaaacacaagcaagcacacctcatagagattagagactagatgctgattagctagttgctactttggttggtcgtgtgtatatatgcagcagtagtggcttctactggacacctctgactttttttcccctaaggtagaagagtatgcatatgcaacgggaaggccgcaggggcatcgatacccttccctcgatccttcctgtatgataagctagcgcaaagcaaagcaaagcaggctcctgcaccctctaccagcaaccatgtgcttctagctagtatccaccatgcatcctctctctctccctttcttgatcatctatcctagccggccagtccaa

SEQ ID NO: 199104 - DNA, 254 bp, Zea Mays
gaggtcgaaggcggaggggacgcaggtgctagtgccgaggaagcctccgtgaaggatctgagagggctatgggaagtgttcctcgacaacgcctttgtgtttgatgcgttgtgcataggcgtctcgaggcagatcgccttggacaggggtttcggtgtggatgtgctcctatggctgcggcggaacgtgcaacttgcccatttggatgccgtgaagactcttgtcacggaaggtgatctggatgctgctcctgg

SEQ ID NO: 199105 - DNA, 316 bp, Zea Mays
aggatctattgctaacaccaggtgggattggccggaatgggcacatatgaaaagttctccagaagagcacatattgaaaagtcttgcatcaagaaacagtggaacaggaaaaatggggttgttaagtagatatggaaaaatcactggacatatgaacaaaccggcttattccaatgatctgtccgttgagggtggagggcacactaatgttgagaagctagtaaacaggacagatgaaacatattacagaaagagtgttgatgtgcatgaaacttttacaaagaactctgctttacttcagaattccgctgtggtg

SEQ ID NO: 199106 - DNA, 476 bp, Zea Mays
catggaagacgacgtgaatgcgtgtcccttttggcagctccaatctgtacgccacagtggccaccctttcaatcacacggaatggtcctgcatacgtggtcccagcttccctttagggtggtcgactagtgactgggcatttcgatgtaggagacggagccaaacccaatcatcaatgctgaactcgagctcacggtgtcgcccatcattaaacctgcgtgcttgttcttgagcttgtagtagcctgtctctgacctccccaaggaacaggccacgttcctggagcatctggtccacaatttgagtttcagtagtcctaggttgatatggaacaagtggtggaggatctcttccataaactacacgaaatggagttgttttcagtgctgagtggtatgatgtattgtagcaatactcagcccaggctagccagtccacccaagccctaggtcgatcccccgtgatgcatctcaaat

SEQ ID NO: 199107 - DNA, 297 bp, Zea Mays
tgcttcctttgcccccctgctggacctgggtttcaggtctttcttgctgatcactgttaaacgcctgctcatatacgactagtttcattttaaaaatttggcggttgtgcgtctgtatccggccctttcattcattctgtttaggtggtctttgtgttaagaaactgaactgtacgtaacggggaatggatcactggtgcccggtagtgtaatatattaataggtggttacttaagttgtctggttcgtctaaggaaatgttttagaaaacatctatttcagatgtattcggtggag

SEQ ID NO: 199108 - DNA, 469 bp, Zea Mays
caaaattttcagaaattgagcgtcctttcaagaacccagtctggtccaaatcaacaagcgatgtgacttgctgttggaggcgagatgtcaaaattttacccacaatctttactggacaaccttggagtgaaatcggacgaaaggatccaggcgcaactgcaccaacaatttttgggatcaacacaatgtatgctctattaattctttccataccagcatctccatggtggaaggaagctaagaattgcatgacagtggacttcactatatgccaggaagctcggtaaaaactaggaccgaagccatccggaccgggggcactattatgattcattgccttgatagctgcccaggcctcagcttctattaattcagcttgagctgtagtggtggagtggagcctctatacagtataacattttttattttgtttttgcacgacagaaatacatagacaacactagtttaa

SEQ ID NO: 199109 - DNA, 433 bp, Zea Mays
tttgattagcaccccatatgtcacattggtcggtgtcacaccatcactgacaacctcatcaaacaaatccaatgccttcccaacttctccattcaagcaatacccgtgcatcaacatcgtcgcaagaaccacatccatcttctttcccgtagccagcagcatctgatccttcagccgcaatgcctcatccatcctcctcaccttcacaagcacatccaccacagaactgtacgttaactcccacggctcgaaccctgcctccctcatcttccccaacacctggagtgcccgatctgcatcgcgtagcttgcacaaacctgagattgtgatggcataaacgcgctcgtcgggcttgaccccggcaccagccatttcatcaaacagcctgacggcatcacagtgcatccctcccctgacgcaggcccgtatcacg

SEQ ID NO: 199110 - DNA, 245 bp, Zea Mays
gccttgtgacgtgggtgccttttagttcagaagatactagagcagtgtgctggggtcatgcaggtggcgtttacagaatttgaactggcttgttatgttttaaacagtggggaacaatcgtgtgtgcatactccactccgtctccgtgtagaggatgctgtcaaatgcttggacctgttacattacatactccccacgctgatggtgtgacgacccccttctcaattctacaatgtcgtagtcct

SEQ ID NO: 199111 - DNA, 620 bp, Zea Mays
agtacttcagaagaaatcaaatgatacaaaagtagaaactgatgatgcacatgataagcaacagattggacttgatgtgaatgctaaacttgacacttcaactgaacaacatgatgttgttacgcctgataggcttactgctcttctgcctcctaatgatcccaatcatactatggttcagatacaggcccagtctactgcacaatcaaatgctttagatggtggcaaagcgcatgatgctcataccacctcatctttggtcaagaacacacacagcaacatggagcatgttgtgcagaagagtatctcacagtcgcataatatcagtatggtaaagactaagcaaggctacaggaaaagacaggttgtttcagaggagaaaatttctggcgagaaggcaagtgcttcagtaaccactgattccagtgtgcagaaaaatgttgatgttcccgtcgacacagtaacggctgttgttgcaccacatgatgatcccccaactcagaacaagaagggaacccggcatttgaggagtaagaaaaaggtagatgatgcttcagttatttctaaacatccacctgtggtgtttaatgaacagaatacagtgaaaatctctaccgagc

SEQ ID NO: 199112 - DNA, 522 bp, Zea Mays
atctgatttcccgatatgaaggaccactggtcaatggcctgtgtatcaaagggtaccataagcagctttgtaaataaattctgcaactctctgtaagcttgcttagatagtggtagcataaagagggaggttaggtctggtgtgagagaaattgtttctatgtgtgcattcaatgggaaaaacataatttgttgaacccattctggaggagtgtcatacaacttagcattgtagagtttacttatatgaactgtagataccttgctaagaacatcggacataagcttggttcggtagctctacaatacaaatcggttagtaggaccatgccaaataaaaatggagaaagctgctctgtgctcaacttatgagggtctgttctcctgtgttccggccagctggttccatttgtttagtgccatctattcgaacctaaaactattatagtggatgcactaaccaattctgcccaaaagcttaagatattagttgaaggtagacagtcaacttatacatttcaat

SEQ ID NO: 199113 - DNA, 230 bp, Zea Mays
tggacggaggcaacaggctagaaccagatgtgtgaccttgaaaagcataactaggcgcagcctcctcagatccatggagaagttgtgatcctgatgtgatagaaggtatcctagcatttgaaacttccactggagtgtcatagtagtgagatcgggttgccctctcatatgtatcacttggttgctcaggaaggaactgatactcatgaacagcccgtgatccaacatga

SEQ ID NO: 199114 - DNA, 362 bp, Zea Mays
ctcgctgctcttggggggcctcacgacgcaggcaaccccaggccaccctccaccgccgacacctccatcctccgacgccgcaccaacaccagcggtctcctcagcagcagcatggaggaggttcgggtggtggctcgggccagcgcagaaagcggggcaaacgcggtggcaggtcctctggcggcagcaacagcagtgttgcgcctggccaatacaccggattccctccaccaggtacagctctgttggaagtcgctaactcacgattagccaaactcaaacggtggaagaatgggaaacagtttgatgcggataaacacaatgtattagggcaaccgtgttttttcccgccccctgctttg

SEQ ID NO: 199115 - DNA, 510 bp, Zea Mays
cataatgtgtggtggactttacaactccgatgcagtctcatgtataccacagtgtttggatgcattgtgcctgaacaataatggtcttcaattggtaaaggaccggaatgctttaagatgttttgtgaaaatctttacgtctagatcatatatgaaagctcttagtggtgacacagcgggagctttatcaagtggacttgatgaattaatgcgtcatgcaccatcattacgatcctctggagttagcatgtttattgaaatcttgaacactatttttaaagtgtggtgtggtgtagactctatcccctataaggaatctgataattactctgcagttattcccatggatactgatgtggtggttgctacctcacagagtgagggtgtacctcctgaggtaggatgctcaggcgaaacagttgatgctcctttagatgctgtaacatcatcatccattgagttatttcttcctgagtgcatatgcaatgttgctcgcctgcttgaaactgt

SEQ ID NO: 199116 - DNA, 810 bp, Zea Mays
agcatttgaaatttcttggaaacctgcttttcctgaccaggaaacagattgacctgaaactaaaggtttcacatcatttgacttcatctcagcatcaacacgcttcttccagttctcaacaagacacttagctttcttctgaatctccagatttttatggctacgaagatgattgacagatttcccaatgctacaactttgcaatgcactgagattaataggcaatttagctaatgcacgaagcagggccgagagaagttcgtcaataggcttatctgcttctttaggactagtcccatcaccagacttccctttgtgggcctcttgaagccaactgtccaacacgggaaggccccttgattgcacaaatctgccgaggcaatcaggactctctgtagccgcaataacatcagcaagtataacccgaccactaaggtctatcttctgctcagttcgatcaagttgcataagatgtacaagcttttcaactgcttctgcatttggaagcccacctttttctgttatctttgatatttcagacttaatatcatccaagttaaagtttccaggctcactctcgtcaaccttaagtagatgatcccgatcccgcttagctggatcaactccctgttcacttctatctctcttctttcctttagacaaaccaccattttgcgtaccaactgaagcagtcttcagttgttgggaagctgatggaccatttaaacgctttggagagcgtccacctgattgcaatgcggcacgcatttctagccttgttctgtgtagaagtcgatttacttcttcctg

SEQ ID NO: 199117 - DNA, 217 bp, Zea Mays
acaacagcagcttcttgtgacacaacaacagcagattcatttggtacgacagcagcagcttcttcttcaacttctgctgggagtttgttaaggtcaaataacatcctttctcgagaacccatgtcatgtgtagatgcatatagcttgaatctttcaagtagtagaaccaggcaatttcctggaatacaagagcacccaatggaagaaagttactgtt

SEQ ID NO: 199118 - DNA, 332 bp, Zea Mays
aggtcgactaatcgaccctagtcgagctggtcgtccatttagtcatccatatgtttctggacatatatacttatatacttcgtccatcctaaaaaacaaggcgtataaagttttagattttgtctaaaaaataaggcgtactactactatcctactgtagaagcatgtgcccttctccattttcctaccagagcatgcacgtttctttatatggctggaaacaaggtgacgcatgattatttgtcccagtcgagtagatggggaaacaagatttttctccttgcatgcaccaaatagagtgtaatgtttccaattaggggttttcagaaaat

SEQ ID NO: 199119 - DNA, 1812 bp, Zea Mays
ctccgaaccaggctaatgggtgtgatcatgaacttgctcactcttcaagtgacgaaggcaattcttctgaggaagtggatgatggtcattcttatgctgagtttgtgaagaagaatcatgtacacttgcttctatcttatatgtggtccatctgttggctttattctttattcattctttggatgaaaccctggacatagaacattatctgactgtaccgccaaattttcttaacttttcagggtaaaagtaatggaaatatttcttctatcaatgatcaggcatgttctagtcgtctatgttgtttatggttttatttattctttatcccatgttatatacttatatcttttctttcctatcgctgcttgagggtgatgtctctggaaacaattcttatgtagttatgtttgggaaatgggagtttgcagtggtcttgagtcaagaagaaatttaacagtagctattcgtggacagctattgcattaagaaaacaatacctctgtcacatgaaagtttatcttttgaaaattcgacctccattaagaaccttttaaaaaaatagaggaagagcagagaaagaaatgcaatacattcttgattactgtggacatttaagctgcaattccagtaaatatagagtcaacattgtgacatataggtgtaatcataaatattacaaaggctacagaattttcaatcaaattgtttcatcagtgttgatgttagctgaattgttcaattagcatgtgtttggttcctaggatgaagtgaaatgtgacggaaggagcacatttggatgggaggcaggggaaagggtcatctttgctggagggatgtttttcagatattcgggactaagctatccttcttgattgaggggatgaacttgtcccatctggacggcatcatgctctgtcactgattagcgctgctccggcctgttccagtcttcctccttggcaatcctcacgaagcactgctgccctctggtcgtctcctgcttgatctggccttcccccctcgctgtagtcctgtggtgcgcccttctgtcctccaatctccgtatctccgtgctcaaatcaagtgtggctcaggcaagctcaaggcaaggggcacccctgcaccttcctgctgctatgcgctctacctttctggcgcataagctgtcctgcaccttcctgtagccatgggccatggccatctcctctgcttctcagtggtcgacacctgtgtcccactgctaacggtggttgacaggatgagaatcaccgtccatcctcatctttctaccaaacgcaaaactgggattatcacatcctcataaccacacaggctagtgtgatcgtcctatcccatcataggttagtttccaatattgcactggaggtttgggatattcaactttgggctcttcatgccaagtaaggttctgtttggcactgctccactaactccatcgtggaacagctccacaaaaaacctgaagtttttgaagcacccctttaggtgctctctcaactccagttttttttttaactggggcagagtttgtggagttgcacctgtttgggactttgggtaaaaaaatgtggagaaacatggagcaagtaggtccttaaactagatcaaatgatctgtttttaaagctcaactagatgaaagttggtattttatgatcgtgtggttaatattatgatctgttttagtactcctatctgggtattttatgatcatggacatggttaatattaactgtgatattcttctttccaggaggacgaagattacattgctgctgaagaagtaaag

SEQ ID NO: 199120 - DNA, 212 bp, Zea Mays
catttgcatcctataacgttcctacctttttttggaggaacaaggtgccaagttttatttttcataagagccgagtattctatatccatagcatctttccaattaacatctcctaaagcttcatttagatcataaggttcaccagaagaagtaaaacaaccatatcgaatagtgccatctgtataaacctttggtttcctgaccccttgttg

SEQ ID NO: 199121 - DNA, 257 bp, Zea Mays
ccttttcctaccctatacccagatctgtctacccgcgcctcgcacatctatgtttgtttggagaaatttgattggatttgatgcgatttgttgcgcttcgtcatctggtcgttgggaggattggttctgccaatcggttcccaacggactcgttcccttgaagctacataattccgttgtatcttgggccggctctttaccgtgtgccttcaattattccccatgaacaggggcaccccacggctcttacatacatg

SEQ ID NO: 199122 - DNA, 267 bp, Zea Mays
aagagagttagtcgatgcagcgagcaggaggcgtgttaatatcctatgtgtccaggagacaaaatggaaggggcaaaaagcgaaggaggtggagaacactggtttcaagctttggtactcaggaacagttgcaaaaaaaatggagtaggtatcgtgattgataggagcctcaaggatggagtggtggatgtcaaaaggcagggagataggattatcctagtcaaactagttttggggatgtagttttgacattattattaagttgca

SEQ ID NO: 199123 - DNA, 361 bp, Zea Mays
ctgataacagcaatagacactgcattcttcaaatcatcttcagcttgcgttagaggattattccagccaatgatgcaaggcacatgaggctgtactgctattccttccaaaggggtctcatcacttcctggcaagacagctccatcttggccttgaccaggatccgaaccacccctcgacgatgaacggcgcttgcgatggcgcctgcgacgtgggcgaggcgggaggggttgctgcgagtgtgcggcagttgcgatctccatgaccgtggacgatgtcgcgacggtcgtcgacacagtctccttcctcttctcaccttcagcactagggggtgaaatcctgcgccaaaccttattacgac

SEQ ID NO: 199124 - DNA, 263 bp, Zea Mays
ttgacttcgttgttcacaagctatccttcattgctcacatgattcacgtagatcttcccgttctccgcacattcatgaatggaaaggaatttagtgttgatgtgcttcgatcatgaagaacatggttcttgctaagtgcaatgcgagcttattgttcatcttcaacaaccacgattggacattcacatgagccacgtagcctagcattcttcagccgcgtccaccatatactcttcacaagttgagagagccaccgtcttctg

SEQ ID NO: 199125 - DNA, 502 bp, Zea Mays
tggagatgttggagcggcgggcgtgtgctgtggtgcgggaggtgctggccatgacggtggagaagcggacgctggtggatcacctcacgcacttcaggaaagaccttggcttgccaaaccggctgcgcgccatgctggtgcgacatccagagctgttttatgtcagtgtgaagggggtgcgtcactcagtgttccttgtggaggcgtttgatgatgatgggaggctcctagtggaggatgagatgctggttgggagggataggctggaggagcttgttcgggagggaaagcggatgaggcgtgctcggaagaaaggtgttctcacgttcgatggtgacagtgatgaggatgaagatgatgatgcagcagaagaggaaggttcattaaaggtggatgatgaatttggggacttgtttgaggatggtgtcattggggaggactgggaggaggtaggcgatggaggtggaagtgatgcatatgaagagtacgatgctgaatcagg

SEQ ID NO: 199126 - DNA, 383 bp, Zea Mays
gtgggctagaatctggtctgtgttggcccagcattttattgctgctggaagccaccacgaggagaaagttgcaatgtatgccattgattcgctaagacaacttggtatgaagtacttggagcgtgctgaattaaacaacttcacatttcagagcgacatactgaaaccctttgtcattttaatgaggaatagtcacaactcaaaaatccgaggtttaattgttgattgcattgttcaggtatgtccatatgcatgaattttgacacatctataaatctatgaaatgtaatgatctggtgtttcttatcaaatgatgctacatataaaaactttgctggatgtacatgtagttgatcaagtcaaaagttggcagcataaagtca

SEQ ID NO: 199127 - DNA, 236 bp, Zea Mays
atattcttgagcaatattgtcctcagcttccgttatatcatctgaactagctagcgcagactctgctggttgtgactgcaagatgttcctatcagacgtatcttcctttcctgtgtgaatagattcccctgtttcggtgtcacctgattgatgtattttagtaggcgaagaagatgcactaccatcaggtaagtctcgaacagactctctaagctgattcggctctgcttcatcac

SEQ ID NO: 199128 - DNA, 309 bp, Zea Mays
tacttgtcgctgaatctccttggtttcttccgggttcgtcctgtatggcgctcggtttggcaaggaagcccctgtgatgaggtcaatctgatactcaattcctcttatcggtggtaggccaggtggcacatcgtttggaaatacatcagcatattcctgcaaaagattagtgacagtagaaggcaaagtagatgatatgttgtgaagtgagaacaaagcatccttgcaaataaatacatagcagattgaagcaacatcatttaattcaagcaaatcagatttggaagcaagaaaacaagcacttttcag

SEQ ID NO: 199129 - DNA, 1023 bp, Zea Mays
ttgcgatccaaactgctggtgcagttttacttgtcacaacccttggtggttcagcataaactccatgagcgacgacggcatggcctccgctgcggtggagccgcccaagcgggagcaaaattttctagtgaaggtggggatggaggcatggacgcagtcgttcgcggttgcacacaaagtcaggttggtgcacatcctcaagaatctccacacctcggaggtgaaaatctactccgacgcgtccaaggagttcataggagtactggatggtgagtctggcggcgaggtgctgcaggagtacgtgcaacagtcaccgcagcttggggagctgctcgaggcatggcggctccaccgggagaacccggggatggcgcacatacttttgctctttgcagctgtcctgggccaccctgatggtaagctgcggcgacatggttcggttaagaagagcttggacggtgtcgctaggatgatactggaggataaggagaagatgggggatgtgtatttggagctgaatagtggtgagttccgacggcagaatgcagcactggatttgcttgctgcaattgtcaggcgtggagggggtctagcgtctgaggtcgctgagagatttgattttaagatacctattttgccgcagctggctgggacaatgaagaagaaggggagcagggatggaaggaatcggcggaagggtgccgactttgggtccacaaggcggtcgtttattgggtttgccatgtcatttttggaggttgggaatccaaggctgcttagatgggtccttcaacagaaggaggtatattcaggggtgcttcgtgggattggaaatgatgatgctgagactgtcatctatgtcctctcaactttgcgagacaatgtcctggtagatgagtctcttgtcccaccagggctcaggagtgtcctctttggaagtgtcacattggagcagctgagcttgatctcaggaaatcttgaatcaggggaagcagctgacattgctcatgaggtattggtcat

SEQ ID NO: 199130 - DNA, 451 bp, Zea Mays
caaggcgctagttcgtgaggccagcctgttcggggccgcaaaggttgtcctcggcgtcgccaagaagaggcgtgcgatttcgtaagtataaagtgccatcggcattggatgctcagtgctttccactatggaagatatatctcaagcttttctcatcctatcattacccccctctagctctgccttgctgtaaatggtgatttgcatcatccttcaggtcgtcgcactcagttgcaaagtactgcgcaaagaagctgcccgcgaagtgtgcggtcctcgccgtgagcaatggcaagattgagttccggagagagtcgagcgtccatccaggtaaggtctcggcagaagttctcccgtgtggtgatgatgagatgtattgcgtagtgccgttccgagctcgtcaggctaaagggggcgcactttctttacaagaaaataaagatgacggtga

SEQ ID NO: 199131 - DNA, 331 bp, Zea Mays
ccaaggtggccaagatgatgcggatgatggggtacaagaaaggcatgggccttggcaagaatcagcaggggatcactgcgccggttgagtccactctgcgacccaagaacgctggcctggggagcgttgaggggttcagggagcccaagatcatgtctgctaaggagaatgtgccagccccaccacctccaccggcatcagcgaagaagaagcgttggtccaagaaggctaccacaaagaaggctccaatcttgacgaaaaatgagctcctggctatgcgtgctgagcaggaacaggaggaacagcccgctgttgtccagaaggtgattga

SEQ ID NO: 199132 - DNA, 321 bp, Zea Mays
cccgtcctaaggtggatgattcgggtttaagattccccgcaaagaaaggttcaataattaggataactcccacagtggcgccaagatacttcagaagaaaatcttgaatcatgccaaaccaccagttttcatgaagaacaacattcaagtgtttaacaagtgcccggaaccgctgcttaatatgtgatgcttctctgttctcaccaccataaaacgccacactctcagcatgggttctcaatcgtgaatggagttgacgatattccccctctagctgttgttctgtagacttcagcttgccaaaagcaggagaaaattttc

SEQ ID NO: 199133 - DNA, 348 bp, Zea Mays
aggcaagcgatccatcaggctagcaccatcggcattggcgagagggtggatgacgcattttatgcccccgcaggcggactctgccccgaggaaacacggctgaggggatagaggtcagatacgacatacgagatgaggatcctaggcgcaatctgcgttgagtctattgctgtttgtgttcgctacagaggtagaggatcaccctgtgcaccagaccccacgaggcagcgagtgacgagactggtttaggtgtgcatgtggttacttgcaaccggggcccgtaggtcggtgccacggcggagcgcgcgatgcgcgtgcgcaacacagacagagactggcgagagggcc

SEQ ID NO: 199134 - DNA, 559 bp, Zea Mays
cccacacagttttgttaccatatgtctatgtccattgtttggttttgggtagccgctcttgcaacagcttagcatgatagtagaacaacctgcgtgacagatgggatacacattgatttggttggccttttgttcttttgcttctgtcacatgtttggattttagcaccactgtgtttcttgttcgtagccattgcctgttcttgtgaaaattgtctgttttcgtgacgggaatggagcattttcttcttggtttgcatagccttcacgccttgtgcttgtcaagtatgattgaacttgatatgaatgatttatcttgatcaattacatgtttgctatggaatattataccctcattaggaaatgcatgaaaccacactgcctcttttttgaatctttcccagatattgcatctatctgtttctgtttaggcccatccaaggccatagctgttagtgttcaatttcctcggtttgtgagccccaattttacaaccataattaattcccgttaacattttttgtattttattctgctgtttctgggatggagatatagcc

SEQ ID NO: 199135 - DNA, 502 bp, Zea Mays
ccggggtgctcgccgaggccctggccgagttcgccgccatctgcgaccacctgctgtcgacgcgcccgcgcgcgcgccacgcctactagctaggcatgctgcttaatcgagtacagtgcccaacaaacagcacgccttttcgacacgaaacacttcatccaccagcgtagcgtttgtactcgtgcatggccttcgttcgccatggatgcatggtctgtactcttctacaagcaaattctgctacatggcgcttagccaacgttgtgtacttgtgttgccattggttatcagtacaacgctacggagcccataaatcttcaataaaacctcctttaaaattttatatgtacacaatataatgtagaaaggacttctctacagtagtttagttcggtctctattaaagttttttttttgctccgtccctgtactactatggagatttagttggttgtcagcacatctgaacatcatcacattgttcttgttcagcagcagttag

SEQ ID NO: 199136 - DNA, 220 bp, Zea Mays
caggggacttagtacaatgtatacacacttaacacagagtagttcctctagatgttgagataaccaaattgtgatatataggcataatgtgtcacaggctcacagcactgttcaccagtgaaaatatcatggttatcagggtgacaaggtgaggcggtgaggcatggcaactcaatactgcttaccgctttggcaagtaaggggtgtgaggcaagacaac

SEQ ID NO: 199137 - DNA, 404 bp, Zea Mays
ggaagaggcatttcattagctgaaagttcacattcactaacagtgctcgtctcgattgtatcattcttgcaagctgaactgaacatctctgataaaccagcaaatgccactggcatttcttcccgcaattctggatctgcgaatagtaaaaattccaatatttgggatatgaagatatcagcattttcgatgctcgaagatatattgagtaaggttgcatcaaatatgacagaaaatctgtggcagtctgtcatcgaggttagtagttttgaccttatccttttgttgttctgcttggtgatactgctatgacatgggggcattgagtgaccgagcaagtacatcagctaagaaactgcaagaatgttgaatttaatacacaaccgtcaacaatgatttggagg

SEQ ID NO: 199138 - DNA, 390 bp, Zea Mays
aagagatcctcacttctatggtattgatggcaaggagcattcctctttgcctaatggtgtaccaggtgctcccttggaaaggcagatgaaattcacagttgagaataatgttgtaggtgatgaaacttatactggcatgttccaaattcatacaggtagagaacctgctgtagattattctaagaggagtggttatgggaatgttccgtcttcacatgccagttcatccaaaggcaaaactctggattcgagttcatgggatgaaatgactgtaaatacaacaataccaccaagagaaaattggggaaaaagacctgcctttgtggcacctgccacgactacacatggcaatactgggtggcagatgggaaatatcactgagcatctcgc

SEQ ID NO: 199139 - DNA, 552 bp, Zea Mays
attacattacatgcatgtggagtaatttacctacggcagattgctgactaaaggcgctgaagtaaaccttccctcagtatacttcctcggatgtcacgtctgcccctctgcgtcatttatggctcagaactcgtcccgtcttcaccgcctcctcacattactagacagtatcctttcaatctcttgccctccctctgtagagagaatctatttaatagcacatgtgtttgttttttaaatatggttcataactgttattacagctcctggtatgtagttatgtgctgtgtcctgtgcttctctagagtgcaactggtctgcacctttgcctggtgaaaatatacaactaacgatgctaaaatatgcccactcaaatactctatctataagttgctcagatgaccatcttggggtgttggattatctatccctgcaaggtttctttaacattacccagctggttcgacacaagcaacgaggtttgcggctgcacgccaaattggagaaatcgccaagtcccacccccaggagctgaattcgttgctaaaaaag

SEQ ID NO: 199140 - DNA, 520 bp, Zea Mays
ttgatggttttagagcattcaagcaaggttccccgaacatgaactctctagtaggatttggatctgcagctgcatttactatcagtgctgtaagtggtgtctatagtgaactttactgtccaaccatgtagatatatactaatttagctttgcatttcttaaggtgtccttgctgaaccctgactgggagtggaattcaaccttttttgatgaaccggtgagccaattcttttgtagtcctattgattgagctgtgattattatcttccactcttgttgtagtgttgctctgatcttggatcttgcaatgcttttgacgaaagcagtgtcaattcccagaacatgggaacttgatcttttttccccacactagtcgaaccaatttggtatttgattgaataacaattgagttacgagttttgttttgcattatgaagttttgttgaagaaagtttttttgtagcatgcaggtcatgcttcttggatttgtacttcttggacgatctcttgaagaaagtgc

SEQ ID NO: 199141 - DNA, 281 bp, Zea Mays
gtataggtgtttgacatatcggggtgtcagtatgcaagctctctaaacgtctctgtattgtagaaaccatttatatagatgagtgaacattatcaagaaccttatgatataaatactcggatacattattatggttcaatagtatgtgtgtcatcgctactgatctcaatcagaattcattctgcagctgcttcaatggtgtctgccaggataacctgcaagcatgcacgcatctattaaaacacatgtagcatagtaaattttgtatgtcatgtaaatca

SEQ ID NO: 199142 - DNA, 270 bp, Zea Mays
gcttggattattttgttgcgttggatgtggctgcggcggagacttcgccgcgtgtggagggtgccggggatcttcctagtgcgagtactgggtataggcggcgaagggtggtgggaaaacatagtgtgggtgaatttttgcgaagtggtaggcgccgtcgtatttggatggagcgtggccgtctccgagtagaccgggttggtaaacgagaattgttgtcctcgccgattggggcgagcataggcgagggggatcttcggaatctttttg

SEQ ID NO: 199143 - DNA, 371 bp, Zea Mays
aatagctaccagacgtgcaacttctagtgcatctgtatcatcaaagtctgccattcgtgttgatttctccccttccaatgcagtggattttgtgtctgctgccttggaggagcccccaaagctcgacatgcatctttgcaatatataatcaccgctcatgtccatatcatctgtactagatgatgatgtaggttcatcttctttgcttgtactttcctcggacaaatcttgcaaatcacgggttacaactgcaagatggttcaaagtttcagttgtatccttctccaaatgtgatctaccagctgcaaatggctgagactccttgatacttgagctaactgaaataatactatcctccagacccattttac

SEQ ID NO: 199144 - DNA, 659 bp, Zea Mays
gcttttctgctggatgttctgaagccaaacttgccggatcatgcttttcttcaaaccaaggttagtatttgattgttcatttcaatatgaacatttgccttagacctgcatgctgcttaactactcaatgtcttctgcttggattgtcttgtaggttttggagatcaacttagtgacttacccaaatgttgcagatgccattcttgcgaatggtatgttcagtcattatgaccgtcctcgtattgctcagctctgtgaaaaggctggattatacttgcgtgccctccaggtcggtaacctttgcattgttttggctgatctcttctctttaatctctgtgttaaaccaatatcgtattttctgatgcagcattattcagagttgcctgatatcaagcgtgtcattgtaaatactcatgccattgagccccaggtttgtggtgttcagttatgttcttgaaatgtatctgttgttttcttgtttattaacaacttccttgcacaggcacttgttgagttctttggcaccctttcaagggagtgggcactagagtgcatgaaggaccttctactggtaaatctgaggggaaatcttcagattgttgtgcaggtaaatattgctccgttcctgtaaacatttttgttccaccctactgcttt

SEQ ID NO: 199145 - DNA, 229 bp, Zea Mays
ggacagcgttgacggagaggtagacagcgctgacgttgtcacaaaagacaagtgtgctcctggtgagggtgttgtgaaggtcctagtagagctcgcacaaccagctcgcctcagccatcccgttggtgacggcctggtactcaaccttggcacaagagcagaaagatcatggaggacggccagatactcaaccagctcaccccgttggtgacggccaagtgacggcttg

SEQ ID NO: 199146 - DNA, 464 bp, Zea Mays
cgaagacgtacaggtatgtccagttgatgttgtccttctttgttccgtacatgctcgccggtcccagcatcagctcagcagaacccgccggcccacaggtgagggcttctttctggttggagatcgatgagtaggccgccgagctgttgaaactctttggtaccttcatgtagctgtctccagggaagtacgggaacacctggccgttgtagagtaggcctttagtgtagcaccagccatccccgcccttgtacgtgaacgacaagcaggcgctgctgttcaagcacatgtcccggcaggcttcgaacgggacggactcgttggaggacaggtcgaagccgtagtagtcagcgtgaggctgctcaacgaaggtgaactcctttccgtcgtcggtcgtcaagaacatgggcttgcatcctctgttccagttcgtcggatcgaccatctcgtagtccggggggcat

SEQ ID NO: 199147 - DNA, 240 bp, Zea Mays
ccacgaatttgtataaaaaagtcggccgatacaaacgagaaacctcaactggctaactcgtccactcctttgactccaacgggccagaataaccaggaaaagaaaaggcagaacccaaaccctaggcttcaaaagcggccaacgaagatccatatccgcagtcacacgcaacgcagacgataaccccgcaaccgttggcacaaaccagaacaaggcagcacggtgcacccccatccccgg

SEQ ID NO: 199148 - DNA, 299 bp, Zea Mays
ccagagcccaattcgctacaccctgtgtgcgtgaaacctgtcgcggtttgctgttcagcacgtctgcctcccgcaagttgtgtgcaggcaccaccgcaaccaaccgccatttggtttcgctcaacttcggcacttcgtgagctctggagtcacagcatcgatgagcctgagtgcctcctgcctcctgcctcctggaagttgtagctcaggctggcgttcaacgccgtcgtggaaagtggaagccccctcggtaactttgtttcgccaaagaatcaacgtagggatgtgatgtcttcaaa

SEQ ID NO: 199149 - DNA, 342 bp, Zea Mays
ccttttccaatcaggttggattctgagaagtcccttgttgcttgcgctagatcattgtaagtaactttctcaaaatgctcaccaaaagaaagttgtgactgatgtgctcttcttgaagtcttcttctcaaggactaaaaagtagacaagtaataggagggacatgaacccaaatattgggatcaatatcttaatcaaatagcttatgatcgtcgctcttctagaaacagtagggcatgaaggcatatgcaaatccatggttcctccacacaatcctggattgccatccagtgaaacaactgtagcgttatcgaatatactagcttttggtatctctccttgg

SEQ ID NO: 199150 - DNA, 804 bp, Zea Mays
tacattctatgtttgaccactttattggaggcaccttttcagttctattgaaagctaaccaattaataagagcacattaggaacactcatagatgcatgcttgaagaatgtagtatgcctagtaaaaaaactgtctcaaatcctaaacgccttgtattatgaaatggagatcactaagttttatattcattttctgtacatgcaggctggattatttttccttaagcatgccgaagcagtaggaaaagagataccagcacaagagcttcatgaaatattattgctctctttacaatggctaagtggaactatgactaaatcctctccgtaagcttaatctttttatttatgttcacattgtgctcaatcttatcttctccttgccgattagcacttccgttttgcagggtctatcctcttcatcttttgcgggaaattgagactagggtgtggctcctggctgttgagtcagagagtcaatccaaggttgatggtgaatttgccacttctgctgttgctcataacaaagctgttggaaacagtagcagtattatagaacatactgctgatatcatcacaaaaatagacagtaacatgagcttgccgcacatgaaaattacagaaaggaatagcacacgggacagtttatcataccaacatgtgcaactctttgagtctaacagtgaagcatcttcaacaacaataaataacacgcgagcaaagcgaaggatgaaaacaaattcaccacttaaacgaggtgtcaatgacaatattgaaagtagagctaatgagctggataacaat

SEQ ID NO: 199151 - DNA, 384 bp, Zea Mays
gtaaaaaaagcataaaattaacagggtaacttacaaaagcataacaatgtgatatgttacatttaaaaggaattgtgtttggattatgaaataggattgttgccgctttgtattggtccaactcatctgtctcaggcaatgaattgtctagaagtgtgtggagtacagattcatcaaaaggttgaggattgcgactgtcgttcctgttcctcaaagttgagtattgactgcaataaacaatataaatggagtgagtgtacttgggttgatctaatttgtatatgaaaatggtgtatgtaagttacaatagtttaccccaacattaacatcaagaaccaaactgtttgaactcatggaagtctgctgattttttgcatcatgaat

SEQ ID NO: 199152 - DNA, 362 bp, Zea Mays
ccgccattatccggacaggtaggcggatacgtctcgacgcgaccgccaactaactgccgcaccgacctcacttgtatgtactgtttggcgtctggacacgagtcatgactcatgaggtggagctgtgggtactcggagattgttgagctggtttctgcctatgaataagcggtggcctgcaggctgcagtggtgcgcggacagtgcgtacgtcggccaggacaggcaaatatctctccggatacacccgctgtaatgtgcccgcgcccgaaaacgatggatctcgtccccaatatgtgtactcctcctacacgggcagatcaatcatgccggctccggactagaggcactgcgaactgcgat

SEQ ID NO: 199153 - DNA, 268 bp, Zea Mays
tatcacagtgtaattcctagaatcggtggaccaccaagtattttgatgcatcaccaatttgatgctgtggaaaatgaagtgcagtgggatgaaggctgcatgaatgatgaagagacacgtgttacacacactacagcacagaagccttgttgctgctcagtgacagatgttgctgttggcctaagatacaaagaaactgctaagtatgtgccatcaacttcaaaaggctcatgtaagcctatgcctgaaagatctcctcatgttgctg

SEQ ID NO: 199154 - DNA, 358 bp, Zea Mays
ctcagaactcatgtcgctaaatctttcatcaaacaaattcagcggcgaaattcctgaaactttaggacatatcgaacaattaacggtcattcaaatggaccaaaacaatcttactggaaacatccgtccacattgaggaatctatacagcttgagcttgctcaccccataacaatttatccggcctaatgccaacttttctaagtggtctaaatctcagtaaactagatctatcctacaatagtttccaaggagtaatacctacaaccggtctattcgataattctacagttgtttcgctagatgggaatccgagattatgtggaggagccatggatttgcatatgcctccatgccat

SEQ ID NO: 199155 - DNA, 522 bp, Zea Mays
ccgtggggtactacatgcgtgtatgataacgatgtatacctaagtaatagtgaaccgactaatcttatcttcctacaatcttgccgacttatcctcatttggttccgacgtccaggggtgtcgcgtgggagaatcggatcaaagctgtggataacgtttaaatccaacgagccacctgggcccgagtctgctcattccctgcgtcgacccattctgccagcagttctcccctggcccacgaagggacggcctcgcgagtcaacaggcccaaagcctttcgcaaggccttcttgccttctagtggacccgggggatatccgtccccccacaaacgccaaactcaaaccctgcaaacaccatcttagatccatcatggtcagctcccacacaactgcttccgctgagtgtgagtgcaggttagctactcgactctcttgctccctaaccggaatcgtggaccccattcctaaacaagtccagttgtaacatcctgtccactcctagacttctggcagcactcta

SEQ ID NO: 199156 - DNA, 349 bp, Zea Mays
gattaataaacaaactctgcagaactgtaagctccagacttcatttgtattatcatctacatttgcaacatgagaacttggtcttcgatttatacctttattagacatcttatttgcaccctatttctcatatttattgttttccctttgttcaaatcaaaaggtgttatgacttcattattcgcatattattctacaggaaatgattgcttgctccacgttgttcgggagaaggtgcggccgtgtaggtgaacttgaaatattccctttggaaatgttgttagataattcggccttcaaaattgatttggttggggtgatagcagcagctggagcaagtgaataaacg

SEQ ID NO: 199157 - DNA, 384 bp, Zea Mays
gctcaacagacatcttattactgctttcttcatcatatatttcacgggatggttcaagctgctcaaagccctgaacagtcaagtcaccgaccattaggcgctcgatacttgacacctcatcccttacataaacatcatcagtgacatcgctgctatactcgtacccttcagaaacgctgtcttcttcagtgcttctctgctcttcagcaggtgacggtagctccaccacggtatcaatcgaggctatggccttctccgctttcagcagcaccatttccgcatcgttgacacgctgtgaggcttccatctcaagagccaccgcctgctcagccagcaccattatattggcaacatcttcttcggcgttggacgcatccatctggg

SEQ ID NO: 199158 - DNA, 1011 bp, Zea Mays
gttgagcggagaggcagtgtctgaagaactctaccaagttgcgcagactgtatatactctatttggtggcgatgacacggagtatgttggtgctaaaaaagtcctttccaaaaggtagcaaacaaacatgccatgtctctcttttttcaagcctcacaaacttggcaattcgtttggcttttgtgctcttaaatgaggttcaattctatgcattgcaactcgggagctcttaaactgccagtagtaaattaccgaggtctagatggcagatggccataatctcctgggcaatagtttggttgcatcaattatttgagccgtgttacatcatctttcagaatactatcactctgcgtggttttctgtatcatgtggatgctataagatcaagttctttctgctggattcacactacttacatggtttatgtctcatcaggaatgagttggagagccttgtgggctacactgtacaagactcagttttgaaaaagctagctcagttagctcagaagctcgattcccttcaacgagcaagtgcctatgaatctgtacacagaatagcggatgatgtaaatgaaaatgatagaattgaatttggagcagacttcgatttcaagccacttgcccgtttcattgttgatgtttctcttgacgcacccttagaaagtgctgaattgggcagtggtccatttgaaaaatggcagtatgatgcttggagcacatccacaactagtcattcaactgctgttaggggttctgtgagtttgaggtggctgaaagatcagtgtgctttgataactaaaagtggtggctcaatgctctcaggagatgaacttgcaatgaccttgtgcagagtgctcctatcaaataaagcaggcgatcaggtttttaacgttctactgaaaattgcctctgttttaatttttgtttctgcaatcatatggtgctcccactttgcagatagctggtgaacttttggacctggttggcgacaccgcttttgaaatag

SEQ ID NO: 199159 - DNA, 522 bp, Zea Mays
agtgtgaaggacaggataaacatgtttgagagccagaaaaaggagcagactccaagttctggtaacagcaactcagcaggtactggtagggtggttccagggagaggtgagcaccgcagggttccttctggggcctccatggagaagttagttagaaggtggagcagtgttagcgacatgagtattgatctcagcaacaatgagagcgttaacataaatgacaaaaaggacaatggaactcctgttgtgactccaacatctactgatttggaggccaactctaaagcaaaagctgatgtggactctaatggacagaaggatttagtcacatcacactcctggccttatcaaaaggataatgtaccaatggatccgactaccacagatttgtgcccaccctcaactttaagtaatacacttgctcctcatagtgatggtgcaggaaacgacatggttataaactctagcattgagagtgagtcatcctttgggaaagaagcgggggttattcaaggactcaca

SEQ ID NO: 199160 - DNA, 315 bp, Zea Mays
agcctgttaaaacttttatttctcgaagcaaacgcaaattcgaaagtcaatctcgtctcgcaactcccgtccagactcatttatccaaactctcgacaattgtgatgttacctaatctatgtccgaatccgctctctcgatagccagtctatgtccaaatatttaatctgaatccgcattctccatcggaatctctatagtatcaacctctaattatttcttatgcaattcagcttgttatatttatgtcatcatccatctctatctatcaagcgtattctaaagatttcttaaagtttgaaccaaatattcgtg

SEQ ID NO: 199161 - DNA, 295 bp, Zea Mays
ttgagtttgcctgaccggtattccaccgtgatgtcatatccaaaaagcttgctgacccacgtgtgttgaggaatcgttgacaatcgttgatcgagcaggaacttcaagctataatggtcagtccggactgtgaatggtcgaccccatacatatggtctccaatgccgaactgctttgaccaacccaatcaattccctctcataggctggcagtttctgatgatggcgagacacaggcctgctgaaaaatgctatggctccatccccttggtgtagaactgccccaaatcctggtc

SEQ ID NO: 199162 - DNA, 720 bp, Zea Mays
agtaaaagggcgcttgagtgggatgaagtgggaatatttagtaaaacgatccaccactactagaatagaatcaaatccttcagaccgtggaaggccctcaatgaaattcatagtggtctccttccatgccccagctgggatgggcagggattgtaaaagccctgcaggtcggtgcctcttggttttagcttgttgacagatcaggcattgttggacaaagtcagccacatcttgtttcatgcccttctagacaaacatgtgcttaaccttttgatacgtcccttgaataccagaatggccccaaccgcactggcgtgaaatgcatcaataagtttgatgcgtaaagatgagttgttgccaatcgatacttgtgtgccacaccctgatggaccgaataccccctggcatcaggactactaatcgccaactgctgcagcaaggattgtgcctccggatcagtaacatatgagttgagaacctcctgtagccactgaggttgaatgatagacaaagcatgaagatgaagtggagagtgcagacgagatagagcgtcggcgacgacattatcgtgccccttatacacaatctggaattggagccccatgagcttggtcattgctttcttttgaagatcggactgcaggtgttgatcctccaagtaacagagactacagtgattagttttaatggtaatctggtgccgttgtaaatataaccgcc

SEQ ID NO: 199163 - DNA, 311 bp, Zea Mays
caaccaaacagacccttagcctcgcgtgctgcactttgcacttttaattccacaaatcagcatggcaaagggctgcctttaattatactccaccccacggttagcaccagacactcatgattagcgccgcgctaagccgtattgtagtgccctaaaaatccatctgcttgttatcatggtgaccattagctgtggcctgtgggaactgggaagggagcgggtgcagccgtggaggttgggggtaataatgaatcacgattcaaatatttatttatggtttgtaattaatattagtttaaaaataagtaaaa

SEQ ID NO: 199164 - DNA, 667 bp, Zea Mays
gttcacttgctataaactcatgttctaatttccaacgttcaactggaggaaatgatgaatgggaagaagcaccgtacccaaataaagtgtcacctttggcgggcatgacgaatcgcaaacgttccacacattcaaatgcttcctcacctcctattgcctgggtagggcaacgcccacagaagatgtcacggacaagaagagcaaatgttgtttctccagtgtcaaattttgatgaagtgttatctgaaggatcaccacttgacactgccactagatcagcacctatagagtctggcagtgtcttgctgacaaagaacacatcaacaaccaaaatggatagcatcccatctcctgctgggttgtcagaaagtgagggatcggctgtggctgaaagcaagtccaaggagaaaaccatgcatagtggtgaagtggggaacgagggtgcaaatacagcccataatgcaatgggattaatatttttgtcaaataaaaataggattcctttgaaagaagagctcgaagatggtggtgttcgtcgtcaagggaggagtggaaggggtgctatgcatgtcaaggggtgttctctaatgccaaaagaaaaactggtcactgcagaaacaagaaagccaataaaaggtggaagacctggatctgaaaagaacgagag

SEQ ID NO: 199165 - DNA, 1461 bp, Zea Mays
ggaggagaaagtaagggagatggttgaaatgaagcagcgaagcatggctgaggatagtcagaaaactctagaagccctgaaagataggtatgcaaaatcatctgtagtactacctttggatcaaaccaggtgctgttttagagttggccacaagaactaagaagttcaatcatacggccattttactctcattttattattacccagttgtgtcttctaattggtgcgtgcatgactgcttacgtgcaacagcacgggaaacgagatatgcatgtggataatttagttaaattatgaaattaagtaggggtaagattggaaatttggctaaatttccctagaaactgtagaatgacatgtatttcgaaggtagtagaagaggctatactacatctatgaaaaaaatcgctctgttagagtgttagtctgttatcacctgaactgccatatagaattcttgcctgacatcaaaggctaattcatgtaccatgactcatactgtatattttgaccttcggcttgccatacttgtagggaacggtcattgcaggaccaactaaggcaagctacagaaagtgtaaagaatatgcaaaagctacatgaatcggcgcaaagccaattgtttgagcttcgcactcaatcaggtctctttccaaccagtgtgatcatgatcatctttgtgacttatattttaaaggttatagtgaattgaagcatttcatttttttccccagaggaggatcgagctgcaaaggaggttgaagtcagccttctgatggatgaagttgaaagggctcaagcacgattagtcagtcttgagagggaaaaggtagccttgtgatttgaaattccagtttaatgcttctgagttctgactgcttaacatgtccaacatgttacaatattttttaccaccagtcatgtgtgaatggtttaacatacttactggtgtcagtttttttggtggccatttctgtcctttattttttccagtttctgtagaaatttgtctatcagaatcatgtataaaatctatgtttccgtggcacgcaagcaagaggagcttgttcccacatactcattgttggtatgaggataggacattttggaatatgatttgaacttggagtaaactgtaccaaatctttcctgatgatctgcatccttaagagtcagggccaaattaactaaactatgattcaatcattcagggactaaatagtgttaccttatattgaaagtttagtgtcaaacactaaccacatttttctgagaaataatgctatgtagtggtaccgcgttaacgtttcacctttccttattcattatgttagcatcaaattgtggataacttcaaatgtgtaaaactattgttttgctcagtgcatggcccaagataacttttcctattcttttttacttgactacagggggatctgcgttcacaattgcagacaacta

SEQ ID NO: 199166 - DNA, 3041 bp, Zea Mays
cccagtccccacacgctagtctgtgctgtgcgggtgcccctcccgcgtcgcctccctccgcttcggcatttagcgctgccgcgagatatcgaggacgaaccggagacaggatggtcaccgtcgggcgccggcgcgggtttgtcaccttcgccgctgcggcgatcgctctgatgcaggtgagtcccaagctcacgattctcgacgggttttgtagtgtgctattggcgccgtggcgcatgagtgtcgtcgggtccctccgcagcggccgtggctgcggccgccgctccgagtggccggtgttttgggacgaggttttggtcatgctttgggttctgagcccacataaccctctattgggttgccaatctcgcattccttcctattttttgcatggctgcatgagttagatgcaattttggttggaacattgcattgtgtttgccttttctgacagtgtcaaaggttggcgaattgaatgtcaattatcaaaatctctcgagttggaacatccgaacttggaagagtatctgatgagatgggaatgccttgtacaagtatagtcagaccagtttatactaccagtaactgacatgtatgtatgggggttttagtttcggggatcgatgtcgtataatttttgcctcattggtgttggagttattttcctcggttgggtcaacaatttagttcgattttagttgaagccgacggaatttagttcggcatagttggttaattttttttgtttcactgtttgggttatagtaagctatgcttgcctccttcgtcataactctccgtttttgttttatttttgctttgaaatgcatgctatcaggatatatcttacgggtttgttgtaatttttcttcttctgattttcccccttttatcacatattgatttgaagggaatctgcttctttaaagttggatggtcaacttcgattcttgttatgagatgtaatgtaatttgttgctgtaattgtccttgtacaggattggaacctcgacactttgcaattcgtgtcgtgatgttccttagttgaactatctcttttgcaggtttcacatggaacttccattgtataattaatctgtttccacatgttttccgcatttcgaccttgagaattaattgcattcatgtggccaataagccaacaactgtattccaattgcaagctattcagaatttgctaggttatagtttctgctgacttggcggtgtctgcattgaccttttaattttagctatgcaaattgatttctagactatatttctgaagtatgtggattaaattatgatcatactcccccctgaggatttgaaaccataacaatatcacccaatcacatcccatgtattttcctgcaaacactgctagtagtttctatttatttacaggggtgaaagagagagtatgcagttaataagggtaaactatgctgatacctaagatatcactttacttttccgttatgtgtatatggagcgaaaacaatatttaatttggatcatgtatagtgtgtaagtaggctatcatatagataaaagtacattgtacaagcgtgttgatatggtcgaacttcactgtgattcgggtggtctaaataacatctaacttatttttactatggtgcagatcagttatctactgttcccgatcagtgcgcagcaatccaatggctcaaggtaacttgtcagtgacctgtgttatactgattgtaggtcagaagtctaacatatgcttgattgcttctagaatatgctgctgtattttactattttacatgcctatacttggtgttccatattcctggagcccttggtggtcatctatcttaccattttgcttttgtagggttgtaccagcagaaggttactgttccatgtacggcatttgtgcacaacgaagtgacgggaaggtcttaaactgtgcaaatgcaaccaaagctgttaaggtgacaaactgacaatatgatccttggaccttgatttgaatataacatagttaaagaaaccctatatctttgaaaaatatttatgattattcaaatgtggcctgtttagcaagtgttttattgtttttccagccagacacattgttttcttcaaggatccaaagtttgtgcccaacaatcactggcgatgtctgttgtactgtagatcagtttgacacattacaccaacaagtccaacaggtaaatgtgctgattgctgaagatgtacatggaccatgcacttttaataagcaaaccaatgtggtaataccacttatgtttgatataggtcaaattatcaaccagaaaaggcacattaatgagtgcttatcattcactgatcgcagttaatcttcagtaaagttgtctttgcagtgtatgaatatatatatgtatatatattttgttttttcaagaagaaatgtttggtgaatctgtaaccagctaacctgaaccttcttattttgttagtgacaagttcccttttattttacatgaggttcatgtttgcttcataggttatatcctccactcctttggtgctaatgcatacttctatctaccatcatgtagagcctctgtcaacaaatacatttacctaattgttgattatttgtttgttgctggtctttgtcataacatttgcactgtatttcctaatagacagtgctgcagctgtttggttgcatttttcagtatactattttatattaaatgtgaattgatgcctattttattgtacagtcacaagcctttttctctacaagttcaatgaaatttgaatatatccacaatgagtttctcttagtcaaatgtcttgattatttttttgcacgccaagtgatctagtggctccttggtgacttctactctagatgtatgttcaatacaaaacctcactccgtggtctgaaaatgtcaacatttttcaggccgttccgtttcttgttggatgcccagcatgcttgaggaatttcttgaatctcttctgtgagatgtcttgttctccaaaccaaagcctcttcattaatgtgacttc

SEQ ID NO: 199167 - DNA, 277 bp, Zea Mays
gaagaaaactgtataaacaaaagaagcaaacatgttgctaagttcttactgaccgaatctaagccatatgtactttgtcgaatgaaaatctcctcgaagggtagtggcgccaggaaggggacaatgttaggtgacctctcgctcgtcaaccatcgaggatgggtcgcattgttgcgacgagcgagatcggccagcatcgcaacgacgatgagcagggtgagggcgtcgggaaggggttgggcttgagcagcgttgtgtgtcgggaaggaggcggtgg

SEQ ID NO: 199168 - DNA, 808 bp, Zea Mays
ccaatttgctgataaaagaattgtatgtgcattctcatggaaaccaatcaataaggttttagttttcttgggccttgtattctttgttcattgctttatgtaaatttttattaaatgtttgaatctttgcaggcatcaagggaaagatgcgtgattatcaattagctggacttaattggcttatacgattgtatgagaatggtatcaatgggatattagctgatgagatggtatgctacatgtgttaatcttgattaagatgatcttctactctattttgttttgtttggcactttggctttgaatgcatacttttttataatttagggacttgggaaaacacttcaaactatttcattgctgggctatctgcatgagttcagaggtataactggtcctcacatggtggttgcgccgaagtccacccttggcaactggatgaaggaaatccaacgtttttgccctatcctacgtgctgtgaagttcttgggcaatccagaagagcgggttggtctcaagtctattctttaatcccttatggaatttttactgccatgttactgaatactgatctcttattcttctgtgccagaaccatataagggacgatttgctacagcctggaaaatttgatgtgtgcgtgactagttttgaaatggcaatcaaagaaaaatctgcgttgaggcgcttcagttggcgctacataattattgatgaagctcaccggataaaaaatgagaattctcttctatcgaagactatgaggatttacaacactaattatcgtctcctcatcacaggcactcca

SEQ ID NO: 199169 - DNA, 349 bp, Zea Mays
acggcagtttaacaaaagataacatcctgtgctatgaccacacaggctgacttatgaactggactacaaagggaacgtttgtggcgataagcatggcaacccaaatttgcaggagctggatgttagatactggatgaatccgaatcaagtctaccaaagtggactcaagaacagcaaggttaacctggctgatgccaaagccatctgcctgatggagtgcccaaatccagctgtagatggattgaactatatttgtgattatccagaagggaacatagacctctctgttgatgattggatcaatagggactatgactattatgagtttctcacaccagacatgaagaat

SEQ ID NO: 199170 - DNA, 385 bp, Zea Mays
cctatttttgagagctcaagttttttgtttctagcccagtaggagcccttaaattcattccaacatagaatgcaacatgggacccactcgtcactatccttgctccaatcaaattgaccaatgaagtatgaactatgcatgggaggggcttgtggtcgttggatatcactaggcgttgggaagaattgcatgcgacgagtctcatcgggagaaggggttaggggtcgccaggaaaggagaaggccatgctaggatctcgaaagtagagccacacacaggaagaatctcgaacctaggatctcgtcggcatcatgcttgtgataacaagcactcaggccgtcggattgacgagcctctcctagtatcacctgacgcaccccagacg

SEQ ID NO: 199171 - DNA, 478 bp, Zea Mays
tggtaaagttgccatcaaaactaatgatgttgttggtcggttggccccggtctcaaaaaaagggtgggccatatctcctctcagcttgggatggcacgggaaattatgcacaagttgcagtctgctcaagatatcagacccttgtcagtgctagaaaattggccgttgaagcagcttgatggtcatgttgtggccctttcaaccttgcaacgttctatggctcggagccgctctaggattacctggttggctaagggggatgctaacactgccttcttccacctccacgctaaataccgcaaaggcaagaattttattggtaatctgttatccgacgatggtttaataaagtcaaggcatgaggacaaggaggaaactataagtgattttttccacaattcgctgggttgttcgtctgatcgagctcatactattgatttggatcatctccaaattccttctcatgatctctcttcgc

SEQ ID NO: 199172 - DNA, 402 bp, Zea Mays
gaagcaagcagcacgtggcacgagcacaggcgtggggatcacaccgtattctcgcctaggctgtcatcagttcctgggtccgccactgacgccaacattcccttcccccagtccttaacttctgccaacaccgccatccatggcggcattcgcaggctcggcgccggcctcgacgacctccttccctcctcatccatcacctccggtaacctcaaaaggatcctcgccggcctgcaggcgcacgtcatcgaggggcctcgcagaggcacgctacagtcacgggggatcgaatgaaggtggtggttgaactgcagggagtagagagacaacgccaacatacggagcggatgaatctgcttgcattttccatgcctggatacgatgtctgttggacacataaac

SEQ ID NO: 199173 - DNA, 445 bp, Zea Mays
cgtggagctgctgctgctgctgtgcataccgagtgctgttgtccagcacctgagctgcattcccagttgaatttacactgtcgtcaagctggtaccattgctgggaggcctcatcatacttccacccagggtacatggcctccaaagacatgggatctgctgaatccactgcagtgctgccgccgccctggtcgtgctgaccactgacattatgctgattggaggagttgctcccggcgaagaagtcctggtccgtcacctcggcggccaagctctgggtcccgccaaagaaggcgtgatccgaggccgtctgggtcccggccgtggtcacgaggaagccgtcgtcgtcgccggcgcctcccgagagatgagcaaatgggtcaggaccgtcgtccgcgccacctccgaaggaagcccactgcacctgcttgaccgcagtgtggac

SEQ ID NO: 199174 - DNA, 439 bp, Zea Mays
gttttcttaaggaactgctcacaacagtgcgcttgtcagatagttgtattctgcaattagcgaaaacatgctttactacattcttggtggataatatgcagctattacaattgaaagcgattggggttatttgcacggtaattttctgtctacgtgctcaatcttttttatgcacattcagttttcaaagaatttgctcacattcaaatccttgtgcaggtgttttcatcatacacacagcacaggagttacttggttgatgaaacacttcaccttcttcgtaagttgcagttttccaagaatgccgttagaacctaccatctagcagatgaagaccaaaagcaaatccagatgataacagcactgttagttcacttggttcagtttagtgctattgttcctgatagcttaaagggaacagttgattggaccactatcg

SEQ ID NO: 199175 - DNA, 260 bp, Zea Mays
tacgagacactgatgatcctaaaaaaggggacagcctgtgtatgtattctgaaggcagggacgaaccacatggtgaggtgaggtggtgttggtagggagtaggattgtgagcatcatcatttaatggaatgttatcagtgggaatcaatagttctttttttatggaatattacaggagatgttagagcagatcactgatagtagcctttaccaacacatgggatccacatgtcagaatggaggatgtgtgagagagaaaa

SEQ ID NO: 199176 - DNA, 340 bp, Zea Mays
ggaaaactgcagagcatatccaagtaaagagcagaggcagtgcacatccaagaggagggaagccgaagggagaggaagagatgcttacgtacctccgtgacctcatgacgccaggctgcagacagtaaccaacagagaaggggaaaagagccatgaatcaatcagcatacgaggaccagagaaggcacaaattaatggagaagatgaagggagactcaaatcaaaggagagaagtgttatcaatggagcagaagaggtggagcagcaagactctagcagcgcccacccccatgaaccaggtgtgtgccctcttctgtttccccttccctatcaattggcg

SEQ ID NO: 199177 - DNA, 259 bp, Zea Mays
ctcctaatttttatggccaggtatgtacatatcttgatgttagtgttgtttttctggtgtgtgttaatctcccacagcaccctcactcttttccattatactttaccactttacaaatagacccttcaacttgttcataatacaccaacgctccccctcaggatgggccaaatatatttaacattcccatcttgttacatgccaactcattatccttaggacctaaaccttttgtgagactatccgctacttgattacg

SEQ ID NO: 199178 - DNA, 539 bp, Zea Mays
acgcacgcacgcacttgtgcctctcctagtagcagattaattttacgttccttttttttttccaattcgattcgattgattgggggtcttctttcttcggttctgttacacgggttcaggaacaggtgggggggagagagaaaagagatgcagattgccacgctcggacgcaacaactcgcgggcggattcaagaggtcacgagagaacccgaggaggacgcgaccggcgaaggagaaggcggcggcgagggcgaagaaaagggtttcctcctcctccggtcccttctatgttctctctcctgggctcctcccgggtgggtgcgtgactaattctgatgcttgccctttctacctgtgcctatctgccgatcccctcccgacctgcccccacaaaagcgagacgacgacgacgatacgagagggcagagagagagaaggcgaggtcgggccgtcggggcggtggtgggccgtgttgcggtgtttgtttgctgttgcgattgctcgcggattcgctcgcgagcgcagcgccgcaatccgg

SEQ ID NO: 199179 - DNA, 559 bp, Zea Mays
ataagtcgaatcgagtcgatgcgtattttgtgttcgttaaattatgcttcgcatataatgtgtgattgtactcacggattcgagtagacacttcaagcaagtcaagtaggtttgtggtatgagttgtgtaatggagttaattgttttaggataattattgaaatgctctgttcgtataataaacatgtatgtgtccatgattgggaagtaaatgcatggtgattgtgagttggagactagtagtttacgatttgtatgatttggtcggtgtgcaaaaatacttgtgaatatgaatgtttataaaaatgttgtagtgtatgtggtgtctcggattttgataataatagacaagctgacgtgtatgatatttagcgggctgtgtcgttgctctagctagccgactcttagatgactttagttaagcttgtagtcccggtaaattgcttgttgtattctaaatgcgtatggttacggtcgcggatgaaaagtattagtgctcataggatgtctaatttaaaacgcaaatggttgggtgattgtcggggagaatgcgtcgttg

SEQ ID NO: 199180 - DNA, 480 bp, Zea Mays
aagctgtccagcggaagttactacggctgtatgccaaggtccacatgaaattgatgaaacatgtatgccctctaatggtccattcacgtgctttggtacccagtgactgatatcatttccatgacctaaaagcccaaatttaaatgtgccatccccccatgtgtaaagatctccagatagtgtaacagcacaagtgtgatattcaccacatgctacaagctcaatgttcatatgagaaagagcatcaataagttttggctgagacacatcacaatcaacaccatgaccaagccgtccccctgattcctcaccccatgagtatatctcgccttgtttagtaacaagtgcagcatgccttcctccacaagatatgttctgcacatcaagtcgcacggcaaattctaacggttttggtacaaggcagtccatttttgcacctgaggagcttccaactcttgaaccaccaccaccaagaattcc

SEQ ID NO: 199181 - DNA, 256 bp, Zea Mays
ccggcattgggcctgagaatccacattgaataatatgcagatccctcaaatttgtgaggttgccaatagaagacggcatggtggaaccccacgttatgttgcagtaataaagatcaagtgttcgcaaggctatgaggtttccaactgcatcaagtacatgcctagggagtgtgcaatcatgcatacttaagcttctcaaggccttgaaattgctaaccaaggtaggcgtcatctcagagaagttgccagagagtac

SEQ ID NO: 199182 - DNA, 500 bp, Zea Mays
gtttgactaggataatcctatttccctgccttttgacatccaccactccatccttcaggctcttatcaatcagtatacctactccatttttgtttgccactttttcttgagtaccaaagcttgaaaccagtgttctccacctccttcgctttttgccccttccattttgtctcctggacacaaaggatattaacacgcctcctgctcgctgcatcgactaattctcttagcttacctgtaagggaccctacgttccaactacctacacggatcctagtcggctcaactagcttccttacccctgacacccgttgagatagatgcgatgacccttgcacatttgtcactacactcggtgtcgatgtagcgcgccactaaggaagcgacgactcgatccttgctcacttgacaccgcatccaaatcatgacacagcatgccaccaagggggtggcggctcgacccttgcccatttaacaccgcatccaaatcatgacacggc

SEQ ID NO: 199183 - DNA, 291 bp, Zea Mays
aagacaccagagaagtttctgcaaagagtttcactcaaaaccttgttgacacacctgtaaagaaaaaagccaagttgaaagagaaaatacagttgccgtatgtggccaaggatcattttataagcagtccaaaatctgtgaaagagcaagaacaagagttggtacctttgcccttatctgccatcaggaagagttcatttcctaaagtggacagtgaaactgaaaagaggtgagtcacttgtgtataaagtacttggggaatgaaatctccagatcatatggtatgtaact

SEQ ID NO: 199184 - DNA, 381 bp, Zea Mays
aactgagaacagtactgccgctgcaagaacagtgagttcattgaataattaaaacaggcttgctgctgctatacaacagtgaacagtgccataacttgttagagaagcatcacgatcatatgaattcactgccttctcaggtgcagtcatgggttcgttggtagggaccaaggaaatggaaaccaaaaaatagctggattagaactcacgcaaacccattacccatgacaactgttagaataaaatgtgcttgtatatcatatcagactacggccatatcagatcaggggtccacacggttgttatataataaaggaagaccttaacagactctgattaaaaataggaataggatagaatcaggtttgatctgtcccaaag

SEQ ID NO: 199185 - DNA, 386 bp, Zea Mays
atcagctagtgtacactcgtgcaatcttatgtacagtttccaacatcatagcttgcatgaccaaacatatcctagctaggttaaggtactattgtcatccccaatgttacctggaccactttgcaaggacctaaccaaatgcaagataatcaatcctagtgttaaattagcctaactactcaatcaccattataacaagaatgaacatgctaatttggagatagtgcagaattacagaaaaagaagcaatcatatcctagcttgcatgaccaaacaccaagctgtacagatgacacaaatggaaccaaccattcaagttcactcaaggtcaaggttcaagaaacccagttgaaacagatttaagcaagcactaagcttccactgac

SEQ ID NO: 199186 - DNA, 434 bp, Zea Mays
ctttgactccgcaaccccatgccgacgcggatgcggatcccgcacacctcgccaacatcatcattccgccggagtcgtcgcccaggcgcatcacgcgctccatgctccagcccaagtctcgccttcctaccgccgctcgttctcctgacaatgcggcaccgctcaaaccaaaactggaaccgccggaagaggaggatggcaagccggttccagcgttgaggcgcttcaccagatcactactggtcaaggacaaggacagcaacgacgacgacctctcaggcaccaccaccgccagcaatgcctcctccccttcgcccaaaaccaacaccacaagtaccagcaggagcagcaacaaggggaataagaatacaaacaagattcccaccaacctcagggagctgctcgccaccggcatgctcgaaggtcagcccgtc

SEQ ID NO: 199187 - DNA, 367 bp, Zea Mays
cggcgttcttgacggcgtcggcgaagcactcggcgcagatcttgaagtcgcactcacaggggaggatgtcgtcgccgcgctcgtcgctcatgacgttggcgtcgcagccgttgacggcgcaggaggagcccctggcccccgccatctgcgggtggctggcctccgagtcgatgaccttgtccatgaggtgcgcgcgcgtgacactgttgaagccgcccgtgaagagggagttggagacgtactgctcctccacgcgggcggagatggccgggtccatgggctggttgtcgggcgtggccgggatgtggacgtggtagctggcgaactgctcgtcgcggtcgggggacatgtcgacgccggcggcgcc

SEQ ID NO: 199188 - DNA, 630 bp, Zea Mays
atttgcatcaatgcggtgttcagatgtcacagaactagcagatgttcggaagcatttcaaaagcaagtacggaaaagagtttgaagcagcagcccttgaagtgcgacctgacagtggtgtaaatcgtctggtaatccagagtgcctttataagtttaacttttatgaaagagtttgcttgttttctttggctacaaaaggaatgcattttgctgcgatttgtcttaacagttcatacaattatgcttgatacagataattgagaagctgtcagcaggagcacctgatgtgcagactaaaatcaaaacattgagctcgatagcagaggagcacaacatcaaatgggagccaaaagcgtttgaggagaaactgcaacaaccaactgaaggtcatctggtaagtaaatgatttagtcttttcacctttctgtccttatttggatattgtggccctaacgattcgttatattatttgttagtatggttctgcaacatattctggaggaaatacttcaactatgggatcatctacttctagcatatcaacaccacagcctacatattcaggtgttagtgcggcacctgtggactcagccactatccatgtgccagcaaataaaactgcatatggc

SEQ ID NO: 199189 - DNA, 471 bp, Zea Mays
gtcgtttaagaggcgacgaaatcgacccatcatggcacggtccagattactattatttttgtcttccgctctatatataagattgaagtcgccacccactgcccaagggcctggacaggaagctctgatggttctaagctcctgaatgaaagccaatttcagattatcggactgaggaccatagacacctgtaaaccaccagggtgtgtcaccaccgtgtgcgatcagcagcgaaacagagaaggagtcgattcttgaattgatgacattgcatactgtccctttccacgccaatagaatgcctccacgagtgccttgagccggcaagaaaataaagttatcaaactcggatcccaacatagacatgaccattcgcctggagatggcttcctttttagtctcctgcaaacacaccaagtctgggcgtgtagaaagcaccatatcccggacaccatcacgcctcgacttacg

SEQ ID NO: 199190 - DNA, 469 bp, Zea Mays
gttagttttagcttaagtacttcaggtacaacttttggcataacatccatgctgtacaaccttagacgtgcaatttgcctctgatctctaagttgtaccttacgttagttaaggcctgaatgcaataatcttagtttttcttaacacaaaaaggataattgagctgatgatgaaagatcatggcttaaacctgtgaattaaactgtcagatcattctagtggacatgtgattaacagtgagcaagagggttgcaacaaatcagatggcagacacatgtaaccagttgctaaacccgacaccctcaaggcaattcacgagctgtaaccgcaggagccgtagattacgatcgtgcgcctaatatgagattgagatgcaagcttcaggacatgcgaaaatccataaaacagcaagcacgggtaagaccgtacgttggccttcttaaagtttccaagagtcccaataccgcag

SEQ ID NO: 199191 - DNA, 664 bp, Zea Mays
tttcttgattgatggatcttcaatcacaccacttcctgtacaaagtgtgcaagacatacttgacctgagagatgacaatggccatgatagacgtagcgaccttgtgggaattgttaaagacatgctgtcaaaagtttgcttggacttttctaatggagacacacataattgggagtctatgttggaagaaaaccggaaattgttgtgctttggagcactggtattaccatggcttttgaaattgttcagtaatgaagcatgtgatggtgaaataatggatcatctcactaggagatgtcgattttcaacaaaagtaaaagcagcaaccagtatcatatattggttagttataaatggtttggcccccaatgataatataatcatgattcttgcaaagtctataatggagcctcccattgatgaagagtttgatgtacttggctgctcggttcttttgaatctcatggaccctttcaatggagtgaaaataatagaggaagagctaaaaagacgagaatcttatcaagaaattagcagcataatgagtgtaggaatgttatatagttccctcaataattctaagaaagagtgctccactcctgaacagaggagaaacctgttgcttcacaaatttcatgagaagttcacctcagccgataccggt

SEQ ID NO: 199192 - DNA, 505 bp, Zea Mays
acatccactagagggtagtagagtgtagagactggagtctcaccgagtcaattagctagaccttttaggttacctctggaaaccatctttcctttatcgcctccacagctgctgccactaactaaaacgctctccaaagctctagttctagttccccctagacttcgtaacatgtgggcccaagttcgtttcagagaaaacgtaacagtctctactctctagagtatgtaacatttggttggttggtgatggtgatgcccaaaaagatcctcggatatccagtgcaggggtgtatcaaggtgttcgcaaaagatcgtgtaaaatagagagtttgtcctgtaaattacaccgtttacatagcgcatcggttttctcccctcatacgcaactcaattttccaatacgaagagaagtaatagtaccactaagggcaagtacaaatccaatgaatatgccatgtcttaagtttattttaggggcttgagtgaaagatacaccaaggaac

SEQ ID NO: 199193 - DNA, 807 bp, Zea Mays
caagattttcattccctgcttgagtttcacaagggcatcaccagtgatccgaacgaagccttgagcaattggaaccccagcatccacttctgccattggcatggtgtgaactgcagtttcactcgaccatatcgagtcacggagctcaatctcaccggccaaaacttggctggccaaatcagctcctctcttggaaacctgaccttccttcatacccttgatcttagctacaatagcttcagtggccccctacctcttcttaacaagctccgaaacctggacgtactctttctgggaagcaaccatttgggggatgttattcccgattggcttacaaactcttccaacttagttgatctagatctctctgaaaacaatctcaccggccatattccttcaaacataggcttcctaacgaagctagaaggtatagccctttacaataataatctcaccggtgtcatcccaccaaccttgggaaacatctccacactagaggtagttgatttttcagcgaatcaactaagcggaagcattcctaataaagtttggcaaatctcaaacataacaatgttaaatctaggacaaaataacctatcaggtggaatcccagatactctctctaacttctcttctcttacagcattaggcttgaacaacaataagctaggcagcgcattgccatcaaacattggcgatgtgttccgtcatctaaatgaactatacttagataacaacatttttgtgggtacaattccaacttccctaggtaatccttcgagtctagaagccctagacctatcaaac

SEQ ID NO: 199194 - DNA, 749 bp, Zea Mays
agttcaagaggaagcaagtggatgtgagcttctggtcagtcaaattgataatgtgtgcccagagactccattcagtgaactactgagatctcttgaattgcgacatgaaggagtcgatatgcctgtaaatctacaaggaattcttgttaatcagtcgtatcttgcctcacctagtgatctgaataaccttctcttctcaccagattcagattttaaacaaacaatggttgagcttcaaggctgtactgatttcaaaactgaaccctggaggcttgataatggtggggagtccttaaagagagttgtaacatacacaaccgcaccatcaaaattggttaaagctgttcacgcaacagaggagcagtcttatttgaaggctgatggaaaagagtatgcagttttactgagtgtgagcactcctgatgttccatgtggtacttattttcggacagaaattcttttccgtatcatgccaggtcctgaacttgattcacagcaacagacatcacatctggtaatatcttggcgcatgaattttcttcagagtactatgataaaaagtatgatagaaaatggagcaaggcagggcttggagcaaaactatgcacagttttcggatttactatcacaaaagatcaagcctattgatgtagaaggttctgggtctgacaaggaacaggtcttggcctctttgcaaggaggcgaggaatctgattggaagatagcatttctgtacttctgcaactttg

SEQ ID NO: 199195 - DNA, 216 bp, Zea Mays
ctccagtcttgattccgcaagacagaatttagctgcaacatttgtaaatgcatttgtgaatgctgggtttggcaaggttagcttttgagacagttactaatgtttgtgaagaaagacttcattttaacttctttttattactttgtgcaggacaagttgatgaccgctccatctgattcacccagcagcgggtcttccggaaattggttatttaag

SEQ ID NO: 199196 - DNA, 295 bp, Zea Mays
tccacgtatatcttcacgcttgatatgggcaatttctgaacactttgatcttgaaggtctggatccccttttagctgatgacccagaggacccactgaatattgtcatatctaacatgcacaagatattattcaacaccgattcatctgctactacatcaaataggatacaagatgtgcaggctgttctaatttgcgctcagcggttgggagcaagaaatgcaagagcaggccaacttctcactaaagaactggaagagtttagggcaagtacttcagctgattctatgaccaag

SEQ ID NO: 199197 - DNA, 463 bp, Zea Mays
ccggccgtcgctctcgccgccaccactgagcccttgcagcagtccccgcagcgatccagattcaactccgtgggggctgccaacgggaacgccaactcgcaccaagcgtggcggtaataatagtggtggacgacaacaacagcagcaccgccccaacggtgggcagcagctgcaggacagtgcacagctgcaattcggtgccaaacctgcggcgcaccagctggtccctggccctctgtctacaatctgtggacagggaccatccacatgtggccaggcgcatgtcctcccttggcgccacctcgtcctcagcagcatgctttcatcgcccaacaacaccttctcctctaacaccaactgagggggttgacccatggctgcgcttgggttctatcaccccatggtcagcctgccctcctaggacacccatttgctagcctctgctttcagcacggagacgctg

SEQ ID NO: 199198 - DNA, 589 bp, Zea Mays
ctgccagcgcccccgatggtcgctcctccctcagagtatgaggccatagttataactaacttccatgcccaggcggcgggtgtctacaacatccactctccggttcccatcctcgacccagctttctccacttgcgcccattagtgtcacttcatcctccattcctcctcactgtccagcgctacgccctatagatgaccatgtcctcaccaacgctgcatccctcactatcccatcctggtggcagatgaatagtgtggtcctctcgtagatccttggggaccgtcactgttgagttgtaggatgttggcatggtggcactgcccgttaggcttgggttgccatcgaggagcagttcctcgacaaccgtgaggctcgtgctctccaccttgatgttgcttttcgaactttctgcaagggaacctctctgtcaccgaatactgtcgtcaaatgaagcgcatggcagcctccctctctgacctcgaggagcccgtcttctgtcttcaatcacatgctcgtcctcaacctcctctgcggcctcaacaagcgctatgatcacttccttacttggatcactcgctcagtccca

SEQ ID NO: 199199 - DNA, 439 bp, Zea Mays
cggagaggtgggctggaggtcggccatggggagaagcagcgccgtagaggaggcgcgctggggtggagggcaggaatcaggacctaggcggctgataccatgtgagagagttggaagcgtgtgtttgtatattgatgatgatagacagtacatgtacaagtatatataggggaggaaggtgagaggtaaaaggaagccatctacacctaaggaaagatctagaatacaatcagatcctcaatcatagtgattgagatcctcccctaatcctctctatctatatcagagacaacacttccatatagggcggccggcatatctgccaggcgtcagccaggatacactttctaacacgcgcattcaccacgctcactctaatcatccattagttacctaacattaaattagttaagtccataagttcgctacaacttatata

SEQ ID NO: 199200 - DNA, 1351 bp, Zea Mays
ggaacgggaaggccgcaaagggagagggtaggagcagcacgggggatgaattgccccgcaagtccaagtcatctgaggccagtggtagtggtagcagcttggagcatgacgttcatgtagtggaaaaaagtgttgtcggagaacaagttcgacactcggagccacggcagcatgttgccggtctaccacccacaggatcggaaaagctatacattgatgacactgaggtggtggtggagatcaggactcaattcgagcgtgcctcacaatcagctggtgaggtatcaaagatgcttgaggtcggaaagatgccttactaccagaagggttcaggtttcaaaggttggtaaagcttatttcacatttgcaataagaattcttattcttactgtgcacttggcagtatgaatgctaatttgacacaatcaatcatttagtctccgcaatgattgtttgtggtataccgacaatggaggaggagtttctgcgttttgaagaggacaaggcgatgggctctggcaacctctcctctacactacagaaattgtacatgtgggagaagaagcttcttgaggaagttaaggtatataatatactttacatatttggatttgttaggaatgttgtgatatgtgagattgcttttgggcatatgattctttctgcttacaccttcatgcttgtagatcttaattgagattgcacagtcaaaatcttgtatgtgaagcttccacattttatccattctctcatgttatcctggctttgttctatttataccttttggagttgccacttgtatatagaaattttagcttcagtttagttttgactttgtgacactaattacagatcaagtagctagtttaggttatgattatgaatgtgcctgctccaatacctagtttggagtgtctattcacatgctattagaaattaattgtgcttctaatatccttgcatttccccccttttcctttttgacaaatgttcgttcaagaaatgattgtgtctatgattttgtgctttcttttgcatggtctttatgttcccaaggcttcacgctgacaccagtgcttttactttgccagccaacttatgggtccatgttttttgaacaattgtgttgtttgtttgtattatgtcaggcctaataaaatccagtttggatttgttcattatttttttgtactgtgtaaactgatgtgacttttttggggattgacagacagaggagacaatgcgggtactgtatgacagaaaacgtgaggagctgaaaatgttagatgagaaaggtgccgaagctcataagcttgaggccactgaagtttacatcaggaagctatcaact

SEQ ID NO: 199201 - DNA, 504 bp, Zea Mays
tccgaatgcaggaacttgaagtgtactcacctctgccacttgcataaaatgaatgaccacatgaaagttctgagagaacaaggcgtcgctcactagagtatgttgacatcatctcatatagctgttgctcttctgcagtcctagtttcctcaagaacatcaaataaagaagacccaggaagctgcttcaaagttctgtgatgcctcctttttctttcaacatccagcattgtatcgttcttatcagtaattccactaataattagctgcctgacataaacctgagggaaaaatataccattgcggataagctccgcgataagaacatccacccgggtaaaacctgcaacgttgctaacttcatgctgatccaaccaacacacaataatatcatgcagtggaccagggctttcaaagatatcatttgtatccttcttctcatcaacattttttgcattacttctcagtccagaagaatcatccacagcagctgctgtcaaacaag

SEQ ID NO: 199202 - DNA, 308 bp, Zea Mays
ttgtaacaccacacgcaccattattcttgtaccatcggcatcaacctcggtcaaattcaaggttcagggttcgagagggtgccaaacaaactagaggaaaaggcaaggaagtaggctagacgggtagtggtagtggacaagacaacaaaagtggtagggatgatgtcgaccgtggcccgtgggtgaccaagaaccaatggtggtcatcgtctgaggcggattctatcacattgatggctcgacgctattgggttgggttagcctggcatgcatggcaggatctagcgtctgcaaccaaggaaggagag

SEQ ID NO: 199203 - DNA, 416 bp, Zea Mays
ccgccaggagggcaaggaggtgaggaggcagccgcagcgagggccgtctcagagacaacctttgtctctttggcgagcatcgattcctttaaggcaagcatggattgggccttgccgaaggagggaaacggggtcaagttgatgatgatgtcgacggtatttgacaacatgggattgaacccgcaaagaaggttgaggacaagctaggtattagagaccccatggtcggtgtcgcggagagagtcggcgagagacttgacgtgctggcagtagtctgtgatggaggaatcgtcctgaacaatggtgtgaaactcgttgctgaggtggatggcgcgagattcttggttggtgtagagatcgttgatggaagtgttgaggtcgcaggccatctgatgattgcccatggcaagatcgag

SEQ ID NO: 199204 - DNA, 309 bp, Zea Mays
ggtaagaaatgtggtaaggtaactacagcctactaggcaatacggcaaccaaaatagtgtttttctacaaggctactaggctaataagaaaaaacaaattctaaaaacctgcagaaaggcatcaccatgatgctttttagaaagttgctttcaccacaaccagataaaattccaatacaggcccaaatgagatctataactgagcagagctactagcttaatactgcacaaaaaatgaagccaacatatttgcaacaagaaaaattgtactgggtccttccaacttttgaagctaattatcatattaac

SEQ ID NO: 199205 - DNA, 214 bp, Zea Mays
ctttcctcaacacttagtgttagaagtatatttgtattgttgtattagggccaatcataccttgcctcccaaggcatctcctcctatatatgtaaccccatatgcatctaatacaatcattaacccttggcggcaatccctctgacagtatctgagcctaacagatccattctgctttcgctgcctctttaaccttctagggtacgctgcccac

SEQ ID NO: 199206 - DNA, 377 bp, Zea Mays
tcgttaatctagctccttcattttcatttgggggttaccacatcgccatggcaggtcacacctataacagtatcacattttgcactttcatatcaccatggagtttccaatttaatattacagacagacatgtatcttagtatattacttccactgatcagagactttttacagttgcaaatacattgatcccttaggggttgagatggaaactgccacaagggagggaggacgtgagtcagctgcacgtgccgacatacacatcacttcctgcctcgctgtccttgatcgagacaaaatcagaagagctgtatctatatgtactccataccttgacgtatgcaggggctagatccataccccggcctatctgccct

SEQ ID NO: 199207 - DNA, 263 bp, Zea Mays
cgcgcatggcgcgcgttagacactagtagatttcagaactatcatgaagcgcgtgctcgctggttgttagttgttacagagcaacagcccagggaggccaagatgctacttagctactaaaaccaactgacaacaagtgcacagcccagtgggccgctaagctgcaagaaaaccctcgcccctcgttctggattgagattctctgcagaggctgcgatgttgggccgtcctgccctgcccggtgggtatatgtaagctcagac

SEQ ID NO: 199208 - DNA, 263 bp, Zea Mays
atttacactggctaatcgaaataatacttgacttagtggactcaaactgtgttactcttctagggcatgttgtgcagtagaaacgacaggagttcgaatgatacaagctacccgtttcaccttgaatgtcttgcgacagggcttggtcgagtgtttttggtgcaactaaaatgcggactaagacattaaatagttatgcaaaaatcagatgcttcaaggatagttttttgtgtgtatcagatgcaaaaatcagatgctttaaa

SEQ ID NO: 199209 - DNA, 275 bp, Zea Mays
gtggtgatgagcaagacaaggatgatgttggtttagatgatttggatgatggttattgagtgcttgagtaacatttgtgtgcctgtggttgtggacattgcattctactttagttgcttttgtgctatgtttgtgattgtggactattagacatctcattccactttgtttgcggttgtcgacttgctattagttgaacttgtgttattgtggtaatgtggttgtggacatgtcattttgcacaatattattatgtgaacttatgttggttgttt

SEQ ID NO: 199210 - DNA, 465 bp, Zea Mays
aaagaagctaaccagagggcaagtgcagcccattattgacgaagttgctgatcaattacctgggtggaaagctgagttactatcaagggctgggagaatggttcaagtccaatatgtgatgacaggaaaacttatttacctcgccatggctgttgatttgcctccaggagctctcaaggctatagataaaatcagaaaggattcctatggaaaggaagaagagaggttagaggtggtcactgtttagtggcgtggggaagggtttgtagaccaattgagttgggagggctgggtattttcagcctaaaacaattgggttgggcccttaaaatgcgatggttgtggttggccaaaactgaaccttctaagccatgggcattcctacatatacacctctctgaaaaggttagatccttcttttcagctgtaacatatactgaaattggagatggtgcttcaaccttg

SEQ ID NO: 199211 - DNA, 322 bp, Zea Mays
tgtgagttaaagtgtcagaaaaggaaccactaggcaaagtatttccttcgattggcacaacaacacgagttgatgtaggtgggcttactgaccatccacacagggagtgctgccattgaggctgcggtgtgtggttggctaattagccaccaagtcgagatacagacttaaccataaccttctacgttttttcagcagaatatgtcggccatggacatcggtattgaactgaagttaaaagtggcccgccattacaaatccaacaagcaacagatctagaaacttcgataatcaaatatatcatagcaagatgtttaccacg

SEQ ID NO: 199212 - DNA, 415 bp, Zea Mays
cgttattcttacactgcatgcattgctgcgcaccgcggattgtgctccacttgcactatccaacgaagagtctggacgacaaacatgtacgattgcgataaagaaatgcgccgtggcaacgaggattgtggtttggaagaggcacgcgagaccgatccgtgaatccgtcccgtcctcacgttcacggccataacgtgccaagccctttcatcgtctaaagaggagagaccatctcgtactcacccaacctcctccgcgaacggaacaatggtgccgccgagccaacccgctgctgcaagaacaccagggccgcaagcacgatcgccgtgcacggcacgatgacgtcccaggcgacgccgtaccggtcgtaacgcgggctcgcgaagacgatggacggcctggagctcggcacgta

SEQ ID NO: 199213 - DNA, 245 bp, Zea Mays
gccaacatgcgcagccaaagatttttaagagagagtaattgggaggactatgaagcaggcgttcaaggggacaagtattatcaatgacacgggttgggagacggttgatgaggtatgtagctgtaagaaaagcctcgtcccaaaatttaatgggcatgtcagcatgagcaagaagagctaagccagtttccacaatgtgacgatgctttcgttcggccgagccattttgttggtgtgtatgtgga

SEQ ID NO: 199214 - DNA, 321 bp, Zea Mays
cctgttccaatatataccattcaatttgctcggtacactgctacatccatactgaagctagaccacttttgtgcctgcatcacctgttccattaccgtgcattcttttgcagacacactctccatcccagaatataaagtttaaccattttttattctagtcctataatataagatgtgctctatctagacatgtatacatcgacgcaatagcatagagagaattaatacattttttggcctttgaactagagatattgttgacacttttttggggcgccaatcactcaacacgaaccagcgatagtgctctctgcacagg

SEQ ID NO: 199215 - DNA, 847 bp, Zea Mays
gccgctttcagcaccatggagatgacccccccccttcctccgactgggtgatcgattctggtgcctcctaccacaccactcccactacaggcacgctctcccgctcccatccccctcattcctatcatccttcatcgatcgtcgttgggaacggttccactctgcccgtcacctctgttctccctggaccgttctacctcaacgacgttctcgtagccccccacatcactcataatcttctttatgttcgtcgttttaccactgacaactcttgttccatcgaatttgacccctctggtttctctgtgaaggatctggccaccaggactcccctcgcccgctgtgacagctcggggcccctctacacgctctggccatccacctccggcgcgacttcgccttctgccctggtctccaccacctcctccaccacttggcattgtcgtctcggacatcccggacctgacgtcatgaccaagattaccagtagcctagattcttcatgtagtaggggacattttgagggcctctgtcatgcttgtcagttaggccggcatacccgtctcccattcaccacttcctattcttgggctgagcaggcttttgacctggttcattgtgatctctggacctctcttgtactcagtctttctggttataaatactatttggtcattttggatgatttttctcattttctttggactttccctcttagattgaagtctgacacgttcactaccctcacacacttcttcacctgggtctccacccagtttcaccgcccagtccgtgccctgcagtgtgacaacggccgcgagttcgacaatcacgcctcccgctcttt

SEQ ID NO: 199216 - DNA, 730 bp, Zea Mays
aacgggtgcaggatatggtgcgcgtgtgcacagtgtgtcagcaatacaaatccgagcaccttcaaccggcgggcttgctccttcctctaccagtgccacagggtgtctggacggacatcgcgatggattttgtggaggccctccctcgcgtccgcggcaagtcggtaatccttaccgtggtggatcggttcagcaagtactgccacttcatccccctggcgcacccatactccgctgaatccgtcgcccaggctttcttcaccgacatcgttcgtctacacggtgttccgcagtccatcgtctctgatcgggacacggtcttcacctccgcattttggcgcgaactcatgcgcctgttgggtacaaagctacacatgacgacggcgttccacccccagtccgacggccagtccgagtcggccaaccgcgtcatcgtcatgtacctgcggtgtttgacgggggatcgaccacgccaatgggtcaggtggctaccttgggctgagtacctcttcaacacggcgttccagtcctccctgcgcgacactccgttccgcgtggtgtacgggcgcgacccaccctcgatcagatcctatgagccgggcgacaccagggtgcaagcagtcgcgaagtccatggaggagagggcggagttcctggccgatgtacgctaccgcctcgagcaggcacaggcgacgcagaagctgcaatacgaccgcgaccaccgctcggt

SEQ ID NO: 199217 - DNA, 501 bp, Zea Mays
gtgaacttgtgaacgtactcactgatggtccttccgccctgtgttagttcccggaactcatcttccttgagttgaactatcccctggggtacatggtgctcatggaaggctgtttcgaattctgcccaggtagcatccctgacggcctcgctgaaggtatcccaccatgctagggccattccagaaagttgatgagcagccagttgaacacgctgattttcggggcatccgatggcttccagtttcctcttgatcgtgcacagccagtcatctgcatcgaggggattgctggaccccgcaaacgtggaaggcttgagtctcaaaaattctcccatcctatcatgtggtctcccaccacctaggcgctggttttccaaacttctagtgaggacttcaatgagtcaggtctgattggctagaacttgggccaagtctagaggtagttccggaggtgcggggaggtgggtctcacccccttctccgccagcttctccttcagct

SEQ ID NO: 199218 - DNA, 455 bp, Zea Mays
ctagtatactcctgtcccatctcccccctccttccggcatcacggttggcaatggcactaccatacccatcacatgtcgtggcacatccacactctcctcccccacctctatttatcaccttaacaatgttctggttgcaactgaccttgtgcgcaacctcctatctgttcatcaattcacccgtgacaatgcatgttcgattgaatttgacgcgtgtggtttttctgtcaaggaccaacagacagggcacgtgactcttcgctgcaatagtggtggcgatctctacacctacccctccacaacagctccctcctgtagcttcaccaccacatcatccctgtggcatcaccgccttggccaccccggtccttccagcctcgccaaacttcgaagcatgtcggttatttcctacaataaaaggtcggcatgcctctgccatgcctgtcaacttggc

SEQ ID NO: 199219 - DNA, 1024 bp, Zea Mays
ctattttatccccgtctatgataaggtatctttgtgttttttgtttactttagttctggattatcttttatgtgttctcattttatttacacatacaattttattgcaagtaggagcaaaggttaaagggcactactccctcctgtcacaaaacatgttatgttttggctactgtcagcatgatgccctgtttaagtttttgtcatcaatatcctttttgatatttcaattgaacttctagaaattgtatagcctgatcttccttcaaaaaacagttccatactattacatcattgatatattttatacatatttagacaattagactactagttattgtgatcaaggtatgtaggctcctaatgaatattacaaagaaatttattttttgactgtatgacatccaaagcagcacctatttttttttgtactggaggaagttgctaagatcataattttgatattctcttccattgtttctaaaataaaatttatgtctactatttatgcttgtcgcttctgtcaacacagggttcgttcatggtcagagtgaaggggcccaagggatggtcatggaagcccgaaactgtaaaataattccttaactgaatctttcctttgtttccctccttactttgtctttactaagcactaagtgcatttgttcttttactggatgacatgttcacctaacacttcaggttcctgtcatcattgatcacaatgggtgcaatggaaatgcggatataaatttccagttcactgggtttgtttctttagccatttagtttaatttttttgtgtgaacatgaatcacattgaaacttcaaatgttaatgtatgcatgcaccgtgcaggtttatgatatccggtaaagtagtgggagctgttggtggtaagagctgctcaaaacggggaggacctgctggtgtgaaaattgaactgatgacagattctgatgagttgattgcatctgctttgacgtcatcatcaggagaatattcatttacaaacataattccag

SEQ ID NO: 199220 - DNA, 388 bp, Zea Mays
tgaccgggaagcaataagtttcaaggcatctctatcaacatccaggccttcgctggtagaaatccactgcaaagtgctgataatgtcgcactccttcagtttggggaaaaagaacttttggcacctcgacacgattatatgagggagatcaagattagggctgatgagaataaaaaccacacgcctaggtgcacgttcgacgaccttggatatgacactccatgtatcaggcggcaatgtgttgcagtcatcaattataaacaccctgtgctgggatttcaccggcgagagcatcacattgtcaaggatatccacaatgccatccagatctatattaccaaccggtccaatctccagcaagctcctgctcttgcccagattgtgtgca

SEQ ID NO: 199221 - DNA, 351 bp, Zea Mays
tggcggcgctgcagcaaatgtcgctgcaaggtgacgcctgggtgatggacactggtgcctctacacatatgcactcctctgaaggtatccttcattctcatctcccagctgctgcttcttcgatcatggtaggcaatggtgcaagtattcctgtcacgacccgcggctcatcgatccttgacatcaactccactaaatttgtgctgaacaacatccttgtcgctccttccatagtccgtaatttattatctgttcgtcaatttacccgagataatggcggttctatcgaatttgacgcttttggtttctctgtcaaggaacccaggacggggcgagtgattcttcgctgca

SEQ ID NO: 199222 - DNA, 616 bp, Zea Mays
agcaactactgcaatggagcaaaactgctactcaacactctgacatggaggaggttgttcttgatcctggagatcgcattgttgccatggattatcttatggagagggagtctctactccttgggtcgtcagatggttgtcttctcttatataacgtggaggagaaaacaactgaagttgtcggaagactggaaggtggtgtcaacaccattgcctctagccccgatggggcccttctctctgtcaccactggactcggccaactgcttgtcatcacacaggactgggaagtgctgtttgagacttcacttgaccctcaagtatgtttaatatactaaagtcttactgaatatacacgttctttttgtgtgtgtttgtgttctctcccaattctaaacatccttcttctcaggacgagaccattgacaacacagacagtaccggtggtcagagtcgaagtgcaatttcttggcgaggggatgggaagtatttcgctacacttgtagcccctgagagcttttctagccctacaaaacttaatgtctgggaacgtgaatcgggaaaactgcattcttcttcagatgccaaaacttttatgggagcatcgctagattgg

SEQ ID NO: 199223 - DNA, 430 bp, Zea Mays
cacgattcgccgcgaggagtttccccttccgctgcgtgcatcccgcgagagctcgaaaacctagccgcaaaatcgatggctcggcgcggccacgacgacgacgacgacgaggtcgatgaggaggaagaggaggatgcctatgacctggacgacgacgaggatgaggatgaggaggacgactacgaggaggagacgaggcgcgggaaggcctcccgcggcggcggcggcgccaagagcggcggcgggcggaagcggtcgcgggaagacaactttatcgacgactcggccatcgaggacgaggacgatgaggatgacgacggcggtggccgaccgaggaagaagggtggcggcggggtgcgaggattcttcgacgaggaggcccaggtcgacgaggatgaggaagaagaggacgaaggagagggcgaggacg

SEQ ID NO: 199224 - DNA, 495 bp, Zea Mays
ttataaaacttgtgtcgatgaacaatgtcctgtgtgcagcgttgtaaggaagtttttgcgccaatcaactgaacaggcatctaagcaaaaagctctcgagtctagaaaacttgctcaacaaaatgtgcctcagagaatcatgaacgggatagaaggtgatagaatggatgttgacccaatgtcagttgaagcatttgatgatcaaccattcgttccaaaacgcttgaagacgcatcctccatcacccagtggcctagagaatgatatctctgtagtctccaattatcatgtaaactcaggctttgcattgcaggaaacacagcctgagcagcttgaccacaataacaggacatcatatctgaaacgagaggtagatgcaaaggctgacatgcgagctcctcaaaagcccataaaaattagttatggtattgatggaaatgtgactgcatcaaggcataatgtgattcctggtgttcccagtgagattaattctca

SEQ ID NO: 199225 - DNA, 225 bp, Zea Mays
taacggtaaaattttctaagatgctctatattccatgaattctccacttccgtaccatccatttgagtaagtcgatatgatcctggccgagtgacttctgacacaatgagtggtccttcccatagtggtgacaacttgtgccgtccctcccccgttagaattcggtgaaggaccaagtctcccacttcaaaggagcgatgtcgtatagtcttatcatgatagcac

SEQ ID NO: 199226 - DNA, 991 bp, Zea Mays
tcttctgggccctccgtcatccgggaaaaccacacttatgcgagctctaaccgggaagcctgctaagaatctcaaggttgcatgtttattcatgtggcataatatagcttcttatgattatgcacgcaggccatatgcctcatcacttgtttgctgctacaggtgtctgggaaaatcacgtactgtggccatgagttttccgagttctatcctgagaggactagtgcatatgtcagtcagtatgatctacacaacggggagatgactgtaagagagacaatggacttctccagaagatgtctaggcattggtgccagatatgatatgttgtcagaattagctagacgggaacgaaatgctggcattaagcctgaccccgagattgatgctttcatgaaggcaactgcagttgaaggaaaggagaccaatgtcataacagatcttatactcaaggtgtgtccccgtatcttcttaagttcactttcacgagcagattcttttaacctagcctaaaattcactctcatgagagtcgaactcaggacctgaggggtgctaaccaactcagttagaggtctttcgcttctaactactctttttatgaagtgctttcataacaactatttcataactactcttttatgaagaaattgttatgaaagcacgtttccttaatatatacaactttcttataacaggaactaggcttatcactgtgacagttacacataaatttaatcttgatatcacccatggtttgttccatgatgattgagtttataaatgaccacaggttcttgggcttgacatttgtgctgatattattgttggtgatgagatgaaaagaggcatttctggtggccaaaagaaacgtgtgactactggtatgcctgcatcatgccattttatcaatataaataaatgatttgtaatttctccaagaaactctcaaactattcactacatgtataatcatagctattacagccgtt

SEQ ID NO: 199227 - DNA, 300 bp, Zea Mays
ctttcaagctcgggattggattaggggtttgggttttgggtagaactctctaatggctacgaccttagaaggggagggtgacagtggtggcaattggagggacgatgaactaggtggctgaggtggactatggcagtgggttggtgttggtcaacaaagaaggggagggagaggcgatgtattcataccagggcttcatgtcagctgaggtcgtcgtcatccacgatggcgtgctggagcatgactggtggtgaggatggtggtggcacctgaccatagcatgagaaggggaagtgcttg

SEQ ID NO: 199228 - DNA, 433 bp, Zea Mays
tgcaactgttacaaaaactgcaacagcagcagcagtcgttgctatcacaaccagctgttactcttgcacaattacccctaatccaagagcagcaaaagttgattattgatatgcagcagcagttgtcaaattctcaaccactttcccagcaacaaacaatgccccaacaaagtattcaagttccatcacgggcaacaccaccaccaacaacaaccgtgcaacaagagtcacagcaaaagcttccacaaaagcatgttgggttcactgacacatcacataccaccattcctccgactacatcagtcaacaccatttcagttgtaggaagtcctctgatggcaactggtgccacacattctgtagttactgatgaaattccttcctgctcaacatcaccttcaacagctaatggcaaccatattgtgcaaccagt

SEQ ID NO: 199229 - DNA, 464 bp, Zea Mays
ccctttcctcttgcttaataaggacagattttcctggttttgttttactagaactatcctggctcttctgtgaaccttcatcagctattgtaacatcaccgttcacagtttgttttgcaacatcctttggtttactttcatcctcttccacctgttcctccatttttccagcattttccatgagcttcttgaagagctccccactgttgctaagttcatcaaaagtaccctcctctttaattacaccatcatgaattagcagtattttatcgacatatggcagaaaatgcagctgattggtaacaagaacccgggttttatgctgcagttcgcctttgatacatttatcaaatacctgcacatgtactaatgtcagtgataacagttgggaagagtaattaatttgtaacaaacaacgaaggagagttgcatttcgtttcatttaaggcagaagaaataatagt

SEQ ID NO: 199230 - DNA, 437 bp, Zea Mays
cttatttattttattatttttatcttatacaaattttagggctttacaaattctacccccctaacagaaatctcgtcctcgagatttgtaagataagggatatagagagattggttgtaatatagcttttagtttctagttggtaccaaaatcaagagattttttttatacaaatgagtaggtgattatgaaggcatgggtatatatgtacaaccaccaaatgtgtaaaacaatgtctttaaagcatggataggttgggtaggacatagtagggtaaggaaggacttcataatgcatagtggatcttgattcctttggaagtatggcttgattcttattattcctcaacgagtttgatctccttcttctcgagtcttgatgtcttcatccgggtttgggacaagaggttaagatagatctgtaggcaacagatgggt

SEQ ID NO: 199231 - DNA, 453 bp, Zea Mays
gttttttttctgttgttgcgaaatttcaaatagatatagctggttctctctaaccatgacaagtttttttttaaaaaaagtttgttcatccaaacgggcattatcagtctccgaagctgcaactgcaaacacaccacactactgcctgcctccatgatcccgcaaatgataccatctcatcgcagcgctgttccttagcttctttggagtggagtactggggacgtgatctggatttaagtcgctagatttcgcttttttgggggaaaacatgtgcgcaaaaaaaaaaacccagagaggcggactcaccacccaggcaaacataggctgcgtggcctgggctgccttgccactgaaaggagcacacaagtctaaatatttgagtccagttgataatctcgtatatgtagttgttagcagttgataatttcgtctagactgtctttaatttctg

SEQ ID NO: 199232 - DNA, 308 bp, Zea Mays
tcgcccctgcagtactcctgctccagggcaccggaccgtgctattcctcttctccctcggtcccttctcaccgggggcatcacacaacacctccggacctcccctcccggtcgacgcctcgacggtccgctccctcccaaaaacccacagcccgctccgacgctccctcccaaaacccacagcccgctccggcgctccctcacaaaaacctaccacctgccactttcactccaccacacacccacacccccgcgccatggcctctcctcccccgacctccctctcctccccccacctcatccatctcc

SEQ ID NO: 199233 - DNA, 698 bp, Zea Mays
caaaatttggtcatgggcttcatagggagcaccataatgatatgttggatgttctctcgcgttcaaatcagagacagatgcttcctttagagcagcaacttcttttaggccttcaacacgagcagcaacttaagtctcaacaattggcaaatgctctgcggcaacattcaggccaggaagaagaaaggcacttaagtggggtctggccaatggatgctgctgcccagtttatccgctcaggaaccagtccaaatcagatacacagtcgtttcgatctccttgagaaccttcagagatcgtcatcgtttgatcatcatgaacatctagaccgcagcttatccttacacgaacagttgcatatgggaggtcaaggtattcgctccctagagcggactggttctttgcctggtggtggtcctggaccaaacccagatgtcataaatgccctaacacgtcatcatggacttagtcagttggaaacacatggtgatgtataccctttagttcaaatgcctatgcttccttcaggtgttcatccccagcaacttaggcatcaggatcagcttcctggttctcacataggaaggcttgaaaggcactggtcggatgccaatggacagttacaaaacagtctaatggaatcttcacacatcaaccagttgcagattgaagcggagaaggagaggaggaatgtggaa

SEQ ID NO: 199234 - DNA, 891 bp, Zea Mays
agcaagtgtttagagagaactggcgctaacacgcaccagttcaggttttccgctgcgtgcatgcgtgcgtacaaacagctcgcaatccatggcacgccaagttacgaagccacccatgcatcgcgcggtacgccgtatgagcgagcacacgatgccacttggcgtcgatgtaactgtcacccgcgatacgcggagtgaatagtggcccgtggaattccaatttatcactcggccaccaagggtcccgcattcggcgtcgcgagtcacgacgcgtactgtcgcatcaacgtggccacgacgggacgccgaggaacaaaggcgaccacgttgtatttgttttgtacatatgcgcgtacgtacctggaaacccctgagacggcagcggcgaccgccggcgtcgtttccttcccgcgaagcagtaaatgaggccgacggcgaggccgatcagaacaaccgccccgacggcgacgcctatgcccaccacggtggcgttgcttgatgatttagagggcgatgacgacgttgatgatgttccggtcgacgaggccggtggaggcggagccaataactgatgtgacggcggagacgcgggtgacgccgggacgccgttaggagacgggggcggtgatgggacggagtcaggaggtggtggtgacgccgggacagcactgggaggaggcgggcgtagtacaggtggaggaggtgttggcgttggcgcggtcgccggtggtggaggagatgctggtggcgttggtgatggcgttggcacggtcggtggtggaggagatgccggtggaggtggggatggcgtcggtacggtcgctggcggcggtggggacggcgtcaccggcggtggtggcgacggagacggaggaggaggggacggcgtag

SEQ ID NO: 199235 - DNA, 484 bp, Zea Mays
gttggaggtggacctcaccgtggaaaattgaaaggttgaattttgtagataatgatggatgggcatatgctgcagattttcaaaacttgaattggccatcatcatcctggagatcttctaaatcaccacacgacttcgtgagaagaaggcgttgggtacgttctagacagcagtcgcaagaacaaagtgcagaaattcctagaaaagtacttgctactgtcagtcctcattcatctactgcgttgccttggacatcgatgattagggatatggatttatgcttgcaagttcgcccatattctgaaaaatcagaggaatcatatagctggagccagatttgttcactaggttctgagagtatacctaaacagcagcactcttcactttctaggcaaagcaccgtaaagcagtcagtggtatcatcaaggaattctgttcttaagcttgctgaactcgagaaaaaagatgtgctctcatattgcca

SEQ ID NO: 199236 - DNA, 529 bp, Zea Mays
cttaacccccgcgcggatagcgggttgaatctctaaaaccgtaagggctctttaacaaaagtgacccgcgaaggggtacggtttgatcctggccgcccgatcaggcgcggatggcccagattagatcgccgctccagtcgaactggtacgcgccggccaccgtaagatcacagatctatggccagaaggcactctccccagcattaaccgcgctagccattggatcaagatcgcgtggtcgagattacgctcaaccgaaccgatacagggaggccaatcagagccgtccaatagggatctaatggccaggatccgacccaccaaaggagtacgtgttgatctaatccacaccgcccgtaagcgatccaatggtccatacaccttcacctacctcccgtgcacaggcagctggcaacggcggcgccatgaccgcagctaaccagacccgagcaggggaccgtcaaatatgtttctcgtcgagctacacgcggggaagactaaggcgagacagatgggagggcactcaccg

SEQ ID NO: 199237 - DNA, 242 bp, Zea Mays
gcctaattggttttgtaataattataactaacgctgctttcctgaccatgcagataggatacttaacaagatgggtgaaggttagtgtgccccttctgtactgctatataatattctatcctgcagtgatctttgttcttagctggaatgcttagtttcggacaaggatgacatggttttctatgttctcagtcccaacacttttcattgcttccattccatgctatatttatcgttccaat

SEQ ID NO: 199238 - DNA, 505 bp, Zea Mays
tcttaaaagatggttgtatgattgcctgtttggatcacttacgtgtgacgcttaccgttataatatgggcttgcctgacccagtggtgatggtatattgctatggttgcttgatcggatcacaggtccttggcattgttctttgggatgcctgagcccaaatctttgtgtatcagatcagagatcatgatgcgaatagcctgccactgaattattgtccttgcaatgtaaggataaggaagacaaagtattttttttctgtattactaggacgctattttgacaagggacttctgccatatccatgggcttggtactttacagtaagcattagcagagcaacataactttttcctattaatgatttggaaatattaaggaatgtaagtcataatggatttgactgcttctttgcatgtctttttatggtatgctttattggttgttggagcgattgtcttgagcatgcagcaaactattactactactatgcgaaagggcctcta

SEQ ID NO: 199239 - DNA, 569 bp, Zea Mays
gcctcgtttccttccgcgtatgcattggggagctgtgcgggtgatgcttttctattttcgatctgatcggtgctgcctttactccgatttcccagcttatgaaataatcgtatatatatgctcctacttactgtaatagtagtatggtgctctcgtcttgcgccgtcaaacttcagttattagctctatatctcggcaattgctggcatcgtccgcgttatactgatcctgtggggaaatcttctctaagttgcccacttgtgtttttgataatctgatcagctgaccagggcaccggctcggcttcaatgaggtagacttgatctgcacctgtacctccagttttcctttgcctgttgctgttagggattcgactagctcaatgagaaaaagtcttgtcctcgcgtgtgttcctactgaattagctgaccgcgtctttagtgaaaagtcaatttttagttggtcggtcatggcccaggggaaagatcctagctttataaacttgtagatgcatgtcatgcggccattccatttgatttgctgacgaacatctctcagcgataggatac

SEQ ID NO: 199240 - DNA, 220 bp, Zea Mays
caaaatcctccaccggctgggactgatccagtggttgcagccgagatgcagatgctgcaacaaatgaccaatactatgacggatatgcaagcgcagatgcagcaggaacgtcaagagatgcgccaagagaggtaagaaatgtgggaggaaatgcgacaagagagaatggtgtgacaacagcaagcaccaatggctccaccaccaccaccaccagttccac

SEQ ID NO: 199241 - DNA, 421 bp, Zea Mays
ggaacaggagccagacatggagatggaaccggaacaggaagcggaactgcccatgcccgagcagggcggggacaattcggggaaggcccctgcggaggaggatgaggagaagccgccgcagctggaattggaagacgagcccaatgaggttgacggcgaggaagatgatcccgaggcggcgaagaggaaggctccaagtaagaagaggaagctcccgcctctgtttagcccgggtgcacgttaccactggaagctttgcggcgccaatagcggctaccactatatcccctgtgtggatttcgatggggatgggaggcagaggcaccatgaacgcagctgccaaaggtctcctgtgacatgtttggtgtcactccccaaggaatataaacaacctgctccatggcccgagaggaaggacaag

SEQ ID NO: 199242 - DNA, 799 bp, Zea Mays
tggtctgccaagtattgccctcttttgccacctcctaggtcaactattgcagctgctttcagtccagatggaaaatcacttgcgtccacacagtaagtttattgattcactgtataacaaactgaaatgaaagacacgccaactaactcaatctgttttctcagtggtgaccatactgtgaaaataatggactgccatacagggaaatgtgtgaaggttttgagtggacatcgacgcactccttgggtggtatgtctatcataccagcatatatttttttcttgtgtatttagattagcaccctgtgcttcgagctcttgcaaagaaaggaaactagttatagtgtgattgtcgatttttcagtaatgatctggctagaacattagttttataatttcgtttttcatattatatatttttttacttggtgacaatctggctagttgacagcatttttttatcaaaatgatatttttgatctttctttgcatcccaatattacctcagaagtcagaaatgtaagctgctaacctattgcaggtcaggtaccatcctttacattctgacattctggctagtggaagtttggatcatgaggttcgtctgtgggatgctaatacttcagactgtattggatcacaagacttccgtaatttctctcagaggactccttgcatcctattcataaccaattctgagaaataagtaacttatattatatttgatgttcctctggtagatcggccaattgcgtccattgcatttcatggaagaggagagattctggcagttgcatcag

SEQ ID NO: 199243 - DNA, 466 bp, Zea Mays
ctggaataagggatcgccacttatggaaattcagcgcttcaggggagtatacaactagttctgcttataaagctctcttccttggttcggttcagttcgaaccagcagaacgtgtgtggaaatcttgggctcctggaaagtgcaagttctttatatggcttgtggaacataataggtgctggactgctgacaggcttataaaaagaggactagaccgacctgagcagtgccccctgtgcgaccaagaggctgaaaccataaatcatttgctggtcaaatgtgtttttgccatacagttctggtttcatttccttagttcagtggggctgcaggaactgtgtccagctcatgaggattcttttgagtcgtggtggaagtctagcagctctcgggcatctgattttttgagaaaaggttttaattccttagtgatcctaggtgcttggaccatttggaagcataggaa

SEQ ID NO: 199244 - DNA, 201 bp, Zea Mays
cgcaccttctcccacctctgctctgctctgctctgctctcccaggccaggccctgcagctgcaagcaccgaggacagacagagtcgctcgcttcgccaccactagctgttgcttgcctgccacccaaggatttccttccatcgagatcaagtagcgtagcggcttgcctgaccaagaggcagagctctcgatgacgaagca

SEQ ID NO: 199245 - DNA, 1021 bp, Zea Mays
aacaacagccaagattttcattctctgctagagttcaagaagggcatcaccagtgatccgcacggagccttgagcaattggaaccccagcatccacttctgccattggcatggtgtgaactgcagttccacgcgaccatatcgagtcacggagctcaacctcaccggccaaaacttggctggccaaatcagctcctctgttggaaacctgaccttccttcatacccttgatcttagcaacaatagcttcattggccccctacctcttcttaacaagctccgaaacctggacttactctttctgggaagcaaccatttggaggatgttattctagattggcttacaaactgttccaacttagtctacctagatctctctaaaaaccatctcacgggtcatattcctccgaacatagcctttcttaaaaagctagaaggtatcaacctttatggtaattatctcagtggggtcatccctccaaccttaagaaacctctccacactattgttagttgatctttcaaacaatcaactaaatggaagcattcctaatgaagtttggcaaataccgaacatacaaatggtaaatctagcaataaataacctatcaggtggaatcccagatactttcactaacttatcttctcttatgatattaggccttgaccacaatatgctgggcggcacattgccatcaaacattggtgatgtgctccctcatctgcaaggactatacttaggaagcaacttattttttggtacaattccaacttccctaggcaatgcttcaaatctagaagtcgtagacctaccaaacaaccttttcagtggcacaatcccaagttcttttggaaacctttcaaagttgcagattctaaaccttgaggtaaacatgcttgaagcaagacatagtgagggctggcaattctttgatgccctagcaaaatgtagatatctcgttatactttcagtgtctcataatcatctacacggacctataccaaattcgattgctaatctgt

SEQ ID NO: 199246 - DNA, 442 bp, Zea Mays
caagcaagagaaatataagcaagtaaagtataaataatgacagcttcaactacaattaatagatctttcactgacacacatctatgagtatcaagtaccctaatctccatctttttttaccggagtataatggcttcttcctttgacctatatagcttactatccttggtgaactacataccaggtcatgactgcttagggtaaaaggttatcaacaataatatataagcaacagttgtggtaagtagtggtgataagaattaccattggcataagggcatatgctccatttgttctttatacagaaataacatcattggcataagtgtgtgtttgataagtgtcgtcctagtgttattgttgctgttagaatggctaaggacagtggcggacgtaggatgaaaattcatagggggcaagaaaaccatgtgacaaaatcaag

SEQ ID NO: 199247 - DNA, 385 bp, Zea Mays
cggaaagatatccttgtgctttccagcagtatagattcccatgtttcagctaataaggttcttgagaggaacataattgagctagagagctgcaaagctgaactagagttgcatgtatcagagctggaacaggaaaacatagagttgtcagaacggatatctggactggaagcacaattgacttatctgacaaatgaaaaggagtcaagcgagctacagattcatgactccagatcgctcatcattaatctcaaagataaagtagagcggcagcaatccgagatggaaactcaaaggctcgagtttaagcagaaacaacaagaatctcaaagaagattgtcagaaacacaggatgattctgaagttctgagaagatctaattcta

SEQ ID NO: 199248 - DNA, 206 bp, Zea Mays
gtaacaagtcttgtatagttctctcttggtagtccaaagaaaaggagaaatcaatacaaaggttaagtctggtacatcacagtatcatactatcacagaccgagcatcctgaagtccaaattatctcatgttgcatcatattttctttatcggacacgtaggagagctacatatcattattatcgagaaaagaatgtttttttaac

SEQ ID NO: 199249 - DNA, 317 bp, Zea Mays
ggacgaggaggttagcgtcccagtcatagggccgccgccacctgtgcttccgcctccattgcctcccagcgagatgatggtggggactgtcggaacctatggtgagcagctgctgccctattccaggagagggtctggccggttatcggctgcacctaggttatctgtgccggagattgggaggaggtactatgaaccgccacaagtcatgctgcctcatatggcaccagtgcaccttatgcaagcagagcaccgggtgatcgattctgtggaagcacttataggggaacctttgagggacgatggaccagtgcttg

SEQ ID NO: 199250 - DNA, 375 bp, Zea Mays
tgggaagctacacagatctccatttccaaaaatgtccagctatagggcagaaaagggcttagaacttgtgcatgcagatttgtgtgggcatatctctccaaagtctcttgggggagcatcctattttttgctggtagttgatgatcacagcagatatatgtgggtggaattgctgaagagcaaggatcaggctctggaatattttaagaaaataaaaaatagggctgaggttgaatgtgatggcaagttgaaggcattgagaacagatcgggggggagagttcaattccaatctattctcaattttctgcagtgaaggtgggataaagcattacactactactccctatactccccaacagaatggggtggtaga

SEQ ID NO: 199251 - DNA, 207 bp, Zea Mays
tgggcagttcaggtttagatgcaaattcaaaacttcctcccaacagatctgcttctaacttaatgacaagaacaatgtcaggtccagcaacgtccgagacttcactgccagttgatcgtcccatgaggttgtcagaaattcatgttgcagctgagcatgcactgaaacaaacgatatcagatcctgattttatgacatcactttcat

SEQ ID NO: 199252 - DNA, 305 bp, Zea Mays
acctgggtaggagtcaaaacaggtactcttacagaaagtgcccatcgcagttcccgtatatcccgtaaccttttccagtcagacataccagaagcccaacattttattgtccaatcaattgacttctttgaccacagccttcttattgcatccttttcaagtggcccaacttgtgtgccatctttatcaatgtacatccactcttttgaaggttccataaatgcagttgccgcgatgaggttagattgcaaaggaatagctgtccgttcggatgtttcatgtgcaacagtaagcaaatcaacagc

SEQ ID NO: 199253 - DNA, 285 bp, Zea Mays
gtcgggcctaagcccattacagctgtaacacacacatgtctaacacccctgtagtctcaactttaggcattacaaatgttgagactggatcgaaactccgagaacaccagaggggagccccttggtgaacatgtcgacaaattgcgaagtggtcgggacgcagaggacgcaaacatcgtgacgatgactcgctcgtggttgaagtggaggtcgattttcacgtggttcgtgctctggtgctgcacagggttggagaggtataccgcgtatcgttgtcgcagtaga

SEQ ID NO: 199254 - DNA, 351 bp, Zea Mays
ctctttttgtcacccatccatcctacgaccatctttgcatttttgtgtctacgtgctaccccaacctttctaccaccactccacataatctcaccccttgctccacctgctatgtcacaaagggtagcgatgccttgacctcatcactaatcgtctcttgatctctcgtcatgtcgtcttcgttgagacggactaacccttctcgaccccctctagttccatagtcgactaccttctaaagttggactttcttcttgaccctatggcttcctctacacagctacccttagtttttccccctcaagttcactttgtcgctcccgcctacgacatcggtgccccccgcagcac

SEQ ID NO: 199255 - DNA, 208 bp, Zea Mays
ccagccgtgagagtacatcgacctattgtgtgtcggaacctgagatctttgataccatatattattgcggagtgtcggaacctgagatctttggtaccagatattattgcggatgttatggcagcgactaaggttgaggtgacgcaaggggggcggccggagatcttgtccacaaccgagcaagaggaaaggattttcttacttaatg

SEQ ID NO: 199256 - DNA, 300 bp, Zea Mays
gtctgcttagtgacgtagactctgggcccgtgctggactcgatgtgtaaagccggcctgctatcctccccacagttggcagcgaggcagtgatcactgctctgttgagccagcctcatcgtcaatgaggtgccgagctttcgctagagctcccgtcagccaccaagtacccaacttgagacgggcagcaagccggcggccaaggcacttgcccatacaccgagtcccaggcccagaagagtcgtaactaaagcgcatccgcaccacccttaatgcccccgcacgggttacaagccctcgc

SEQ ID NO: 199257 - DNA, 322 bp, Zea Mays
ctactgctcatccgacaaatttggtgtcagctaagggtgacggttcacttgccaagaatcctgagattggtgacaagatagcagataagccggctgcccctctcaacgtacagatttctcatgacgatgagagcataaagaataattcagttgcaaaaacagatgaaattccagcatctccagcagaaaatcagagtatattagtttctttatcctctcgttgcgtttggaaagagagtctgtgtgagcggccacaccttcttcgcataaaatattatggtaactttgacagacctttaggcaggtttttgcgtgaccagct

SEQ ID NO: 199258 - DNA, 448 bp, Zea Mays
cttaggtctacctcagaggataaccatgaaccagaatgtcgtactgccattgacattgatgttgagcttccctcaactgttcagaagatatcagatgctaaagctggtagtcagcttttctatgagccagctgaattgatgccggagcgtggatgtgaagacgtttcgtttggatatgatccagcaatggattataatagtcagatacagagtcaatctgccaccatggttgaagatgcacatatggaagatgcattgttgagcactgtggatgaaataaagaagccagagaaagacaagaagctaagaagttcacaggagagtttggataaacgtagaaaagatgcttcagcgaggaggttgtcatcatcaaaaggcccgctgactgatgcacagaaacgcgcacaaaacttgcgaatatataaagcggaccttcagaaggcaaaga

SEQ ID NO: 199259 - DNA, 508 bp, Zea Mays
agaagattttgctggaggtcgcacagcgctgtgggtgttcaatccatgtggacagtaggaagatgaagattttgacactgttggggttcggtgggaagaatagcgtttttactgaggacgcaacagggacggatgtgcatgttcttgggtggaatttgttaggggagacttcgccctacttccagccgaattttgtgaaattgaaggagatcatgatggagagagggtatgctaaggctgttgggtttgtaccaactgggtggatgtatgaaaccaagaaggaaggttttgctgttagggtgaaagattcactcgaaatccatcttgttccttatagtgagcactcaagttacaatgagttgcgcgactatgttaagtttttgcacccaaagagtgtgatccctactgccggagtggatgctgggaagctcgatagtaaggaggcagttgctctgcagaagcattttgctgggttggttgatgagacagcaaacaaacaggagttctt

SEQ ID NO: 199260 - DNA, 530 bp, Zea Mays
gttgcacatgctgtggccaccaaaagtgtgttccacatctactacaaccccaggtgatgatgaatatagcggtttcactttaatgcttttgcatgttcaattgttcatgttgttggcactcttttagatgatgtgaactgaaatgtgctattaactatactctttcaattgacggcgatttgaaattgtgtcattttgtgtgatatcatttcctgagttgtttcgaactatgtaattcatgattcttactgcaattcaacattaagtgatatataattactttttgaattgatattgtcacttacatttggacccttcaatataatatagttccacagctctttttttagatatcatgacaagtacgcaagtagatctttggttccttatgtatctcatgtgcatttttaccttcttggaccctgatgtgttgctgcaagccttacctttttatccaccaacaatgatggccctgatggcaattattgctttccaaaaatcttacagattaagccaatctgaattcatta

SEQ ID NO: 199261 - DNA, 354 bp, Zea Mays
tttaatgcacatgcattaggtgctctagcagaggttgctgggccaggtttgaattcacatattagaactgttctcccagcattgattcttgctatggatgatgaagatgtggtgagatgcatgctaaacagaaacatatttgcattctaaacaccagcattttctatctaggcatcgtctaataccggtatatcctgatatgcctacattctctctttctctttctgtctctctcatctgtaggatgtaaaaaactcagccaggaaagctgctgaaactgttctgttggttattgatgaggaaggagttgaaactttgatacctgagcttctaagaggaatcactgacagtcag

SEQ ID NO: 199262 - DNA, 371 bp, Zea Mays
gatttagttgtggtggcgaatggacggaaggagaagatagcctctggtctgctgaacccattcgtcgcccatctcaaggttgcacaagaacaaattgccaagggaggctattctatcacacttgagcctgacccagagattgatgcaccctggtttaccaggggcacgttggataggttggtttgcgtcccattgttaggggttgtcatttgcaaatttgttctttgacaatatacgtggtgatttgaatccctctctttcgcaggtttgttcgatttgtcagtacaccagaggtcctggagcgggtcacaaccatagagtctgagatattgcagatcgaggatggcattgccgtccagggcagtgacagt

SEQ ID NO: 199263 - DNA, 347 bp, Zea Mays
ctctatggccgtatcactcaagttccggttgctccaaagaaaattggtcagcttcctagcatgaagcaacgcgtggctagctgaagatcacaggtaaactaagacaccaatatagtaccacttgctgttatttcgatttgcctgttcagtatgtacaactctgtcatgagtcgtgagtttattagtgtggatgtgatggcagattggcatgtctacataataattgctggccgcacctgtctacagtatgcatgtattcctaaattgtaaaataagtgaaaaaacgcatatgtgcgcgtgtatcatggtgtgtactcctaaattgtaaaataagtgaaagaaaaaac

SEQ ID NO: 199264 - DNA, 586 bp, Zea Mays
ggacaaatcattggacagcctactgcagcacctattacagcagacaaaaccaatatgaagcccctttccaggaatattgtccgctttgaaattgtccatttagtttacaatccattggtggaccattaccttgctgttgctggatatgaggattgccaagtgttaacattaaatagtcgtggtgaagtaactgatcgccttgccatagaacttgctctgcaaggaccatatattcgtcgtttggaatgggttcagggttctcaggtacaactcatggtagtaacaaacctgtttgtgaagatatatgatctctcacaggataatattagccccatgcattattttaccgtagctgatgatgtgatagttgatgcaaccctcgtcccctcctcaatggggaaattggtgctacttgttctttctgaaagcggtgttttatataggctgaatgttacattggagggtgatattggtgccaagatattgactgaaacagtcttggtcgaagatgtcatatccatgcatagagggttatcattgtacttctcatcaacctacaggcttctttttgtatctcaccaagatg

SEQ ID NO: 199265 - DNA, 383 bp, Zea Mays
cgctttcagtgacatgcatgcgatgcatgcttttgcttttcttcaatggtgaatgctgagccatgctcgatgggtggaattatggattacggtgttggtgtgggcaccaaatcttcaccacgcagtatggccattgagaaagctcaggaggagctcaggcaggagtctgatgttcgcgatgaatggaggagagaattggaatttctagagaaagtatgcccgcaccaggttatctcttagattatatttctgccttcactgtacctacttactcctatttattgcagggaggcaacccattggatttcaattttgcacatctggaaacggtcggtgtacactctgcttctctcacaaatcaagtagaagcacaaactgtgata

SEQ ID NO: 199266 - DNA, 275 bp, Zea Mays
ggccaagttgcgccttgccggtggcagtgacgggcaggagcgaaccattaccgacaacaattgatgtgggagaaggaaatcgaggagtggaggagtgagagagggtaccgtcatgagaggtcatgtgagaggaagcaccggtgtcaaggtaccagtcgttgttcaccggtggagtgagcgtcatggtgctgaatgtagaggccagcgagttttggtcccaaaccggagtgccaaccataggctggtattgcagcggcgcaagctgctgcggctgg

SEQ ID NO: 199267 - DNA, 528 bp, Zea Mays
cgaaacgtgaataaaaatagattcatggtttacctaacatgcaaggctagcgagatgaggagaaggccattctctagaggtgagcaggatccttactatcatgaacaagacatgacctcacaaactgtagaagataaggctcggaaacaaaaggaacttgcaaagaagcatttcaagccccgaatgattgttcatccccactttcagaacctgacagctgaagaagccatgcaggtctgctgccttgttaaactcagtttgtgcgctttgcatctcctcttatggtaagctatgccagtctttatctaaactattctcttaaaacagtttttatcagataaagagcatggtgagaagttaatccgaccaagctccaggggaccatcatttttgacacttaccctgaaaatttttgatggcgtttacgcacataaggagatagctgaaagtggaaaggatcataaagatatcacaagtttgcttcgcctggggaaaacactaacaattgataatgaaacttttgaagac

SEQ ID NO: 199268 - DNA, 915 bp, Zea Mays
tgcaggcttctcagtggcacatcagttgctcctggactctgattaggtgccccagaggatcctactgagctgcctcagctgcgtcggcgtttcctatggcgaagtgaggatagatgcgttgcgtgggcggcgaggccgctagccgaagtggggacaaaaacgccgctacctgaagacaccatggatgcgagctctgatgctgcaacggaagaggacatacgagatagagcagtcttgtgctatccacgggagctttctcgatggctctgaaaccccgcgcttgcaatggctgctacctgagatgctttcgtgggccttaggagcagcatcgggcggctagctgacgtggacgtatgtgtgaggcaacgacaagcgattggcgacgaagacgtttgcgagcactcttcaccgccgtcgtcgggcgatcgcctttttttccatggaaaacgtttcgtcgtctgtgaaaccatctggtagtaacccttttcattcccaaaggtcgcgtgagtcagaagtctggaagctacgcgcgtgagtacgtattggaccgacgttttgacgacgccgtccaaagaagatctgacggccgaagtttttggaggtggcgtggctgaaggaggtgcccgctttgcgcccgcgtttaatagatagaagaattagtgggatttgccgattcggcgttggttgttcccagtgttggtggtttttactgcaaccgagtgattattacttgtactcttgattagcaagtcaacaagaggagctcaagccacgtgttctaacgtgggtagtcgtataactgtggttcctctgcccataagtgcagattgatgtacggtggcggggaagggatctgggattattttataaggacatttatttctgtaaaggctgatttgatgactagggatcacg

SEQ ID NO: 199269 - DNA, 291 bp, Zea Mays
cccactccccatcaaaccctagccacccccttccccaatccccctcccaaggtgcagcccctgtcctttggcatctccatcgagtggtgcaagcctctaattagagaattggtggaggaagaacaaagaggtgaaggaataactcaaggtgatcttatgtttattttgtatttttgctgcgattacgtttgattaaccgttcccctaagtgaattggtggtagtgctgtcctgattttgggtggcaggcggacagaagtattgtgggcagtttctggggtttttgcggcgg

SEQ ID NO: 199270 - DNA, 252 bp, Zea Mays
aaagccggggtggtggccatggacatggacctcaccgagggacacgaaaacgaggggatggttggcgccggcgttaaggtggccaaggaaaaggtgaaggagatggttatgagcggcggcggcggcggctgggaggtggtcggtatctccggcatgggcggcagcggcaagaccacgctcgccatggagatcttcagggatcataaggtccgaggtaaggagaacaagaaccagatcataaccatcttttcc

SEQ ID NO: 199271 - DNA, 522 bp, Zea Mays
tctgttcctatccgcgtcaacaactcagactccgcgcggagctcacgcagtcggcgaacggagtccgcgacccgacctccaaccccgccgagatcttcgatgggcgacctataaggtccggccacctccgctcgtccagagacatcatgctgtgccagatatcctaacagacaaagaagttcgtcgtcttctccgcaattccgccctcaaattccactgcgtcgacgacaagcttgccccgtgctccttgtgtagatccccgccaacttcccccatgcacccgttgttgtgccactccctgtccatggggtcgcgacaacctcatcgccgccgccctgtgattcgccgtgaatcgcactgctcgtgtggacagccctgtcggcctcttcattctcggtaagaaatccactacctgcttcgtcctcatccaggaatcgcgtggcacatgcccctttcaaattagaacaccgtagcgccgggcgtggtgctcgccgaagtacagaggtggagccgtcgtcgtcg

SEQ ID NO: 199272 - DNA, 203 bp, Zea Mays
tgcatcactagtactgattgtaggtgcttccattccattggacataatttggtcaaatcttgaaatgacttcagggaatctcttcctcaaaggctcaaattctacatcgtacttgagagccagtgaccatttctctcgtttgaatttgaacagctcttctgttttctcctgcaaatccagctcatgcaacattttcaatttac

SEQ ID NO: 199273 - DNA, 795 bp, Zea Mays
aaggtactggtgaaccagctgagtcaaccagaaccaggaacatcagatctttatttccctacagagtactcacaatccacagtaggacagttcaaagcctgcctctggaagcaatggctgacctattggcgcagcccggattacaaccttgttagattttccttcactttgttagttgccttgctgctcggctccattttctggaggataggcaccaacatgtaaattttcttactttcttcgtgtttggttgctggtgccaaccttccaaatctgaaagtgttggtgtattctattgcaggggagattcaaccactctcaggatggttattggatcaatgtacactgctgtgatgtttgtcggcatcaacaattgttcaactgtgcagccaattgtttcaattgagaggacggtcttctacagagagagggctgctgggatgtactctgcaatgccatatgccattgctcaggtaaagaaatatcatagtatacagaatacagtggtgactaaggtgctatcttctctccgcagtcgctcagtttttatgcttcgcaggttgtcatagagataccatatgtgtttgtccaaacaacgtattacaccctcatcgtatacgccatgatgagtttccaatggacagctgccaagttcttctggttcttcttcatttcctacttctccttcctctacttcacctactatggcatgatgactgtctcaatctccccaaaccatgaggttgcatccatcttcgccgcagctttctattctctgttcaacctcttctcagg

SEQ ID NO: 199274 - DNA, 250 bp, Zea Mays
gccgcctctccttgcagcctgccgtgacgtgctagaggatgagcggatgtcgcccgctgtgctccggtgtctgctcagcctgcttatgttggttgccgccaagtttccccactgcttccgtccacagtttgttgatatcatggacctgcttcttgggtgggcgtttgtgcaggacctagctgatgcagatcgcagcatgatcattgatagttttccgcagtttcagtggcattggcttgggaatctgcag

SEQ ID NO: 199275 - DNA, 357 bp, Zea Mays
taggatagcaggcacagccaaagacgcgaaggtgcgtataggaaggggcgatgtcgaagaggacaaagaaagcagtggaatgattagggagcggaggcggttcaagaggtaggtagcagtgtggaggccttagcccaataacaagcgggaaaggaggtatgaaacaagagggtgcgaatgaggttggtgatggtgcgaatcacgtgctcggtgttgccattctaaggggaggtgtaaggacacaacatttgcagctgcacaccgagcgaaagaaagaaggcacgagacgtggagttatcaaactcccgcccgttgtcacacttaacaccgcgtatggtgcaaccgaactgagtcaac

SEQ ID NO: 199276 - DNA, 396 bp, Zea Mays
cgccggatcaccgccgtatctagtggaggtgcagtttgtgtggacgcgatgctactgcggcgagggagcgttggcaccttgcgtgcggtggcacaggagatgtggacatggaaggagaacgcgagcagaagaaaacgagggggcttgcctgccgtaacgcccagacaagggcggagaaagcgagctgtgtagactgttgttcttggctacgagagagacgtgcttactctactgcgcgtgtaatctgtgatgccagcccggtggtaaaagaaaagaaaagaaaaaggattctgaatcctctttgcggcatcaccgttgccccggcctcatctgcggtctccctgaccctgctatggactggtggttggcacttggcatgcaatgcagggacgccga

SEQ ID NO: 199277 - DNA, 762 bp, Zea Mays
catttccagaatctatgaagcataatttgttaaattgtaagatataacaccgctaaaatcttgtcaatccaacctcatcttctaaataataaatcaagtatgcaacaaatataaatagttcaattgcattttgaattagaggactctcagaccttgccgaagagggatagctcgtgcctccactgcagtcagggatcacatcatcatcaaacgccactgtctcaggctccatttgcggcgctggcttcatgcttccatcgaatccagggatcaactcgtcgtcgaaccccactggttgacggtcccgctccacctccctggccggcttctccatgggaaaattggtgctcccagccaacccagggaacaaatcttcatcaaaacccaccacctccaactccgtcctctccggctttgccgcactccggacgccaccgtgcaagtcttcctcttcccctccaccaccgcctccaaacaaggggatcgcgtcgaatggatcggccgtgtaaggatcgtcgtcgaagactggcttgtcgaacacgggcggcggcgtcgacggcgaggaagaagccttaggcgcgggctcgggggcctcggccgcgcgattgaagtaggactcgaacatatcgtcgtagaaagaggccgacgggggcttggagggaccgaggtcattgaaagggacagagtcatccatggccgggtcaagcacgcatccggcagcgaccgaatggatgcgccggagtcgggaggggtgaggtgatc

SEQ ID NO: 199278 - DNA, 555 bp, Zea Mays
gggtaaggcgggactaaggacgacgggaggaggaaggggcggggtactggctccggtggtcgggaagaggctctgccggacgccgctctccgttcgctgcaacgccaccagccgggacggcagggtagggacccgttttccttgccttcattttcagtccgattttgcgcacttctttttctttgatttcattttacagaaatatactggcttgttccgttttcaattcctaatgtcacggtcgttgtacatgtaatacagccatcgatgcatttatttatgttccatttctcattaacgaaaagtagttttcatagcatttatactactgatactcttttgatgaagagccaggaaattgtatatttttttcacacacacacatatttctcactcgtcagcacctatcccgctgacagattacacaacaagagttcactgagatggcgtggcaagcaattgtctcatcccctgaggtggcgaaggagagcaagcaccagattgtggagactgagcatatgatgaaatccctgctggagcaacggaatggccttg

SEQ ID NO: 199279 - DNA, 1171 bp, Zea Mays
caggaggtcgtagcgaggggtttccttgattggtgaatcttcgatcaaggatggagcaccgggctttgctgctcggcgtggcgctggcctttctgctggcctctggctcccagggcttgaaccatgaaggttggcttctcctagcgctgaagagccagatgaacgacactctccaccacctcgacaactgggacgcgagggatctaacaccatgcatctggaagggcgtcagctgctcgtcgacgcccaacccagtggtggtgtctctcgacctcagcaacatgaacctgtcaggcacagttgcgcctagcattggtagcctgtctgagctgaccctccttgatctgtcctttaatgggttctatggtaccatccctccagagattgggaacctgtcgaaattggaagtgcttaacttgtacaacaacagttttgttggtacaataccccctgagctcgggaagctagataggctggtcacgtttaatctgtgcaacaacaagcttcatggcccgatacctgatgaggttggaaatatgacagcacttcaggaattggtaggatacagtaataatctcactggctcactacctcgttcacttggcaagctgaagaacctgaaaaatattaggttgggtcagaatcttatatcaggcaacattcctgttgagataggtgcatgcctgaacataactgtgtttggtcttgcgcaaaacaagctcgagggtcctttacctaaagagattgggaggttgaccttgatgaccgacttaatcctatgggggaatcagctttctggtgttattcctccagagataggaaactgtacaagtctgagcacaattgccctctatgacaataatctagttggccccattcctgcaacaattgtgaaaattacgaatcttcagaagctatacctttacaggaattcattaaatggtacaattccatctgacattgggaatctttctcttgcaaaagagatcgacttttcagagaatttcttaactggagggataccaaaggagctggccgacatcccaggcttgaatttactctacctcttccagaaccagcttacaggccctattcctacagagttgtgtgggttgaaaaacttgagtaaacttgatctgtcgatcaattcactgaatggcacgattccagt

SEQ ID NO: 199280 - DNA, 251 bp, Zea Mays
agcaaaactaatataatacaagcaacatatgcagctttaaaactattaattaaggtgctaacacgttgacgtcaagtcttgcccctcggatctaccatccacggctgcgtgccatgccatctcgcccgagaacgatgcaccctgcactccgccaagacggtggatccgattcacaatatttgatttgatgttagcaccctaatcatttttacactggatatgttgccatataaatgtaagtttaaactttg

SEQ ID NO: 199281 - DNA, 225 bp, Zea Mays
gataattcggcaatattcccagtcaagtttcattctctttctacctggttgtgacatggtggagaggctggtgggcaattggccttttctcagggcagccacgttcacaatcacctgcaggaaatggtcccggtttctgaactccaggggtgctgtgttacctgtcttgttggacttagagcttcagggtatccccatccatgcatgggaaaccataactgtgga

SEQ ID NO: 199282 - DNA, 552 bp, Zea Mays
cccaaacggtcaaaaattgatctccttccccgaggttccccaccgacttccctgccgtcgttatcatcaccgccatgaggaggagagcgggaacgatgacgcctcctctgtcttgaagaaccaccatttactccggaatcctgagaagggatcaaccgatcactcctcaacgtcgagaaactaatagaaatctgatatacaaggccaagccttccatcttcagtgttaactcccgtaggttccacaatccaaaggtctctggcagcagggatggttgccgggtcaaaacaccatccagaacaacgaaagacgtcaagattccggagctccagggtatcaggatggacttcatgcacccaaacacactgattcagtagctgctgaactgttgataactcccatgcatgtaaaggaataccagtcagttgcacttccacagggatcggcaggctcactccagacgaacccaaaaacttggaccatttcttggacagcaacgagaacgtgctggatctgatcaagctccacctctctgttagtaccagagctaag

SEQ ID NO: 199283 - DNA, 595 bp, Zea Mays
cgtagactggagaaggagaaactgtattttgagacagagtacagttttactatgtcttgcaaatccatgttctgttgtgcttagcatgtagttgacttgttatatttgtttcattgttctaatatgtttaggcggaaggcccgagaaaagcaacttaaggagcaggaggaatcactgcaggaatgggagaaaaagctgaaggaaagtcagaatagacttaatgagttgcagagatctataaatgagcgagaggagagagcaaataagaatgatcaacttttcaagataaaacaggacgaactggaggaggcacgaaggacagtggaggccgctaaagttactctgaaagtcaaagaggatgatattaacaaaagactaaatgaattacatttacaggaaaaggtaattaattgatcagcaactgaattatttcctccatatttctattttttgtgttttgtttttaacggctcaagatatttggtttgctcaattctgatttgttttgcaggatgctgactcaaagcgcagtgcattggaagagcaggggaaaaaattggatgagagagaggcaaaggtcactaatagagaaaag

SEQ ID NO: 199284 - DNA, 799 bp, Zea Mays
caaaccccaaattcattcctatcaaaatggcacctctgtcagggccaacaagcaagagtaagaagagagctctccgacacgtcctcctcctctgcctcctcctcccatgtatctcccaaccactcccggctccttccccatctccaacggcggcgcctccggcgacgacgcttcccctctcgccgttcaacgatcgcctcgacgcggcgtacatcgcgctccaggcgtggaagcacgccatcatcgaggaccccaagaacctgaccgccgactggtgcgggcccttcgtgtgcaactacaccggcgtcttctgcacggcggcgcaggacgacccgcacatcctgaccgtcgccggaatcgacctcaaccacggccgcatcgccgggttcctccccgaccacatcggcctcctggccgacgtcgcgctcatccacctcaactccaaccgcttccacggcacgctgccgccgtccatgcagcacatgcgcctcctctacgagctcgacgccagcaacaacctcttctccggcgggttcccgtcgttcctcacctcgctgccgtcgctcaagtacctggacctgcgcttcaacagcttcgacggggacctgcccgacgccgtgttcgggcggcagctcaacctggacgcactgtttgccaacaacaaccgcttcaacgtgaccctgtcgtcgcagagcctgaccaactccacggcgtcggtcatcgtgctcgccaacaccgagctcaccggctgcctgccgccgagcatcggcgacatggccgacacgctggtggagctcat

SEQ ID NO: 199285 - DNA, 531 bp, Zea Mays
cgcggaggcctggcactccaaggccgccggcgtccacggcaacggggcgcttggctccatcaggtccaaggtgtacgtcgcgcccaagctctggtatcttcgtgtctccgtgattgaagggcaggacctgttccccatggacaagggcccgttggcgatcggtcgattcccggagctcttcgtgcgtgcgcaggtggggagccagatcatgcgcacacggccggcgccggtggtgtcgacacggggacctgcgagtccattctggaatgaagacctgatgttcgtggtggctgagccatttgaggagttccttgttctgtccgtggaagatcgtgtgtcgccaggccgtgatgagttgcttggccggctcgtcgtgccggtgtctgccattgagaggcggtgggattggaagccagtggtttccaggtggttcgggctggactgtggtactggtggtgggggcaatgttgctggcaacagtgtgcacaggttcgggagccgccgtgtgcatctccggctaagtcttgatgg

SEQ ID NO: 199286 - DNA, 496 bp, Zea Mays
tgaagagccaaccaaaggaaataatgatctgatgacaaattcttccaccaagctcgaccagtctgtgaaagtaaaggaagggggttttgcaggtgagccaaaaaggtttagaaaattgtggggcagtaacagtacaacagttctgagaacagtgcatgtaaatcaggaaaaagatgctatagctttcgtggaggctgaagaaaaggcacctaggttttcggaagttcctccttgtgatgaaagggtggcatcccaagaggcaactgattcccgtttagaacaatgtctaggggtggggaattctctaggtcacgaaaatggtgcacaatttgagacttcatgcgtgaataatttaccttcagaggtccatgcagacccagaaatctccagttcattttcggaatgttgttcatcaggaagtcatgccaatggtaatgaaaatcattctgaaagcacagctcaggaaactgcatttgtagggaactctagccaaaat

SEQ ID NO: 199287 - DNA, 263 bp, Zea Mays
tgggtctccagttgactgtgcatgtcattattagtggagagctgaaggttcagatcagcaatgttgttttgatggtgtttgttttcttctcttaatttcaccagctcttgttgcagactctcttcaagagattgcttttccttcaagttctcttcaagagattgcttttccttcaagctctcttcaagtttagcttcgtattctgcagtctgttcttcaattttcttcttttcttcagttatttggctcaatgactccatagt

SEQ ID NO: 199288 - DNA, 235 bp, Zea Mays
ggccagggatactaacagctcttgttggagtcagtggagctggcaaaaccaccctcatggatgttttagctggcaggaagactggaggtctcatagaaggaagcatcactatatccgggtatcctaagaaccaagagactttcactaggatatccggatattgtgaacagaatgatgttcactcaccttgcttgactgtgatcgagtctttgttatactcagcatgccttcggtt

SEQ ID NO: 199289 - DNA, 497 bp, Zea Mays
cgccatcgaggttcattgtctcgacatagcaaatgccatcctcatagcttgaggacagtagcagtaaatcagcagggaagaactggtccttctcaaccctgaccacatcgcctacgcaaaggtcctcccagtgccggtagtcgaattcgccatcactcttgtgcacgctgacattgcggttgttcaccttcatgtcctgcatgaagcggcgccagtcctccaacccctccttcatcatgctgaggccaacgacaaatgccagcggagcaatcatgctgacggcagagaaggggcacaccggggtgagagagaggatggcggtgaggaggaagtagaggttggcaacgcgtcggaactgctcgaagatggccttggggaagaaggtgacgacgttgtacttggtggtggtgatgtagttggtgatgtacttgagcggcttctgcagggcggcgttgttgcagtacacgacgcgcgagaagcccggcccgccgacggcg

SEQ ID NO: 199290 - DNA, 425 bp, Zea Mays
atgtgaaccgatggcaaataatagagcagcatcttttgccaagaataatgtatcagcagcagctgcaataaattcttcatcccttgccccaccaatatccaactttgcttcagcatctcttgtgaagtctttaaactatgttcgctcattggttgcaaggcatactccaaagttgtcattccaatcaatagtcgcggcaaagcagtcacttccttcactttcatcatttctgaataggtccttactttctcaactaactccagaagttattagcaacagagaacatcttgaatcgaaggaatgccatagctcacctgattttatatcatcagcaagtgaaaaagttgatgtgggtgaacctgtagatgatagcaaatatatatccttcgacattttaagctggcgatggcatgtgtatggcgaac

SEQ ID NO: 199291 - DNA, 330 bp, Zea Mays
tagaatgtgttggcttatcttctgccacaaagggaacttggtgttgccgatattgtgagaatagacaacagagggaaagttgtttggcatataacaacaatgcaatagctgctgggagagttgaaggagttgatgccttggaacaaatattcacgcggtcgatacgtattgctacaacacttgagactggatttggtggttgcgcactgtgcaagtaagtgttcttccatggcatgttgcttgtatatccaccctggccttcttttcttttgcactgataataaattacatgtactttcaatcttacctaaaacatttcgtatgctggca

SEQ ID NO: 199292 - DNA, 320 bp, Zea Mays
gagtgcgacgcgtccacctatggcttcagggtggtgctcatacaggaggctcatccgatcgccttcttcaaccgaccagtggcgccccgccatcgctccctagcggcctatgagcgcgaactcatcgggcttgtgcttgccgtacgacattggtggtcgtacctgtgggggcgacgcttcatcgtcaagacagaccactacaacctcaagtacctcctcgatcagcgcctggcgaccatttcgcagcatcattgggtgggcaagctcctcgggttcgacttctccgttgagtacaagtcaggagcaacgaacacggtggg

SEQ ID NO: 199293 - DNA, 314 bp, Zea Mays
cgccgtctttgttttctttccttttttttaaacgatttttctttctcttttcgttgcataaaaggaaactggtccgtgttgttcaccttcgattctttggtccaaacacaagtggatggtctggggtaaatgagggtgtgacgagcttagttgctcgctcatttggtttcttctcctaccaacgatgcctagggggaaagcaagagttgagcatgaagatgtgatgggggagaagcaaagctggggggagtacatgtaaagaagattttttgcgttgtatttttatatgctgctgcagtgcacccaaggttaag

SEQ ID NO: 199294 - DNA, 294 bp, Zea Mays
tctaaaacatcgctctcataatctgcgagaacccatggaaatactgggtactgtgtgagatcactataccctcgaccagcaagtgtatttagatgcatgagatattggaagttcgtaatttctccactttgccatcttttagaaaatgattttgccatgactttaaaaagacggctcccctcaccactctcctgtttagaggatgctgatatggttgtgtccaacctatggaaaggcatattttcttcaattgttaacaaaggcacaaagctcctatggcaaacctaaggataa

SEQ ID NO: 199295 - DNA, 412 bp, Zea Mays
ctgatggtgacggccagtcgggccgtctttctgttcacgatcgtttgggtccaagagatggcagtaggaagcagggtcaaaattctgaagaggtgtattcgaggtgtccagtgggattaaaagaggggatcatttctcctggaatgaagaaaaaccttgtagatgatcatcaatctcgtggagacatttcatctgttgattcgccatccatctgcctgtcccatatcgcggagacacattctgaggcattggtgtagatttcatctgttattgaggaggctgatagcgggattcgctcaacccctgctattttaggtgctgtttgtgtaatggagtcttcagtgtagcagaattctgacgctctggctcaatccttgatggccgcccctgaggcttgttcaccggcaggggc

SEQ ID NO: 199296 - DNA, 246 bp, Zea Mays
cagagatatttttttatcgaatgatgttctgattgccggtgttatttttttatcgattgatgttctgaacattaagtaacaaagaattttcctttttcaacatttgtttatttgtattgatttcatccatcattgatagacatcaccatatcaaaccagctgttgactatcttgcatacatatgttaagatcagtttccatttggattggtctcaagctaagaacggtttggctaatagggttcaa

SEQ ID NO: 199297 - DNA, 523 bp, Zea Mays
gccagcttgtgtttggaggtggctgtgaggttgggatagcaaaggcaaccgaaaacacgaagaatggtgtagtcagggggctactggtggagttgctcaaagggaactctatggccaatggctaagcagggacgtctgtttaggagataggtggttgtagctagcgcctctgctcagtatttgggtggcatgtgagcatggatgagcagtgtgcggcgatatcgttcagagaacgaatgatgcgttcagctttgccattttgagaggtgtaagggcaggagagtcgtgagtgaatgccgctggaggcaaagaatgtggtgagggcattattaacaaagtcagtgccattatcagcttgtacagccttgatagggaggttgaactatgtgtggacataagcgcaaaaattaatgatgtgagtggctacctcggacttgcggactagagggaaagtccagcaaaagtgagtgaagtcatcgaggatgactaggtagtactgcgcactggcaacgggagaggtcaa

SEQ ID NO: 199298 - DNA, 311 bp, Zea Mays
cctgaatatactttcagtgtctcaaaatcttctacatggacctataccaaattcgatttcaaatctgtccaccactcttcaatacctaatgatggcttcgaacaacctatcaggaaccgttcccccaactattggaaaatttagtggcttgattaaattatcacttgcaaacaacaaccttacaggtaccattgaggaatgggtcggaaacatgacaaaactacaaatcttaggactacaatcgaacaactttgcaggggaaattcctccttcaattggcaatcttacacagttgatacacttctctatag

SEQ ID NO: 199299 - DNA, 475 bp, Zea Mays
gagttgttgttcccaatattgtttctggtactagagccgggcgaatgagacgatgtcgaagacaggggctttggagtacacgatgtgttattggagtagtgcgtcgttggagtccttgttagatcggagatgtctagatagatctcttccacagaagatcatctcggaccttgagaaagtttacgaatggcgagtagcggcgaatgctttgtcaaggtgcttgaagcgctggttgagccctttgcaagatgttgaggacgatgatcgtgtcgtcgtcagatcctagtttagcgagggcatcgaccatgcttttgaacttgcggtgttctctcccacggagaggtcaccctatacaaagatgtggaaggcagcgtctaggtgaagatcatgggtcttgcgattacctaggaactggttctcaagaccaagccacaagtgccgtgcggtgcgaccacgttccggaacgacctcttaa

SEQ ID NO: 199300 - DNA, 717 bp, Zea Mays
atgaggcaaaaagtgtaagcagtggtagtgatgaagatagttgggttgatgtcaatattccagaatctcctgcgggaaataaaacactaacatctcaagaaaggaatgtgattcgtacctgccaagtaaatactatggtatgcaattcattttttttattctgccgatgaaacattggttaatactcatttatcaccagaaatttatgcaggcaatggttttgttagataaaataaggatgtttttctttgttatgaggtcatctctagcaaccttatctgtctcacctcctatttcaaacttcgctttgtgaacagtgcagagactgctgtgcaaaacagtgttttgcacggtctactggagtttcttattgagttctttttaagatatctacaacctttttgttagtgatacttttagagaagtgggattgatgagcaggcggacttacaagttgcaactttggacgtagtaaaaacattgtccttatcttctgttattatatgtattgcaggcacactatgaagctactgccgagatgactgatgttaacccatgtgcatcccttactatacgtcttctatcacttcagtcaaatacgtcagtgcacattgaggaaatctacatatttgctgatcctgttgaatccaccaatgatgtttcagtaagaggtcctggaaacatgggaggcagttctttgctggcaatgcttgctcc

SEQ ID NO: 199301 - DNA, 483 bp, Zea Mays
caccagatccatgcgaaaggagtggtaggcaacaagatcagctggatgatcaacaggaatgctatgaagttttaggggcaaggatttatggaaagaaacatggccttgatagggtttgcgcaactagacaccaaacaattttttttgacataaccgcgtgcacaagggagtttcggtttggctagcggttaagcaatgggggtctacaagttgtgtaggtgcaacttcagggtaaaacacacaagggttagaaaatacccactcaagcatgtttttttaagaggtttcacacgctaaactcaaagttgtttggatgggagtctttttatgaacagaacagacaacatttttttttggcaaaaagggttgaataaatacaataccacctagatagcaagacaagagaagcacataacacaacctagtcaagattatcatgacacacaggataagacatttttttgcagttcctagcaatacaac

SEQ ID NO: 199302 - DNA, 291 bp, Zea Mays
tgtaaatctgtataacaaacgaaatcaacacacaacaccctccaccaacctaaagcggccacacaaccaagaacaaagcggtgcatccgaataaatatcccacacggcccggtcaacgcgatgggaatcacacaatgggcatccaagtccacgaaccgcagcagcagcagcagccgccgcccccagcagctgaggctgacccaggcctttcttccgtcccaaaaagagatacttcgctaccaccaccgggtgccaccaaacggggcggcagatgcggacacgtacatcccc

SEQ ID NO: 199303 - DNA, 444 bp, Zea Mays
tgttaaacctgatattgaagatcttgaagttgtcaaatgtcaaggccattttaaggggttttggaatagcctctagccttcaagctaatctgcataaaagctttttctatcccattcggtgtcacgatgattcagttgccttggctgcccagattttaggatgtgtggtgtgcctccaaaatttttcataccacttatcttggccgtcctttgagtttcaggaggctgtctattggcagtttgcagccttggatccagaaaattgctgataagcttcctcattggaaagctgaccttttgaatctgtctaggagagaatcaccttgtcaaggctgtgctctctgccatcccagtatatcttcttattcgctcaatgttcctaaatggagtatcaaggccattgacaaaatcaggaggaacttcttatggaaggaccgaagggag

SEQ ID NO: 199304 - DNA, 725 bp, Zea Mays
gaaaggacgtgttaaggactcgtctaatgttggttttgccgctggaagaggcaggggaaacccaaactcagttgcatccttcaaccggccatcatctgcaggatcaatcggtgctccagctgtgcatgggaaatttgcaaaaactgcagttagtttccgctacccaagagggaagcttcttgatatatacaggcagaaaaatatgatgtcgtcgtttgatgatgcccacatgaaactggacgaaattccttctatcacactctctattgctgcaaaacctctagcatttgttgcaccagatactgttgaagaggtaatacctaggctatattttcctactaactttaagctctaatctcatttcccccctctttatctaccttcttgactacttgttcaggctctcctggaagatattagaaagggtaaagtcattagcagtgaaggaatcaatgggactggaaacaaggagagggcaaaagagctcgaaggtatatctacactgggatgttagttgtgccatgattttatagacttaaaaatgtaaatgttactgtttatccatggcttcctatccatatggtaaactctaaattgtatgattgtttcagaacctgcttctggtattgatgatgacaagggcaaagccagttttgcaattgctgggttgggtcaagaagggtcttcaggtttaatctcagtgaatgatgccttctatgttgaag

SEQ ID NO: 199305 - DNA, 926 bp, Zea Mays
ctgcccctgatgatatgttggcacttgacatagcatataccatctacatgaagtttggagaccttgcaagcgctttgagaatttctctgcagcttgagaaagtgagtacatgattattaaatgtgacatgccatattgctttgttttagaaccaaatgcaactcatccatttgaatgtttgtagtccacccagtatgtgaagcaagtctacacagcaactgatgaccttctgttgaagaaacaattctcatatctcattgcacgccatgtacgcccacacctcacttttctttacatgtgtatgtgttgtgcgtgttcatgtgattgggactatgcgtttattcatgcactcaatcctgagatatgtcttatactttggttgctcttttcttcaccataaaattgtccccctccatctgtcttctgaagggtttggctatggagattgatgatgagatcgccgctgatgacaatgacaaggaggttttgcaagaaatagtaaataatactaagttgagtgagggatatcttactcttgctcgcgatattgaggtcatggagcctaaatccccagaggatatatacaaggtgatgtatattttcattattttgctgcttaccatatttgtaatagcacaattaaattttctataataattgtggttgtgttttacaatatgcaggtccatttgattgatggtcgtggtgccagctccagtcttgattctgcaagacagaatttagctgcaacatttgtaaatgcatttgtgaatgctgggtttggccaggttagcttttgagacaacccttactagcaatgtttttgaaaagagtttaagtttttttattgctttgtgcaggacaagttgatgaccgctccatctgattcatccagcagcgggtcttccggaaattggttattcaag

SEQ ID NO: 199306 - DNA, 674 bp, Zea Mays
gcctttatcgtacaaactagtgtggcaatctggttctccaagaacaaacatttttcatcagaaggacttggaggataagatctctaatattgaccagctctgctctgtttggttacctgtggcacctgcgggttatgttgcaatgggttgtgttgcttcatctggaactgctgaaccacctttgtcttcagctttctgtttaactgcttctttggtttcatcatgtaatctaagggattgcattgcactgaggtcaaatatatattacctgaacctgtttctgtatttgatgtatggctatagatatttgatatttcacactcatgcattatgtcctttaactgaatttttcagggataacactaacatgatattctggcgagttgataatgcttttggttcctttttacctggagatcctgcaagcatgagtgtggatgggaatgcttatgatcttcgacatatgctgttcgacagtgcagactcatcttccaagactgtctctagaaggcaagatagtagaaatgatttctctcaactagagagatcagaattgacctcaggtcggctatttgatgctgtggcaagctttaaactaatttggtcaaatagtgggacctcttcaccaaaaaagctctcaatatggcgtccaatgttgtctgaaggaatgtttt

SEQ ID NO: 199307 - DNA, 445 bp, Zea Mays
gtgccattcgatatgaactcatagactagcaagggtacctcatcttctaggcaacaaccaaaaagcttcaccacattgcggtgaatgatttgagataaaatagcaacctcatcgatgaactgatctatctctatttgctccactattttagatttttttatagccacgacacgctgatcagacaaaatccctttgtaaacagtgccatgcccaccatgacctagaacacgagtagcatcaaacttgttggttgcttcctctagttcatccaaagtgaatatctttgttttgtttgtagcattttcatttgatattagttgctccaagagtagaccttgatttttcttgaagtactctcttcgaattctcctttggataccttttttccacttaccggtgagtacaattgcaccaagtgcaaaacttatggatccaagaccacaaa

SEQ ID NO: 199308 - DNA, 831 bp, Zea Mays
gttgttatcatgttttttctgtaccattgagacaaacaccattttccatgtgctgcatcatcacaagaatatttaccctcaagaaacaagtcatttggttttttgggaggagggtatggagggagcatctgttgtgaacttacaagggaggagtgatgttatctgcccattggcgaagccagtctgttgaaatccaaaagtatgaattgtcctctggatttgcgggtgcttctatcagaatagattttacttcttggcgcctctctgttatatatgccaaatggctgcctttcttgctttggtattcttcacaggatttcatacacgatgcattttgttcattaatttcatcaagaaaatggtgtggaagcaaactattattgaattccataattttgttgctttcagtagcattgccatccttattggtacatttgtacatcagcatataagcatctgtagatgaaaacatctccccggggctagaagatgatgcagcctcctggtgtccattgttattgttcgtaacagaaccttctatagaaatgccttgaggtttcctatcatctttatttgatgtttttcctaagttttcaccaaaagggtgcaaaccaagtttggatacggtttcatcatcaaactcccaccactgcccattgctttcatcttttatatgtgccacatagtgcccactattagcagcggtacccttgtgaattaaaatagcagctagttcatatgtataactagatgtagggtttgacaaccgttttcccatatcaagctgccctgggaaactgaaagacgaagaaatctttttcttggttgttg

SEQ ID NO: 199309 - DNA, 339 bp, Zea Mays
cacttttgagaaacacttcgatccgagggtgcatgcggctgatgagcatgatctcccgccgtagcttgtcatctgtcattctcgccatctcctccaaatccgtcctattgggcattaccacgccgggtattactacgcctacatatctgccctcttcatcaaatctgcctccctgttggctgccgtcgtcaaaaacatccacccatggtacggttctatgtttgcgtttgcggcccctccccatcgccaatcacaaatccacggttaacaagtccacgatcagctaggggcgggagagagatgcggcgaggcctgaggttggaggtggcggttgcagac

SEQ ID NO: 199310 - DNA, 493 bp, Zea Mays
gtcacacccagcctctcctctccgcccgcggcccgcccgcttcttcttcctcgccatcccttcttctagcgcggaggcgcagatccatcgggcttcgggggctcggttccatccctctgccagctggtaaggccgccctggctgggacttctctctggttgtattgctgctactacaagcactcggggtactcagatctgttttccgatcccggtcgcttcacctcgtcgcgcttcctgtcgtctgctgcgtgttgtcgcagtaatgccagactgttctcaccaaaatcgctcggatctcatgcttactaagttgtctggtcgtttgcgtccctgtgctcaggcagctcctcagctgcagaggttgtgacggtcggacaaggttgctgaatgcacttcctttctgtgccagggattggattggagcatcttcccagcaccacccacgcggaagccatgaccattcagttgctccgctgacgactcctctgacg

SEQ ID NO: 199311 - DNA, 388 bp, Zea Mays
ccttttccttatctgcgtcactcgactccagcccctgcccctctgcttgctgcccatccattacaaccgtagccttctccgcatcagctcctttgaccacttcagggacagcagcgctctccgatgcaccagcatcagcaggcagcacttgagcttccaaagaatcctgctgctgcgggcgcagcggcgagtccaccgtcttggacgacttgaacttcagtttgacacggccgtacacagcccccaccttgggcctgctgtacgttatgtccgctggaggattagccggcgcggtggcactgggcttccgaggtggctcagaaggttgagcaggaggaggagacggtggttcaggcactgctgccccagcatctacgagcggcgggtt

SEQ ID NO: 199312 - DNA, 338 bp, Zea Mays
atggtgcaaataataaaagatctgaaggaatgacatcacttgaccaacaagatcagttgttcacgaaagctattgattttcctgtaaagaaaacccaagcatggaatgaaaaggttctctttcttgtcagactttatttattattttctagtattaaatgtacttaatcttgaataaagctatttttgtgattatgtatatttattggtttcagataaaaaggcttcgacttttactcacggtgaaggaatcggctatggatgtccctacaaacctggatgctaggaggaggatatctttctttgctaattctctttttatgtcgatgccagatgctc

SEQ ID NO: 199313 - DNA, 262 bp, Zea Mays
aattgacttagaagacttcgacacgtgttgattgttttggcttgcttcagctgagagccttctcttttgggctgttccggaactgggctgaacaactggatgagatgctctactttccccttctccaaatacttcaacttcatcgtctttatcaccttctttatcatcatccaactcaatagacttctgtctagcattcttcttcaaataatcacttggtatgagctacgtagtagattgcaaactaatcaaactattgata

SEQ ID NO: 199314 - DNA, 216 bp, Zea Mays
gctagctaggttcgtacgccgatcgtcctccccactctcagcccatgacttactggcaggcgtaccttggtgttatgatcagtggcgccattgttggcaatgcccactagctttttacagatcactggcaaatttatctctctctctctctctctctaacttggatcccccgctgcctcagctcgaacgaactgtgcatatgtatgtatatgcagg

SEQ ID NO: 199315 - DNA, 870 bp, Zea Mays
tagaacaatgcaaggaccacatcatgggatgcttccctcatccatgaagccaccatctcggaggcctcttcctttagatgctgacgatactattaagccagagcaacaaaagccaaaggtccctgtcttggaggaacatctagttggccaactaagcaaggaggaacaagatacactggatgcaaagtttaatgaagcttcagtcgctgataagaaagtatatccctctcttgtattgtttcaactttcaagggccttcatgtcttatgaattatgattcgtaaagcagacggaaatagaacatatattggacatttcattactgtcctcactcctcactttgacctaacttcattttgccccaaacatgcagcttgggatcaaagttcaggcatagttgtaaatggtccaaatatatttgaagcaattttgcgcaactggtctagttttgtgtctattagtagttgacaaaaatatatggctaaactaatacataaaaaaactatcgtttctgttgtaccagtatggcaccaaatctttcaaaatgctcctgtgacatgattgtatttcttgaatttctcatttgcaaaaatgtttaaaaatgtagaaactagaacaagatagaattattcggtacacaaactaatgttcagaacattgtttaacatatttgaatccattttctaaatgtcaaattgaaatggtaggctggtagcagtgtttgatctctatagattgtgttgacgaacagaactcaaggttgtgagtgacttcatacaattttactcatcttggctatgttattataacatgatattctgaatcttctatgaaggtccaagagttggagaaggagatccttgattctag

SEQ ID NO: 199316 - DNA, 384 bp, Zea Mays
gatggaaatatgcatactatgttgaggcgggaaagcgagagctgattcaatgtgctttgtgccccaaacaaataaaaggaggtatcaagagggtgaaacaacatctagctagtggctatggagacattgtcaagtgtcctaacactactagagagattgctaaagagatgaatgaagctttgaaaaatgggaagcgggctaggccgttgtacctagatgacgatgtaatggaagatgaagcaggacaagaagatgatgtccaagttatgggaagcaggtcaatgtcagcatcatccaaggcttcctcgtgtactatgccaagttctggaacagctgccaaaagaaacaaagcaattttccaattgaagccccacccaattgcag

SEQ ID NO: 199317 - DNA, 667 bp, Zea Mays
aaatatttaatattcagctaggcatgtaccgatctttacatgtgaagtgccaacttaagacattgctgaataacattataatcgtcaatgagggccagggcatgtgaaagaagactttcacacataccatttttgtaccattcaatattgcatttagcacaatgcaccatatcaaaggaaagatagggatacggaagctgcttcgttgcaaatgaaccaatcattgcaggaatgcctctctccagtgtaatttggacttggctacctgatgcttcatagttagcaatgcacatggtcaagagatctctctcaaaaagatgcgccccaaaggtaccaaatccacattctatgtcaaggactgtcctaacctgaaaatggcatagcaagaaacaccatcagaaataagagttcctgtaaacataacaattacccaaagtcttacttcagccaatcagagcataaagtgatctacatagtatgtccagatgtattttgtatgatgatctttaaaaacaactgtgctttaataatatatcgtagtggagatcctaaggtcctgccaacatacttttgcaggcacagtagtaagctctgatatacactttccagcacattgggcatgcagagtttcccaagtcaaattaagtagaaatagaccggcactttc

SEQ ID NO: 199318 - DNA, 259 bp, Zea Mays
cattttcctaaacttgctgatttaaagcatcttcgttatgtctatctgcataggatatcacttgagggaatgcgtgggcttgttaaacttcatcacttacagctagttgattgtttgaatgattgtggggaggaactaaggcaagtgatgtgtttggggaacattgatcatctgcgatatgtaaattatgggtcgcgtagaattggtgagtttccaattggtagactcacttcacttcaggagctgcacaactatcggg

SEQ ID NO: 199319 - DNA, 340 bp, Zea Mays
ctggatatgagaagattggtaaaagaggaaaatcaaagcaatgatatagctttgctggataaaaacacgggcagtgttgcacttgagcacagtgatcatgacaaaaaagggattatatcaccagggaagcctaaggagatgatgcaaaacgacagtgaactagaacaattaggagagtggacatcagatgctgatttttatgaattggttagcaatgatcagaaatgcagaactaatggagctgaatgcagagacaatggtctgatgacaaattccttagccaagcttgaccggtctgagaatgaaaaattaggaggctttgcaggtgagtcaaaaaggt

SEQ ID NO: 199320 - DNA, 313 bp, Zea Mays
ggtccgatcagcatgtgctagttgctaaccaaggaccgaatggcaatggctggtggtctccacagcatcattcttctctccttgctgattccagattgcacagaacatcctcatcccctcagcaacaggaacaacacaatcatgatgcacctattcttggaccaaggccatctcctttgcaccggacatcttcatacccgcaaaaggagcctcagtacaacccagctgaagtcattccaaatgcaccatacatgtcaaactatctacctggtgggccacccaattcagtgcctcgacaaccacatcagatgaa

SEQ ID NO: 199321 - DNA, 418 bp, Zea Mays
cacggcataccagtcctcgctccgggagacgccattccgggtggtgtatggtcgtgacccgccctccatccgctcttatgagcctggtgaaacgagggtggatgcggtcgcacgcaacatggaggaacgcgaggcattcctggccgatgtgcgctatcgcctcgagcaggcccaagcggtgcagaaacgtcactacgacaagcaacaccggccagtgacatatgcagtcggcgactgggcactccttcgacttcgccagcgagctccgtcctcactgccacaacagacatcgggcaaactaaagccccgcttcctcggaccctaccgcgtcatcgagctcatcaacaatgtcgccgttcgcctggagctaccaccacaggcccgcattcatgacgtcttccacgtgggcaccctgaag

SEQ ID NO: 199322 - DNA, 1110 bp, Zea Mays
agatgtcactgatgcatttaactctatatataaagtgatgggctataccacatagtttaacttgatctaatgagctatatttctgtcctaatttaatggatttatgtttgacttatttttgttatattgtgctagattctttacaaaagtaggtgcgacaataggtttaatgaagtctcagaaagtatgtctgctgataaacgtgaggtaattttccttctgtaaccttcattaattgagctctctgattccatttcctaccctttttgagtaactatggttcgtagaagatgctggtggtttctgaagtgctggaagaagcagaaaagatcgataaaaataatctctttatctcaggcctcatcatattgaactatgcttttatattgttatgttttgtgatatgtcaagcacattgtgtgtacaagtttcccgtcctgttgttacatgctcctggaaaatcacacgtctttagatctcatgaggtcatctttagtggaaacatatcatatattactctagtagaagctagaagacttttgggcattataatttgtgttacaatttgattatgtcctatgaagttccttgtacgatggcatgtaagagtggccactctttgttctaatgttgttttatatgaactttcaattatatattcaggtccaatctctttctgcaaaatatgatgagagatgcaagaaggttggagatgtggcatcaaagctaacaatggatgaggctactttccgtgagatccaggtatatttgtgattctattataaagctggcaacttcatcctcgagatctggctgtgagcatattattattattatgtttgcaggagaagaagttggaaatttataacgccatagttaagctgcaaaaaggggatgatagcgatgagaagtttcaggtctgtttttttgttcatccaatatctttcattgcatcatgctttacatctgttttctgatctcctttaacctctgtttataggagcgggctaataagatacagtcagatcttgaggagcttgtgaaatcattgaatgagcaatgcaagagatatgggttgagagctaagccaactactttagtggagcttcc

SEQ ID NO: 199323 - DNA, 266 bp, Zea Mays
atgaatattaatttatgaacactacccacaaattcaaaggtactccaactcctctcacaaccggatgatgaagcacatagactaaccacacgctttgcaaacctttgcaattcgaaggcacaaccaccatacgaaagccaccaatcaactataataacatgtcacatgacacatacatattggggagattaaaacatgtagcatgctgaaattaacaaaagcacatagacttacgagggctttttgtttcaatgtttgcaagtgcc

SEQ ID NO: 199324 - DNA, 223 bp, Zea Mays
ctcttggaaactttcctatgactcttatctctctattcaaattcctgcacagcatccaaatgccaggtgagaaattttcgtgcattcccaattcatataggattgcaattcatagccaactctaatcctttgtttttcctatacctatgttttcacattcctgtgttccaaagggggcctgatttgtgccgtcgtgcactggagccgccgcccagatcacacc

SEQ ID NO: 199325 - DNA, 279 bp, Zea Mays
atcaaagttgtagcccaatcatagaaggacaattttgcttaagagtgcaagccatgttcttgtaagaaaatgggagataatcatgcccaaactttggctgtcaggcggattaagtctgaaaatcagactgacagtgacattggatcatctttggagacagtttatgactaatctagtaagaatttgcccatggctgctgtaacaaagatgaagatggtataatggacaacaactttgctgcagaacctcggataggttgccatggaaatttgagagaaa

SEQ ID NO: 199326 - DNA, 267 bp, Zea Mays
acaaagtcctccctgctacttctatagattgcagcaaagacgagtttctttcgcaggcggaatcgaggaccgagaacgggatcagagattcgaaagaggaacgaacgaaatctttacaggcagaggagctggggcgggagggactagtgatgatggtgacaggattgggagcgctattgacaagaacaagcagcagaagaggggagagggagagggagagggagaggaggcggaaggggaaagaggccgtttcggtcggcagcggat

SEQ ID NO: 199327 - DNA, 751 bp, Zea Mays
tagcactacaactttgatgcagagacttgggtgagttgtcaagtaaaatttggagaaaatcgaccctcaactctggctgtcaggtgctctgatggggtgttcaccatggtacagtgtacagctgaaacagataagatcgccagcaaacccaccaccgacgaccaattccgccgtgattcgtgccgttgccggcccgacttgtgctcgggatgggcagataaggacacatggtaaaagatcctcgccgacggtgagctggagatcactccggtgactccccgtggctctctctccctctttgcggctgagcggattaactcgtcggtgaccaccgcctcccggccatgcgccgcgtggcttagcctttccaccgcaccgctgtgacaccttaagactgtcccatcgtcgccggggagattgccacgccgttagccacggatttacttgcgccagtgttcttctttccctccggtcgtcgcgcgtcttgctcaaaattcgcggccaccgcccgctggcactataaattgacctcgcccgtagctgcgccatgtcgtcgtgaagctgtagcacccgctcccaccctcgatcatccaccagcacgcgcgaatttctaattccccccaaatccattctccgccaccgtgaaacgagcttcaccgtcgccagccgtactccggtcagtccccgtcctctgctcccttgtttaagcattctgatgcggctgtgatactcgccaacccatccaattgaa

SEQ ID NO: 199328 - DNA, 626 bp, Zea Mays
cgaagagatacttcaatgtcatacatgaagactacattaatagggtatttgttaggtttatattaatatcatacagtgatatatatgattgtttgtttgttgaaggatcctgtttcacatggtatccgctcagatgtttcaaaaacatcaggggctggtgaagaccaaggctacaatacgaagaaaaaggatgttttcagggcttcagttcttgatggtgaaactgggcgtcgtgaccgctggcgcgatgatgaaagggaaccaaattcaacccatcggtggagtcgctggagggagacagataaggaacatggcgatgcacgcaaagcggaaagatggtcagatgacacctccaagcattctgtggatggacgtcgtgttccgcaggagcgctggggcgattccaataataaggatggcagttatgaccaacgacgtgagaataagtggactgcacgttggggttccaatgataaggagtctgaaaattggcgtgataggtggggggattcaggcaaagagggtgatgcttaccgtgaaaaaggtttatctcaccatgggaaggatgccaacagttatgaaaaggatgacaatatttctcgttcatggaaacctagttattccgc

SEQ ID NO: 199329 - DNA, 243 bp, Zea Mays
gtggaactagatcctgtattgctgatccctgatggcttgatacgagtgttggagccgtcacatgacatttagcacaagtatgtcacaatataaacagcagtaacgaagtgtcaaggacagtagttatatgagcagctttcgttgttggaaaaagtatatattactgtgatggaatagtcattttggccgctcaactattgcctaaggcgcaaattagtccctgactgtacttcgaaaatattt

SEQ ID NO: 199330 - DNA, 511 bp, Zea Mays
tgagggtggtaaaagtgtcggactccaatcaaagaggagaagtccagagaaaatgggaaaaatcattcaaaatcaccaaatagtatttatatccagagagactgagtacaggggaggtctagaaatcacaatgaaccaggtcaaaagcatgctcagcccgagaagaagaggtagtaaaagggagacgagtatgtcggcctagctgacaagcatgacagaggccctgaaaatgtcccctactacaagaagaatctaaactactggaaagcttggtcatgacgtcaggtcctgggtggccaagacgacgatgtcaagtggtggaggtggtggtggagacaaggacgggaggtggaggcgctacgatggaagagggccggagtgtgtagaggggcccgacgctgtcacagcgggcgagcggggtcctggtggttagatccttcacagaaaaaccagaggggtcaaactcaatggaacaagaattgtcggtggtgaaccgacggacaaaaaggag

SEQ ID NO: 199331 - DNA, 466 bp, Zea Mays
aactgtttgaccagaccgattgggtcagggatgctcatgtattgatttgatggtcggtgtatggacttgctgtccattgcgtttttatctgtgacgataggtggtttttttttctgtttgccactttttccatgtttttgatcgatcttcttgctgcaatggtaatatttactgcggccaattatttgttatgtaaactactggtgtgtttggttcgaagaatcaacttatcctaatgcagtgatgcatcataagtttattcctcagatttagtgggatgacctcattcctcatgctagtattaattattaacccgtgaggaatggtgtcggatcaatggatcacatcattccaccaaccaaacaccccatacaggtatcactaaagctgggttcatggattcttagaaaagctacaagagggtattcatgctttagatataacagaacagtaattttcagtctag

SEQ ID NO: 199332 - DNA, 742 bp, Zea Mays
actgctcgaatgaatagaaatctggaattatgctattattaaaactgggtttcaacactttaccattaatcgaacgggtttcgcttgaataccattacgaaacttgacataaatgttgtaatgccgtttcattattttataaagctaaaaaggaaataagagagatggagagacaattttgctctcttccccgcagcgcacggtggtctgggtgtggccgtgtgggtgtggtgtctgtagtctgtactcgtactcgtagatagaggcttttcaagtgccacctacgcaagtgcaattcaagaatgaatcgatggagagaaatttggcaaaatgggtcgctctagcttgccgctctgtaaaacacaccgcttctagctgtactcgtaaaaacgggtcgctcaagtctgatcgctcgtcagaaggggtcacggatacttttggggcacctggcaagtgggcccgcgaaggcttgtcccgattatgcccttacggtataatcgcatgccgtctgtttcccttcctcttctctggacgccgaggactccttctctgtcttcgcacgcagcttcctcctcctctgtccaagcggcggtcgtcggagacgaacctgggaacggcgacggtgacgacgtccaccagtcccctcctctgtaagctttcccctaacttcccccaaccctctgtaacattttccttcacaggcggatgtgcgacggacgcgagcgggtggatccagtggtcg

SEQ ID NO: 199333 - DNA, 397 bp, Zea Mays
ctgttcgggaaacccgtctgccatctcgctagggtacatggtgtgcgaaggatgggacggagcagacagagatccagagccgatgccggctctctctacgcccgcaacggaaccgagatggcacgagagcaatgagctgccaaccggttctctcaaaggcgacggtttctccaaccttgggaacgatccagaaatttcctaaaatcgacaaccaattcgcacatccgcacagaaaaggaaacgaaaacattaagcacggatcaggaaacacagaagaaactttttctctcaaaaaaaaaacatcgagatctagacgatgaggggggaggcgccgccgccgccgccacggccagggaggctgcagaacgggtcgagctagctagggttgaagttggcg

SEQ ID NO: 199334 - DNA, 341 bp, Zea Mays
gtcggccactggtccaagccacaacctagacaaccaatcaccagcacaatgcagcctggctcagcaatactagcaaaccaaacatgattgcctgcattcacacaagctggccacgcttggcctggttctactccccagccacactcaaccaatcaggcccattctgaatgagccagtgctgcttctcttccccacgacacatgaataataaactcgtgaaacatgttttagtcgtccgatccatcttctggtgcatcttgactgttcatattaacaccttaccccatacttcggacttcggagtccccttaggttttggccataactacatcacacatcac

SEQ ID NO: 199335 - DNA, 555 bp, Zea Mays
gttttgtcgttcgtaaatcgtaatacgcgtgctgttgccgtgtccgtgtttcaaccgacaggtctttcggttggactatttcctgcttcgacttcctccttgaatttgacggattatctggatgcactatccaagatcgttgctgtgagttcctgccaccctaaccgcaggccttgaatatgtagtttgttctttgttgtactattatgttcgttttccttttgttggtaatggatggagttcttggttgcttcgattctgatagggatcggacacgtggccgtggacaacagagttaatagagtcagcgtttatcccagggaataacttgtatctggtgcaacctcggtgtttgtccaacctaacgcagacagtttcatccaatgccggggccatacctcttcagctcagtaagtagcatttactaccttggtcttggtggtccactcgacgaagatatatgaatataagaataggaaaggaactaatgtactaggcctgaatatatacatcgatgtagtacagaaactgtgtagaacaaggaccctatatatg

SEQ ID NO: 199336 - DNA, 587 bp, Zea Mays
aagggcctcaggtacagaaccatgtggaactgaaacagtgtgagaaggatcaatgtttatacctggcgaaggagagtgggtggaagagtacaggccaacatgcctctgatgaacatctgctcctccgtaagtgccggcactgatgtgcctgaagggttccccatcctcaacaccattggggggtatcccttgttcttgtactgccatagttttagtaccatgaaccctcctctgctgaagtattcgtctctgccttctgctcaacggtgcttcatcatactggctccgtgaatcttcatctgaacgtgtatgcagataagcaacaagtccaggaggaagtattcttgatagcaaatcaagtgcaggttgataggaatcagcccaaagagcaacaagttgccgactaacatcacgccgttctccagcaggaaagaagaaagcatttagtaaatgcctcagaagagcaccatccttcaaggcagcgtcacgcatggactctgctgctattgcatcttcctcagcaattgtacgcattataacagaaatagtctctcgcacactttcagctggatgtgcaaataatgaaa

SEQ ID NO: 199337 - DNA, 338 bp, Zea Mays
cgacgatcgagggatgggaggaatggggggatgggagcgagataacgagcctgcggtggaggtggtgtggtaggatgcatcggagtcaaccacctagtaggagggggtggtggtgtcatcgccatggtgttgaaggcagcgacgagggatgttgagtcccaccctttagccattggagacaagggtgtcgtagttggggtccccggaggcggggcggagccagagtcgtcggaggcacgccgtgaggagggccgacgtaggaggacaaggcagggaggcacccggggcatggcccggtcacatggagatggccccgctctaggggttgtagaatgacg

SEQ ID NO: 199338 - DNA, 1111 bp, Zea Mays
cagatatccatttcaagtacatagaagcagctgcgaggactggacagatcaaagaagttgaacgtgtaaccagagagtcaaacttctacgatgctgagaagacaaagaactttttgatggaagcaaaactacctgatgcccgtccactgattaatgtttgtgaccgctttggttttgtgccagacctcactcactacctgtacacaaacaacatgcttcgatatatcgaaggctatgttcaaaaggtaattgtgtcgttcgactcagtgttaattcaggcaccgtttctcgcaatatgttgagtatgagaatgatcaattcttttctctaatttccaggtgaatcctgggaatgctccattggtagtggggcaactacttgatgatgagtgtcctgaagattttatcaagggtttgattctctctgtccgttctctccttcctgttgagccactggttgatgaatgtgagaagaggtttgtttttcgtatccctccagtttgcttaatcacatggtccacggtccccctccctttcccccacctttctggttgtctcatttgtttgatatgtgaaccaggaaccgcttacgtttgctcactcaattcttggagcacttagtgagtgaaggtagccaagacgtgcatgtccataatgctcttggaaaaatcatcatcgacagcaacaacaatcctgagcatttccttactaccaacccattttacgactctcgtgttgtgggtaaatattgtgaaaagcgggatcctacacttgctgttgttgcttacagacgtgggcagtgtgatgatgaacttattaatgtcactaacaaaaactcattattcaagctacaagctaggtatgtaatatttttttgttgctgtgacgtgtgacacctgtttctaagcctccacttcagttgtctgatagcttacatgttcatacttttaaaatgccaggtatgtggttgagagaatggatggtgatctgtgggataaagttcttcagcctgagaatgaatatagaaggcaactcattgaccaagtggtttcgactgcgttgcctgagagcaagagccctgagcaagtgtctgctgctgttaaggctttcat

SEQ ID NO: 199339 - DNA, 229 bp, Zea Mays
gtttttttttttgtgggaacgacacttaggagttcacttgctcccactataacattatatatgtaccagacatttgcatataataattgtttcctttaactgcagtttacttaattatactgaccttctcatatggcgttggatccgtgatgcctcctccattcctgaagctatttggaattcattgcctgaatcagtgttctgaagtgctatctaacagtcagaaatg

SEQ ID NO: 199340 - DNA, 297 bp, Zea Mays
cagaaataaaatcttaatagtgattggattatgggctatttgctgtcaagtactttgtagttgaaatattactccatctagttacacttattttgtgtgtgttcagtccagatgtctaaaaatgatccgatgattgagtagatttgccttggaatctagttacacctagatttctccttagattactccatcgagttacacttagattttcccttgctaaacttaagcactgcactttttgctaaagtttagctactaaaataaaccgggtggttaaaagtgttgcactaaatttta

SEQ ID NO: 199341 - DNA, 449 bp, Zea Mays
accttctgctagtgcacgtacccaaggctcggcttgattgctttcatcaatttgtgtattttcagaatcatcaggtactacttcatgattagctgatgagactccaagaggcaaatcattagaagtatctgctgcattggacctgcctaaagaagggagaggagcgccttttgctgatttagtaaaactacttgatgagttcaatgcattacccacaccatctaaattggcctttatgccaataactgtagttgtactcggtacttcatcttgtgacttgacagcaagaagaggatccttgtcgtcttccacctcagtattcacatcatcaccatcagggtcatcatcaccatcatcgcagtcagaatcatcatccctctcagcttcatctacctccttttcagcttcagagtcagaaagcacattctgaaaagccctaattctttcac

SEQ ID NO: 199342 - DNA, 410 bp, Zea Mays
cttcctcatcaacttcccccgcctcatcatcatcctctgacaagccaaagtcaatttttttcagaccccttggctgtcggtgaccaaagtccgtatcgctgcccctcccaccccgatgtggtccaacactcttcgccattttgcctctcctgccaccttgctgccttacactgtaaccatcaaacccaactggaccagcatcatcatcttcatcgtcatctaaatcgcttcctctccctgttctctgcaaaagatcggacgtccttctccttccgtcatcataatcaccaaaatcattgtaactccctccctttcgtgacagacccaaatccctcctgccccgacctcggcccagcccaactgtgttttcccttccccctttcctgcgaccatgatgctgctttccatca

SEQ ID NO: 199343 - DNA, 285 bp, Zea Mays
ccttcgaggccaaacagtcctgtcgctccctgctcatcatcacctagaagatgccaggccagccaccagcacttccacacaaacaatcagccaaatagacccatcgccccctgctgccagaacaaaaccattttcttcagtgctcctactgatacacgccgctgatactacttgatgttgctttggttttcttcgatgttgctgatggagtggtggtggtgcacttaacagaatgttgaacgctgctgatctgaactctgctatgtaaacccaaacagaatgctt

SEQ ID NO: 199344 - DNA, 316 bp, Zea Mays
ggaagacgaacatggcggcctaactggcacgcatgacaaagatgctcatcatgtgatctagtacatgggatagtggcactacgagtaagttgcatcaaggcatcgcgtccggggtgaccaaggcgacgatgtcaggtggtagaaaacgtgacggcagcaaaaacagcagctgtgtcaggtgacgaagacgaagatgtggcgtgtggaagccgaagggtgtagagggggtcggtgctgtcacatctgagtagggggcgccgagttgccgagtccttcacagtaagaccagaagagtcaaactcgacagaacaagaat

SEQ ID NO: 199345 - DNA, 1279 bp, Zea Mays
tcttctctctcattaaactaagaattctaccgtgcctatagatgaaagttgtgacacgtcttgcacgtacaatgggcttcttaaattccttcaagtttcctatgtcttctagcataagatctaagcaatgtgcaacgcatgggctcacaaggaagttgatcaaatgcctgcccctcctatcagaccatccatctgacataagcgtgcaaccataatgcttccatgccctcttgtgttcctccctcatagttgtcaatttcacagcatccttaagcaatggctgcccaagttgatatggaggcttatagcctgaaccaaactgggcagttgcctcaactgcaacctgaaattgtcttgctgctgctgcattaaatggcacaccgcattcataaaaccacaaagcccattgcatatccacataattcttctcctctttggacttcatcttggatgcaattgtgggttgagaacaccctttacgcctttcatcaactacatcttcaggtgatttccgaagcatctccacaattgacttttgcttgcttgcttgatttgccttggtcttgattgatgttgtatccttgtacagataggttgcacgcctatgtttggctgcagtccctgaacttggttgtaccttagagccttgggattctataggtgcatcttgttgaacttgaacagattcagctgctgcatccaccaccattacatcctcttcctcctcttgctgctcattatcatctaggaaaatagctcttttccttcttttggattccaagtaatccctcatctcctttctaattgcagtagtggtctttgaacatatctttgtatttccatagccacctgctagatgctgctttagcctttttatccctccgaaaactatggtgtcacaaagggtgcatgtcacttgatctctatttgccaaatatgcccaataaccatacttccaacctggatcatttgagctagccttccttgctttgtctgtctttggatcatttggcattgttgactgaagatgggctagccattgattgatgaaggtggcagggtgctgttggcctgaggaagcaacagagcagtcagcagatgaactgaggaagcagaggaagaggaagagcataggaagaggaagagcagaggaagaggaagagcaggcgagcagcaacagagcagtcagcagatgaactgaggagtgaggaagcagaggaagaggaagaggaagagcagagtggcacaccggatggaggagccggtcgctggatggagg

SEQ ID NO: 199346 - DNA, 547 bp, Zea Mays
ccgtcgcgccgaactcctggctctgcatttcctgtgcctgagtgcgggtcatggcactctcgccttgcctggggtcgcgtggtggggggtcaacatccagcctcccgtctacagagcgtcctcgtaccaccgacgtaaccatcgccctcgctgcctcccatcagcgagcaggaacgtgcggccgtcgatgccctagagcaccagcttctcgggccccctcatccgctcgttggtgtccagggcgatgtttcctactccgtgcacgacgtcgataacgatgtcgacgtcgataacaatgctccgacgcgttgatcgtcgttagtctccatgctcaggcggcgggacttcgcagtatttgggctctggtctccgtcgtcctcgcccctgactcggccccgtacactcgctggcgcgatcatgtcctgctgtccctccaccgctacgccctcgacgaccacgtcctcaccgacacggtggtgtcgacgcacgcctggtcctggatggacaacgttgtcctagcctggatcctcggctccctcacggtcga

SEQ ID NO: 199347 - DNA, 351 bp, Zea Mays
acaccaccgtttaaccattatttgggcttaacgaaccattaaacatgctactcaaccaattgaatgggcgaaacagatgattaaacggaaacaacataccaccatgtagtgtttacatgatattttaaatgaatgtttaggtaagcaattggaggaagggaagactcttaagcttgatatgtagtcccatgtgccaaagttgacgcaaatgtagtgagatggcggaatagggtaagaatcttctgcacaactttagaaagtgagcatgggcctcactgagtgtggtcaccacaacgccaacaaaagattccctagccaccaccgggggaggacataagtgacatgggctag

SEQ ID NO: 199348 - DNA, 375 bp, Zea Mays
tgtattttggatttcaataaaatgcattgtttgatgttaactaaaagtctacgaaagagggggaaaaacccgatgtaagcgatgaggtgactgtaggtttacagtaaaggttaaggttgtgcagtggagcgttgtgatagataggaactgataatcgacataaactggttggtagttgatatgacagccagggctcgaagcaacctttaatagtttgggagctaggtctaggcttgcatatggcctcatgctctctctgatcattatcagcgtcgtccgccccgtcaggtaattgggttaaccagaacgcagacaactggccgtcctaggacaccgacatcatacggggcaggagtgcagatggaggaagaagac

SEQ ID NO: 199349 - DNA, 417 bp, Zea Mays
gcaactcccaaattctgccaactcattcattgttaattgtgatgcgtccggctcaggttttggtgtcgtactgcatcaagatgagggaccaattgcctttttcagccgcccctttgcagcccgacatgtcaagctcgttgcatacgagagaactcattggactggtacaagcagtacgccattggcatccatacttgtggggcaggaagtttgtggtacgtacaaaccatttcagcctcaagtatatgctcgatcaacggctctcaactgtacctcagcatttgtggattagtaagctatttggtttcgacttcaaggtggaatatagggctggccagctaaatacagtagcagacgctctttcgcgcagagaaaccaccagtggatcggtctatacgatctcaacaccaacctttc

SEQ ID NO: 199350 - DNA, 721 bp, Zea Mays
tgggcaccgtgcgcgcccgcccgtcgtcgctgccgcctcgccttggtcgtccaccagcagggttgctttctctcggggctggtgctccctctctgccgctcaagtttctcgtcgccacttacgcttctcgtcgttcagccaccaacaaaaatacgcgcgaggaaaaaacgagggaagcagctagatgcccgcgcgctgaggggattggggaggaatacaggacacggatatttggaggagagaaagctggatattggcgacgcgaagatattgggggaaagaagggggaattgttggagggctcaaagtgggctttttccctaataaacattttacgggttactttatggattctgttggagttgctctaagcataaaacacaaagaccaaggaaaaacaaatcaggcctgttctccattacttcaactacttacaagaatgacttgtgcagttgtgatgtgcattaaatcgaccacaaaaatgtaccatcctgctactaccaacataggattggccaatcgcaccatgggagaaggagcagcatattaaatcagccagggaaatgaagcagcatgtgcgtatgacctgaggcaaaattagcctccgcaaccaagcgcgctgatcattgttacacactttgtctgagtaatgcgtttaacaaagacaggaagaaggaatactttgctaagacataaagaagtgcacaattagcaaattgaa

SEQ ID NO: 199351 - DNA, 2011 bp, Zea Mays
ctagaatagatctacaagctttggctagtaaacttgtaagttttagcctttgtttctcacaagagcagtgctacaagtacaactattgggtacaacttgagtattaaagacccaaaggttaaaatgacttggataaaaagctcatagatgcattgaacagttaaatacatggttgtacacttgtacttgaagttgtactcaaagccttacgcttcttacaatcttgcacttttgtttattattacctatcaactttaattgcataaattaaggagtggacctaatctatttgtctcagttcgattctctagtacgcacttacgttaacaaataagttacttaactacctaaatgtgtattcaaaactgaggtctcaagtccagtctgatatacaatataagagaataaattgtaaacaataatacaatatactcccactgactccaaatttaagttgtttaggatatcaacagggtatgatactttgacttgcaatttttataaaaccataccccattccatattatatgtatatgatgtttttctctctctagatatgtaccttttgctatgcactttgatatacaatatgtatagataaaaggctctgtttggaaaagccaaaatgtcttatagtttggaacagagggaataacattttagataatattatggaagtattttctgatgaatctagtaacatcaaacatgtgttgtcaaacgggaaaatattcagtgcaaaccctttaatcgatggaaacataaaagccttttacaaaaacacacttcggacttcggagtttattttgttgttgcttaagataaaaggctttgttgttgttgatacttaggaattctaaaaaaactgaaaccatgcatatccacagtgcatctatgtatatacattttcgcaaaatttgagattcaaaattaatattgaaaaaatcacatgaaaataacaaatttcaggttcatatgtattacgcactagaaaaattcctaggaagtttattctctagtgcatatgcatctcaaatttgttattttcataggattttttactaaacgaatttgaatctcaatttttgtgacaacgtgcatccgtagatgcactatggacatgcatagtttcaatttttttaaaaaacttgtaagtatgtttgtctaaagggtattcacgattcaaccgagtggaaagtttgcaccaatattttcctgttgtcaatttatataacatctcatatattgatagcatagatcatatttaagaagtttgaccgactaaatcctacaacaacctatgtctggagttggtggagctttcatgttttataactgagtatactatctttccatatctcctggaatgttttcctaaagcaaaaacatcttatgatctgcgatatgaagtagttttctgattatcatgtttggttgttattttcttgttcttgattgagccgttgagttaatcaggtaattatgattcttatccggatgcacaatttgtatttcaggaaggggagtctgtaaagaagaaagcatttgtcccaccaccacgattcttcaatatcgatgaggcgaggtgacatgtttctccttgtgaattgatctaactgtttctgtcattgtttgctaatcttgtgtaaacagggagatgcatattcgtgtggaacggaggcgagataaagaatctggggagtactttgagtgggttgataatttgaagttcaaagatggtttcttgtacaaatctgtctccactaaatcgatccacacaaacaatattcaaccgaattttgacgaacttgagaagtttaagaagcctggtgatgacatgaatggcgacatggctagcttgtccactctgtttgcaaacaggaaaaaaggacactttatgaagggtgatgccgtcattgttattaaaggcgatttgaaaaatctggagggttgggttgagaaagtagaggatgaaaccgttcacatcaggccaaaaatatctgatctcccg

SEQ ID NO: 199352 - DNA, 547 bp, Zea Mays
cagggattcaagactgagggcccacatactgactgttctaaaaaatatgatatcacttcgaaggaaatcatctggtaatgtaccttcaggaagcagtgatccatctttctcttctgttgatggcaataatcccatggaacttttctgcattcttggagtctgtgaaaagcaaaaaaaccctggggaggcactcctaattaaagcaaaacaaatgcagtggtctttgcttgccatgattgcctcatgctttccggatgtaactcctctcacatgcttaagtgtttggcttgagattacagccgcaaggtaataacttgagcatagtatgattttttttgctaacaacattttgcatgtttcattgatgttataatgtgtaattatcttaagggagatgtcctcgatcaaggtggatgatgtttccttgaaaatagcaaagaatgttggatctgctgttgaagccacaaataaattgccaagcactagcagaaatgttgaatttcgttacaataggaagaatccaaagcgaagacggttcctggaagcg

SEQ ID NO: 199353 - DNA, 400 bp, Zea Mays
ccaaggggagactgaactgaagagagacgaagcaaggaggaagcaggaagacgaatgcaccaagctgatgtgtgatggaatcgaagcaacaggaggaggaggggggccccggccagcccgagcggttaatagcagcagcagcagtagtatcaaccgatttactatttatctaccgtcccaacagccggccgttgcctgcttcaatcacagggcagcaggacgcaggaggccagagcgggacgggggagaaaggaaggaaaggaaggaagaagactagaagagttgagcggccggaaccggaacccgatcgataagggaggagaggacgacgacggctgcgcacggggaggtggtgaggccagcgagtggacggatgattcgccgcctcggtcgatcgatc

SEQ ID NO: 199354 - DNA, 359 bp, Zea Mays
atcgcgttttaaaaaaaggcctccaacccgagaccgagccagaggctctcttttccctctgtgctctctggctatctgccctctctggtgattccccgtctgctcactggcggtgatcgtcggcgacgtgctcctgtgactttctccagcgtgggcacctctgcctcctctcggtgagcagccttgccttccctctctctaatctctacttcgctggtcagtgagcttgccaccccttgattgctcaaattccaaattccttccgaattctgtgaatctctgtgcttgaatgagtccctagtgccacattatatccccctgcaggttcctagctccttagggagggcttcatattctca

SEQ ID NO: 199355 - DNA, 576 bp, Zea Mays
ccgttcactagctcgtcatcgcatacctccactccctttgagttgttacacggtgatgattggacatcacctattcttggtatttttggttgtcgctactatcttgtgctcattgatgatttttcacactattgttggctctttccacttaaaagcaaaactgatgtgtgccaccacattgtcagcattctcacctacattaaaaaccaattctagctccctgtcaaagacattcaggctgacaacgggcgcgagttcatcaacaacactctcagctccattcttgattctttaggcatccaccttcgtttttccacccttatacatcacaacagaacatgaaagcagaacatgccattcacaccctaaacaatgtttgtcgtaccctcctgatccacgctcacatgccacccccataatgggtcgaggttgtccgcattttcgcctattcctcaataggcgtccctgctcggccatcggcaacttcatttcatgtgagcgcctctttcatcgttcccctaattatagccccctacacgtgttcggatgcatatgctacccgaaccttacaaccac

SEQ ID NO: 199356 - DNA, 303 bp, Zea Mays
cgccaccaagcccatacgcaccgccacgccctgaacatggggaaaggtatgcgaggcagtctagtgggcactaccgccagtaccctcccaggcactgcgagaacggtgggatggggcctgggacctaccatcaccatgggtgtgcctgtccgcactgtctgcatgggcagaggactttcccgcaggaggagaacatcccaatggcgagatacttcgccgggcagcacgaatcataccggttggagaggtcgccttctgtttcatccgattatgatcgtgggtctgtggcgtcatcactttact

SEQ ID NO: 199357 - DNA, 610 bp, Zea Mays
atggcagtcgcgggggtgccatgtgcgccgcacgttgaggcaggtcgttaatggcgtcgtaggctcatggcggattggaagagggcaggaggcatcgtcgcactagtgtggaggcactgaggtaggtccgcaggtggcgggtcgtcggatcaaggaggcgcggtcgcgcgttcctgccgtcgggcagccaggggaaggagtgctagaggcagagaccagaggggaagcagccaagtgggtggcagagcgttggaggctgaaggtcgtattcacacttttgcagcaccgtgtgtgtggcatggagcgggtgcctgcagggcagatgactcacggttaggataaattgggagcttgctaacctaggaaggagacgtcctactctgatgggtcgggatgaggtatggcacacgccatagcacgccataccgggtcctccgctgctgtatagaagcacactagttagttggttatgtaacttacattttattctggaacgatttcattagttcattagacacactagttagttggttatgtaacttacaatttattctggaacgatttcattagttcattagacatctatttttccttatggcaattttcctag

SEQ ID NO: 199358 - DNA, 1406 bp, Zea Mays
cgtcgccgcctccatctcctccccttccgaggacgagaaggaccaggttcactgccccgcccctgccctcctcgtcttcaaacatttttttgttttcatttttacgctgctagtgcagatgactgtgggcgatggggtttgctaacttcagttctatgcttgcaattgtgtactcaattgtcaattgtgcattctgcagtggtaggtttgggtagtgcctggacgcacttcctttgttccagtagattcatcgtactagtagcaattactcgctcttcaagtgagttgaccattaacaatgttactgctggataggaaaagctagaaaatactataatattggattgttacccttgcaatcgtgtctcagaaacgccattttgcagtaggagctgtgagtaatccaacgaggtagagctgatgttcttgtactttcgaaattccagtgcaattaatggagctttgagtgagttgaccatgaatttagtttaactagtctgaagtgaaaaggctggagagcacagattagatcagtgttcacccaaacactaaacaataaggagttggccacctatgttgtagctgtttatttgggctaaatgacagtttaaatggtctaaattgccatttaaacaggataagtgtctgattaaatggacacgactagccactgctgcgtctaaatagcatttaaagggataaatggctgtttgggtggaacatcggagtcatttttgtagtagttcagtagaatttttctgtgctcatactgcacatggctaatgggtgccttgttattgttggcaacagtttttttgttttggatttttcttcagtgttcttaaattttgcctggacaacaaaatgtcggtttctccaagtatagttaatgcttagctcaattcagtttcaccactaacaattttgattggacaaatgtttgccgctgtatgtttctgctaatttatgcacagatgcaatcttgatgatccatctataaacaggttttgtgggctggatttgataaactggagcttcaaccatcatcattcaagcatgtcctgcttgttggttattcaaatgggtttcaagtgctcgatgttgaggatgctgcaaatgtttgcgagttggtctcaaaacgtgatggcccagttacgtttttacaaatgcaacccactccagttagctctgaaggcattgaaggattcagagcatcccatcccatgcttctagttgttgctggtgatgagacaaatggcctgggtgcggttcaaggtggtcgcttaagtgctcttatcagagacacaaacagtgagcctcaagctggaagttgcatttctaccccaacggttgtccgtttctactctttgaagtctcacacctatgtacacgttcttcgattccgg

SEQ ID NO: 199359 - DNA, 412 bp, Zea Mays
ggtagtttataagaaactggtttcttatctcaattttcaaaaactggtttctaaaaaaattggagtggctgtttggaagccagtttctagaaactggtttgtaacttcttaaaattgaaaatgacaagctcatgcgtgacgattcagatcagatgcaaatgcttgtctgaattctgaaaaaggctctgcattactattgaaaagtcattcttaagaacattgccagtcatgaatatattcctatgagttgcatgatctatttgtcttgattctgaaaaaaaaggctctccacacaggtgaactcactgccatcactatgattatcctggtaagagctgtaatcatcaatatcactgtcatcatctagtccactgaagtggtagtcgatgtgctgcttctcagcagctgcttt

SEQ ID NO: 199360 - DNA, 212 bp, Zea Mays
gccgctgtcgccccgccgcatactcgccaccttctgaatgtcccccgccgcgtccatctcgccgtccctcctccttccctctgctgccgcctcctgctccccctaccaatccgcaccacaagtccacaacgccgagcaggcaccgggttaccaacgagattccgttgtgttggaggcttggagccttggaggggatggggcgtgcgcttgcc

SEQ ID NO: 199361 - DNA, 589 bp, Zea Mays
agcatgtagaggagacaaaaaagaggaactatgtgtcgcatgtttggtgcatgtataattgtataacacgatctccttttcagctttacatgcaagcaaaaacaagtgagaaaggtgtccataagtttcatgcatgaccatagtatgaatttcagaattgagtccgtttgtaaaccttgtcattacatcttccatgcattcatctaaaccagcaaacatggtacaaattttaaaatcatgataatatttttttacagtcctagcaccctgcttcaaagtgtctaattcagaaagtaagtgatcaacatagtatgcaggaatgaatgcatctctaaaatgaaatttgaattcttcccaagactgtggaactttgttgtgcctacaaatgtatttccattccatcaatgagtgctcagttaacacattagaggcaatataaattttttgtttttgagatagatcatgctcatcgaattcctcatctaccttgagctcccaatcaatgtatgcatgaggatcgaatttaccggcatatgaaggcaagtgttgaatgatgcctccaatataacgttcggttgggtcaaaaatg

SEQ ID NO: 199362 - DNA, 554 bp, Zea Mays
tgagcatggagctagtctcaaaaaaatcagttgacatgtaattctcagaagtagctgcccgaagaactgagtaaactgagtagaagtaagccgtgttcgtccctagagcaataaggacatccatatttggtgagccatggcatattgccttgtaagcaccagtataaaactttcgaccaattacaaattgcactggtgttgataaaatccaccgcaatagttcgccaatgctcatcatattgataacctttttttcgagcccatccttcagcccagggatgtacatgaacaccatggaagtgagaaacactggaatagtgaatattaagctccacaagaaagattgcctgtatcgtttgatttctccatacctgtgatgctcccttcctcctgcttctgcatatattgatgcagtaacaccaccagaagtggctgactcgatgacttcaatgaggtccctgggacctgtctggtcaggcttgtacgagacggtgaccttgtggagttcagtatcgatctttatgtcttccacgccaggaagagcttggatagag

SEQ ID NO: 199363 - DNA, 230 bp, Zea Mays
gagagagagggcgccgttgagcgagatgaatcgcagctgccttgcgggcaaagccacgctgttgttcagtgcccggaagatagtccaagggactcgcatgatctcatatatgggggacatacaagttgtcggtcatgagggtcctcggaacattcttgattcctcgtcgaacttggcgggtttctgtcgggtcgcaccacaccataggcaggtcaaaatgcaacaccatt

SEQ ID NO: 199364 - DNA, 317 bp, Zea Mays
cgagacaagatggtgaacgtaagttttgagagtcgcaaaccaacgtgtggcgggcgagcacatgtgaactagaaacgaaagcagtggccacgtctgcacgacaacgacgtcagcggagccacgacatcagcggagccacgatagagtagaagaacgagcgaacaaattacatgcgaggcgaggcaacgggaacgaacctggcgcgatcggagatgctgttgatgaccgcgggatgggttgcgtcttggccgggacaaaacccttgtcgccctatccagattcctcgttggtgagtggagctgagtctcgagtccgac

SEQ ID NO: 199365 - DNA, 464 bp, Zea Mays
ccagttttgcaattgctgggttgggtcaagaagggtcgtcaggtttaatctcagtgaatgatgcctcctatgttgaagggacacttcctagtggtgtcagtacatctctgctgaagataagtctggaggaaaatgccatcagcaatcaacatgggattactgacacccaggaaggtttgaaaactgctgaaatcaaggaaaatgctgatcatgctcttggcactaagttacctgatgattcgaacaccctgtttgaggtaccatcctttgagcatcttcaagaacccactaggccataccaaagcaacaacatggatataaaagtgggtggccatgctaattatccagaagagttgacattatattatctggatccccaaggaggtgtgcagggtccatttctgggtgctgacataatctcttggtatgaagatggatacttcggtttggagttaccagtacgt

SEQ ID NO: 199366 - DNA, 397 bp, Zea Mays
ttattttgaccatattcttcctgacatcatccggaactgttcccaccaaaaggcttccgttcgtgatggacatcttacacttttccgggtaattgctctcaaattttcatatgttatgatatgactatattcctgtaaaatgcaatgtgttattaataacttttaatctattttatagtatttgccaaggtccttgggtggtgttttccagaattatctgcaggctgttcttcctgctatattagatggtaagatttttcagtatctgtctctgcacttggcacattgattctctaataatttactcttattagggcttgctgatgagaacgaatctgttcgtgatgctgcactttctgctggtcatgtctttgtggagcattatgcaactacgtat

SEQ ID NO: 199367 - DNA, 1532 bp, Zea Mays
aagctcctcaccttctacgagcttgacctggggctcaaccatgtctcccgcaaggtctctgagccgattgataatggtgccaatcttctcgtgactgtaccgggtggtggtgacggtcccagcggtgttctcgtgtgctgtgataacttcgtgctgtaccggaaccagggccacccagagattcgtgctgttattccacgccgtgctgacctccctgctgagcgtggcgtcctcattgtcgcagccgccacacacaaacaaaagagtatgttcttcttcctgctacagactgagtatggtgacatattcaaggttgacctcgatcataatggggatgctgttagtgagctcaggatcaagtactttgacaccataccagtgacatcggctgtctgtgtgctgcgctccggtttcctctttgctgcttctgagtttggcaaccatgcactttaccagttccgtgatattggtagagaagccgatgttgagtcatcttctgcaacactgatggagacagaggagggattccagccagttttctttcagccaagggcactgaagaacctcatgcgcatagatgagattgagagcctcatgccagtcatggacatgcgtgtcgcgaatttattcgatgaggaaacaccccagttgttcactgcctgtggccgtggtccacgctccacgttgcgcatcctgaggcctggccttgccatcagtgagatggcccgatcaatgctgcctgctgagcctattgctgtgtggactgtcaagaagaacatcaatgacatgtttgatgcttacattgtagtgtcctttactaatgtcacgcttgtgctctctattggtgagactattgaagaagtcagcgacagccagttcctggacacgactcactcccttgcagtcacgctccttggtgaggactctctaatgcaggtccatccaaatggcatcaggcacatcagggaagatggccgtgtcaatgagtggaggacgcctggaaagaaaactattacgaaggttggatcaaaccgtctccaggtggtaattgctcttagtggtggagagctcatctattttgagatggatatgactggtcagctcatggaggtagagaagcaggacatgtctggtgatgttgcgtgcctggccattgcaccggtccctgaggggaggcaaaggtccagatttcttgccgtaggatcctatgataacaccattcgtatcctctcattggatcctgatgattgcctgcagcctctaagcgtccagagtgtatcatcggcaccagagtcactcctattcttggaggtccaggcatcagttggtggtgaggatggtgcagattatccagccaaccttttcctcaatgctggtttgcagaatggtgttcttttccgtaccaacgtcgacatggttacgggtcagctatctgacacacgttctcgattcctaggcctgagacctccaaagctgttcccttgtatagttagccacaggcaagcaatgctctgcctgtccagccgtccttg

SEQ ID NO: 199368 - DNA, 624 bp, Zea Mays
cttggatggcgaggagtctgacgaggaagaggacaaggaggacggcaagaaggctgaggggaatggtggtgctggtgacatggacgtgggtttgcccagtggaaatggtgatgccaacggtggtgctgagatggaggaggacgaaattgatccgctcgatgccttcatgaattccatggtgctgccagaggttgccaagctggagagtgctgcagtagcaatggatacagcccctgctgcaggtgcagatggcaagaatggtaagagctcaaaggatgtcattagtaatggggataagaaagggtcaaggaaagctacggggagaattatgcaaggggatgattcagactcggactacgatgatgctgatgatgatggggctggagaggatgatgaggatgatgaggaattcataaagcgtgtcaagaagacgaaggctgagaagttggcgatcgttgaccattcgaagattgactaccaaccgttccggaagaatttctatattgaggtgaaggacatcaccaagatgacatccgaggaagtggtagactaccggaagcacttggagctcaaggtgcatgggaaagatgtgcccaagccaataaagacatgggtgcagagtgg

SEQ ID NO: 199369 - DNA, 387 bp, Zea Mays
ctggtatcacggtctcgtcgatcctcacccacccgctccaaccacgcccagcagccgccaacgccaccaccttccccagcctccaccacagccatggccgagcccaccattgccgacgtcctcgctgagttgcgagcactccgcacggacgtcaacacgctgcagttcgacatggcggccatgaaggacaagtccgcgtcggcctcggacaacgggggccacggtcggcgacccgaggggcagcgcgaccacgatccgtacatccagcaccgcaagtgggacttcccccgcttcgacggctccgtcgatccgatgttgttcatcaacaaatgtgaatcatacttccggcatcaccgcaccttgggggaggaacgtgttcggatggca

SEQ ID NO: 199370 - DNA, 245 bp, Zea Mays
gacgcggcgcgctccgtcttcctctctccccgatccctgcgacgggcgacgcggccttgccttccacatcaaaaccaacctgaccgccacagccgccgcgtcctcgtcctcttcctctgccatcctcccggcatcgcccttcgggatcaccgcgtcggaaccctaccggatcaccattcgttcgcgcgcgccccgccccgccatggaggacttcgcgcgcgcggtggaggacggactcaagctct

SEQ ID NO: 199371 - DNA, 224 bp, Zea Mays
ctccctgctgctctgctcctgccgcctggctgccgtgccgccgctgatccctctccctctcttccccctcaaagccccaattgccgggtgctcctcttccacccccattgccgactgcttcccgccagagagtggggaagggaggggggtgagaagggagatggcttcttggatagggagtgggtaagaatcacacgatgcagttacctccacctttctctctt

SEQ ID NO: 199372 - DNA, 593 bp, Zea Mays
ggagattgacaaagtggagcatttgatgcatccacttcaggtgtttttggctgattcactaactccaccattttgcatgtatcagaatcatgggcagaagttgtcgttagattttcacgagcagctgatgttgaaagtaaattgtccacagcaggaatcttattctcagaccttcgggttgaactggggtactgatgtttcatatcttcgttattaggagatgatacaggggaaaccttagattgaggggaatgattatctgaagaattcgatacgacagcctcagttacttgttgctgactcatgacctccatcttgcatgtatctgaaccaggcaaattcgtagtaatattttcaggtgatgctggtgttaatcctgagctgtcaaccgcaatgtccttattctcagatcttggaactggactaggaaactcacggtcaatatcatggttatcaggagaggatacagggaaaatctttgattcgggagactggttaattgaagcatttgatgtatccggctccagtgttctttgctgattcatgatctcctccatcttgcacatatcgaaagcagatgccaaaggggttga

SEQ ID NO: 199373 - DNA, 508 bp, Zea Mays
gatggttttaggtgcttcacgtttgatagtgtaagtactggatctgctgtgtttgctatacaggagcgctttaaccactgatttgtgtttcttttgtcatgttttagaacttttatatatattgctttggaatgtttactagaccctccagttattttttactatcatcatgcacttttttagctaacgttatggtgctcttttgaatgcaaataatttattatgataattgattttgttgaatcctgtctgagcattttgctatcaatgtgctacagatccgattcccagatccaaaatcactggtggacgatcttcattccattggttgcaaagcagtctggatgcttgatccaggcatcaagaaggagaagggtttcttcgtttttgatagtggctcaaaaaatgatgtttgggttcaaaaggcagatggcagcccgttcgttggtatgtatcactgacttaaataagattcatcgtcaattttcttaaatgttaggaggatatg

SEQ ID NO: 199374 - DNA, 1222 bp, Zea Mays
ttttaagatgactgttgttgaggcatattttggtggaaagaagatggactcaccagataatgcacaaatgttatctgctgatgtcacatcactgattgttgaaggaattgcacagaacacttctggaagcatatttgagcccgaggttagtcatctccattcgtggagaaagaaaaagcatatgtggttgcatatgcatttgagatttcaggttttagtaaagatatagcttcgtagtgatccctatgcgccatcactcagtggttagataaaatgtgcacccttacaatttttttattggaatttattgcacatgcatgcctgtgtagtgatcttcagaggaaattttatgtttggttctcaagttcaattgattttttctggcttgacaattatcaggagagcatgaacagacatgtactttcttggggccatgaattctgacttatgttctacagggtggtcaagaaccggaggtgactggatcacctacagaaaaggctatattgtcttgggggctaaaggtgcaaaaagatcctttatagtagtcacagagatccttctataggttaatctcttgctattgctaatcatggtcggcacatttttacagctgggtatgaaattcaatgaaacaagattgaagtcatctattcttcatgtatttcctttcaactcagagaaaaagcgaggtggggttgcagtgcacctggtaatttgaattatctgcaaccctgaagatgttgtgtgatatctcttgaagacctaagtcataacgttgtgctagatcctctcttttttaccctaccacagatgggttgaaagggtgcatgcatgttggcccattggtatctgatatgcctttaacggctttaatttttcaaaatcttcgtactgtttgaaagatagcatttcagtttccacctatttagggttcctttttttaaaacaggttaattatgtttgaattattaactacattacacctaatccttcaaatcttgtattcagcaatcatggatactctcctgctagttctaggaaaaatatgaaaacaaaataatgatcagaagcagatactttcttccttgatcagtgtctcctttggttaagctggcaatttgtattttgaatatttcaatgtctaatcacttccccttttttttttgaaggatggccctgaagtccatatacactggaaaggagcagctgaaatcatttt

SEQ ID NO: 199375 - DNA, 1168 bp, Zea Mays
atcaagggtgccacgaatgtatcgtacaatccatttcagcgcggcaagatgtggttcccgggggagtgcatgtgaaggcaaacttgctgaacagtataggcaatatcaaaccgagtgaatgtcaaccactgtaaagcactagcaagactgcagaaatttgaagcgtcagttaccggcgcaccatcggctgaagcaaccttcagatttgtatcaaccggagtgagacaaggcttgcactctgacattcctgcacgatcaagtagttccaccatgtattgcttctgagagagaagaccatcacttgagggctgaacatgcataccaaggaagtgatgtagcacaccgagatccttcatggagaactcttgttgtaggaccgaaatgatccgacgcagaagggcaggtgaggaagcggtgaggacgatgtcatcaacatatagcagcaaataggcagtatcggatccacgccggaagacaaagagtgatgtgtcagacttggcctcaacaaatccaagggatagcaagtatgtggcaaaccgattgaaccatgcacgaggagcctgcttcaatccgtagagggacttgttcagatgacaaacgaggtcggggtgtgcagggtcttcaaatccggacggctgaacgcagtacactgtctcagacagagttccatgcagaagacattcttcacatcaagctggtgtacaggccatttctggtatagagccagggagagaactgtgtgaaccatagctggctttaccactggactgaatgtctcagaaaaatccacacctgggcgttgggtgaatcctcgaagaacccaacgcgccttgtaccgctccagtgtcccgtcggcattgaacttgtgtttgaagacccatttgcctgtcaccacgttggcatgaggtggtcgaggcacgagatcccaagtgtgattctacagaagggcagtgctcttcctccatggcagtgcgccaactcgggtcagcgacgctaccacgggtccgggcacgtagccgaggccgcgctttccaaataggaaacagtcctacacaatccttcctatcagggagatccttgcctattgagaccaattaaccaaataggggacaggcgcacaaggcaacaagcctgtgcagtggtgccacctagactgcctaaaatagca

SEQ ID NO: 199376 - DNA, 545 bp, Zea Mays
ctcagcataagtcaaatcttcttgaacactaaggtcttccattggtaattgctcctcaggtaccctgagacatttcttcagctgagatacatgaaatacatcatgaacatccgcaagatgatccggtaactccaattggtatgcaacctctcccactcgccttaagattaagaagggtccaataaagcgaggggacaactttcctttgactttgaatcttctcataccccggagtggtgacaccttcaaatagacataatctccctctttaaactcaagcagtcttctccgggtgtcagcatagcttttctgtctggactgtgcagttctcaaattctcccttatttgctggacttgttcctctgcttcttggataatttcaggtccaaacaactgtctttcaccagtttgatgccaatacagtggggtcctgcactttctgccatacaaagcctcaaacggtgacatcttcaaactggcctaatagctattattataagagaactcagcgtacgacaaactcttatcccaacttccaccatgtt

SEQ ID NO: 199377 - DNA, 443 bp, Zea Mays
acctggtctgaatttatcttcaccgtaggttaacctggacactttcccattgttgtttgctccaataggttctccgtcatttgttactgtatctgcatgtgtattgcccctatgcacatcaggtaaagctgaatggacatgatcgtgttctactgcatccttgctggaaacagagttcacatgattatcaaggtcacagtccatcgaatagcttccaggttgttctgcagtatgcttaaccggattgccttgcacctcagtaggaccaggaacaacttcatgatcctgagtgtgttgggctggaatgtcttgaacctcagcagggatggcaacaggagcaacttgtacattggttcctgcagcatacttggtcctttgacattctttggcacttgaactcttcatgcgggatgttcctgtccgggtatcaacatgtgttctgt

SEQ ID NO: 199378 - DNA, 451 bp, Zea Mays
cgattggcaaacactaaaaccgttaccgttttcataatttttatcggaaaaaacggtaactttggaaacaggaacgatatagatccggcaagctgacagagcagggaggcagggaccggcgattgacgagctggaggagcagggaggcgaggaccgacgagctgacagagcaggcagtggtagcgccgagcgcgagtaggtcagcagggaggcagcgtcgcgcgaccgttggggagaagggaacttgagcaacaacgcagggaggaggagagggaggcacgagcttaggcaagatgcttactggatgacggtgaagcctagggatgccggaggcgacgagcggacggaggcaccacgagtccgtgacgactagctcaacgctcaacgaggctgtgggcgtgacaaaggaaggatgtctgttttaggttaggggaactaggttgggttgggc

SEQ ID NO: 199379 - DNA, 594 bp, Zea Mays
ccacagatttggaagcagcctctcctggatcagcctttttggtattcatctccttcatcaatttattgggcccctctttcttcatattgatttcttcagctgcctttacctttgaatcagagccctttatttgcccaccaacatcttcacattgcttcttcatattagtcacgaatgcatttgttttccctttgttctcatcacattgcttcaacacattcacacaaaagctatctcttttcccaccgatctgcttggcctttgcatcaaagctctcccttttcctgccaatctcatcagtctgcttccccttggcatcaaggtcacctcttttcctgctgatctcatccgaccccttcgccttcgcatcaaacctcgcccttctaccagtgtcatcactaccagcgccagcactccctctcctagcctcggaggccctggatccaacaacactaatcgacctcctccctttctctacagaagaagccctgatcccaccactgacgctccgccgcaagcctgcctccaccacgggatccttactgatggaagtcctccccggcagcacgggagccctgagggtggaggcgagct

SEQ ID NO: 199380 - DNA, 476 bp, Zea Mays
cttaagtcctaatgaaggtaaaagcgcaacgaaacaagcataaaattgacagttcatgtaaaaatgtcatgacataataagtaaaccaaacaaccaaactgtgctgattgatgggagtgaaagctttgtgttagccagccaattaacgctgaaacaagcacattaaaggccttattatcaactgaaccctcttgttacctgccgatcaatattcttagcaccgtcctgcagatcagccacattactgcagctctccttggcctcaacctctgccttcactggaggcgcagaggggtgtgccccctcgagcaggaggacggccctcctgatcccattgagcctcgcgtccctgggcacttcgttcatcacggcgaagggttctccgccctcatctctgaccctgaacccgacggcctccaagagctccatcccgccttccctgtccgccaccgcctctttgatccgcgggttgctca

SEQ ID NO: 199381 - DNA, 542 bp, Zea Mays
cgacgaagtgaggatagatgcgttgcgtgggcggcgaggccgctagctgaagtggggacaaatacgtcgctacctgaagacgccatggatgcgagctctgatgctgcaaagaaagaggacatacgagatagagcagtcttgtgctatccacgggagcttctcgatggctctgaaaccccgcgcctacaatggctgctacctgagatgctttcgtgggccttaggagcagcatcgggcggctagctgacgtggacgtatgtgtgaggcaacgacaagcgattggcgacggagacgtttgcgagcactcttcaccgccgtcgtcgggcgatcgcctttttttccatggaaaacgtttcgtcgtctgtgaaaccatctggtagtaacccttttcattcccaaaggtcgcgtgagtcagaagtctggaagctacgcgcgtgagtacgtattggaccgacgttttgacgacgccgtccaaagaagatctgacggccgaagtttttggaggtggcgtggctgaaggaggtgcccgctttgcgcccgcg

SEQ ID NO: 199382 - DNA, 443 bp, Zea Mays
ttgactgaacttaaacttctcatcatctgggcttgcagctgctgtggctcaagtttcacaccactagcacttcgcatcatctggtcaggttgtgccatctgctgctctggtttgatgctaatcatgcttcctccattctctaacttgactgtagcctgtggctgctggagctgctgcgagtgttgtggtggcaactgttgctggttgtaagacattggtagctgctgttgcatatcctgcatggcatccatctgctgctgctgctgctgcgaagtcgcctgcagattatctgatcccatctgattgcccaaattgacctgtgaagaagacgggaatgatagaggatccgacccttccgcgctaatgaaatcgctggcaccatccagcccagctctctgctggagtgtactcatctgcatcccaacagcctgcattgaccctgg

SEQ ID NO: 199383 - DNA, 285 bp, Zea Mays
cattgacgacattggtcatgttgttattgatacccctgttaaaaatcttgtatatcaacaatggcttagatgttcctcgggccaaagaatctagtctcagtccattgttttttaaagacaatcatgtcttacttgaattttttcttatcattttctaattaaggatatagacacaagtaaggttctgcttcgtggtagatgtgaaaatggtctctaccccttaccaagtctctagtgaggggctcttctctgccttctctgcatatgcggtttggtgctccagac

SEQ ID NO: 199384 - DNA, 216 bp, Zea Mays
cctgagtcatccagaggtgtgcaagaaaactgccagtttaattggtgtgcaaggaaactgccagtttattagggtttaatggctttgttggtcatgtgaataagtttaatgtgatcattttaatgcagcattaggtttagcttacttccattgaatcaacactcctgccactacttgttaactggcttgtgtgattagagcaatcctagccaacac

SEQ ID NO: 199385 - DNA, 294 bp, Zea Mays
tcaggtttgacttcatactgccctgccccaaaggatcaagatcgcatcaccagtggaagcctcgggggctgctaagtaacgttatctgactggctgactgcgccattgataaccttgggttacaactgcacaggaggctgcgacccacaggccatccggggctcattgcagctgacgaagcccctgcagactactccccgacaatatggcgacagcgacaatggcaaccgccgcgggggccgcggcactgctttactacacactgaaccgccgcctgcagacagagaggctgaa

SEQ ID NO: 199386 - DNA, 289 bp, Zea Mays
gtgaactcagcgtgtacgaaatctttctaaattaaggataaacaaagtggcatgcccgaaatgattgaggccatccgagtagcccttcgttcaatgggagacggtgagattagcatttcagcatatgacacggcatgggttgcacttgtaaggagtttgaataataatggagatgatggaccagagttcccatcttgcattgattggattgctcaaaaccagcttcccgatggatcatggggtcatgacatcttcttcctagcccaagatcggatcatcaacaccctag

SEQ ID NO: 199387 - DNA, 337 bp, Zea Mays
tattactaaagctgtctgtgccttccaccacgatacgcacctagggttttttttataaggaaaagttaggccaagtcacaaaacaaattattcacaccaagaaattagaggaagattagaaaaagatagcttacatctctgctgagaactctagcctctgtgaagtgcttggcttctcttccatacctatctggtggaatttcagcagaagctgcagatgcaacaagtctttgtgctgtagtcagttgggcaggtgttccctcagaatcttcaccgttcgtgtcattagcagtatcatcagtttcagcaattacagtaggtgccgatgggcgtctcc

SEQ ID NO: 199388 - DNA, 414 bp, Zea Mays
cccatatatccttatgctgacttggagtgtagttctaccagcgatgcataaactccaccctttcccacaaggtattcatgcttccccttctcagcaacttcaccatctttcatgactacgatcatatctgcccctttaattgtggacagtcggtgcgccacaacaatggtggtcctgctaaccatcacttggtccagtgcatcttgaacaatgtgctctccttcagcatccagagcacttgttgcctcgtcgagtagaagtatttttgggtccttcaagatggcccttgcaatagcaacccgttgtttttgtcctccagagagctgtgttcccctctcgccgacaatagtgctatatccctgaggcaagctagatatgaactcatgagcatttgctgccttggccgcagcaacg

SEQ ID NO: 199389 - DNA, 469 bp, Zea Mays
caataaaatagggcgaccactcaccgtcctctccctcgccttcgtcctcttcttcctcatcctcgtcgacctgggcctcctcgtcgaagaaccctcgcaccccgccgccgcccttcttcctcggccggcccccgccgtcgtcgtcgtcgtcctcgtcctcgtcctcgatggccgagtcgtcgatgaagttgtcttcgcgtgaccgcttccgcccgccgccacccttgccaccgccgcgggaggccttcccgcgcctcgcctcctcctcgtagtcgtcttcctcatcctcgtcatcctcctcctcgtccaagtcgtatgcctcctcctcgacctcttcctcgtcgtcgtcgtcgtggtcgcggcgagccatggatttggcggctaggttttcgagctctcgcggggatgcacgcggaggaaggggaaactcctcgcggcgagtcgtgcgagggaagaggcgaggccgcgc

SEQ ID NO: 199390 - DNA, 426 bp, Zea Mays
ggatttggttggtactcggtcaaaaggtgttcttggtttgccctttctatgctctggctgctgttgcaactgcaacttccctttcccttagagtttggcgctctaaaagttggttcactttgcacgaaggatttctgtttcttgttgctgattgggttgtttggatctatctgcaggcagacaagctaggttttactgcttcattgagcacaaagatccgctgacctcttgctcttggtaaaaatccaacctttcttgtattgttttcttcctgggaaaacctccttgtggtgcataaacttcgtagtacactctgccatttctggagaggaagctgagaactactatccatatctggcacgacccttgtcaagaaccatggctgttcacatgccatgaagctgcttgaactggaggcacctaaat

SEQ ID NO: 199391 - DNA, 377 bp, Zea Mays
aagatgggatggtgatgcgtgagcggatcttcagcgagagagtaaagatcgagtgctacaaacctgcaaggccgaggcaggcttagtttcagagaaaattggtcgcggaggcctcatcatgctctcgttctgttgtggcctgtggcgatgccctgtcctccttggccggttccaagcttgtggcctggggagcccattcgtctttcacttgatatgaaggacggaagaaatagagctcccgttcgtttctttctttaagaaactcaccatattcttgcctcgttatgtgggtatctttcagagtcattctctctggagtctggccaagtttgttctgggacgtatttgatctcttctcaactgtagcaggtgacact

SEQ ID NO: 199392 - DNA, 458 bp, Zea Mays
gaaaggttgtggaagacatggctgtgcttacatttgacagtagacgtcgcttatgcaattctgcactcgttaatagcttctatgttaatggaacattcaaggatgttctaacgacctttgaagcaaccagtcagctactgtggacacttcctttctctgtccttgctgctgccacagatcaaggttcctctattaatgagaaggtgtctcacaattcctggctgctggatacgttacagagttactgtaaatttctggaatattatgtgaactccacgttcttattgtctccatcctcttctcataatcggcttcttgtccagcctattgtaactgagctgtcaattaatctattccctgtgccttcagatccagaatcatttgcgcgcatgctccaatctcaagttcttgatgcagttcttcctgtttggaatcatacaatgtttcctgtgtgcaac

SEQ ID NO: 199393 - DNA, 671 bp, Zea Mays
cacgggaggacgccggcgcggcgtgggaggaggagttcgagagcgtcgtcaccctcgcggccgcgtcgcagcgggagggcgccgcgttccacccatgggagctcgccttctgcgtcttcagcgtgagcgcctcttcctttgattctcttctactatctgtgttgttcataatcctcataacaatgcaccgaactatatatactgtacatcactagatgttttcgatcgatgtcccctgttggttagttgcatcatttctcacttgtttgactctgtccagtgtaaaattttgtgttcagaatatggtttttttacctgttcccattcatggtgtgtttgaaaaaggaaagttctctgtagtttttggattctagctggatttggacctaaattcctaacgatttgagttcctattccgtggtctaaacaggcactacatttctaagtaagcaattctgatcagggtatcctgtttacccattatcattctactttccagtttttcttcttctttgtcccttttgcggttgatactgatgcgtgtgtagtcctacttatctattctgttaagtaatgttttctaattgcttgaactttcctgtgtctgtgtaacgattcaggtactatttgttttaaatctcttgtaaactggtaggagaaataatccgctc

SEQ ID NO: 199394 - DNA, 489 bp, Zea Mays
cgacacattatcaagaactatgctgatgataatcttgaagagttcatgactccatacgactctattgctaatgaacctgctgaaaatcctttggtaatcgtagaagatctaaattcttcacagctatctggcgcgaaacgtttcagtgactcaactggagaaatgaggcaatcctccaagaaatcaaagagatattctgaaatccctcaagatctttatgccaaaattcctggtaacacagcttcattcaagcaccactcaaaggccactgatgtattcaatccagggaccccaaatcacttgctacctgtacttggcctttgtgctcctaatgctgatcaggtgaactcatacaaaaactcaatttgtgcaccaagcataaaggagcgtaaaagggccagtggtgacattgtcaaacaactgtcaactcctgctgaccattctaatgtgcatagaaacgaagctcaatcagcttctgataaggccatc

SEQ ID NO: 199395 - DNA, 329 bp, Zea Mays
cgcccctcgcgttgcgtgtatagactgtgaaaaagaggagtggggaaggggaaaaagaagaaagaaagagagagagagagagagagagagagcgttcaccgagaatggccgtcgcctccggcgaacgcccggcgtacgggcagtagcacgctgggactggtggttggtttaggccggtggtgtgttggtgcggttggctctgggttggttacttgtgcgagcgagattttgtggatgtaggcagtcgctgcgcctcatccctcatgcgatcgatgccgttccagctcaagaccggtcaccaccaccacggcgccgccatggaagggaag

SEQ ID NO: 199396 - DNA, 287 bp, Zea Mays
gtaaacttgagctatcttcatcaaaaccaatttacagtgttgggcttcacttctctgtaacgacaacaacaactgaggtatccatgaaagccaaacccagtgaggcagctgctcaagatatttatccaaagctcttccaacaggttcattttgtccatcaaagctaagaaggtagagaattcgagctagatggctccttgagtttgaaactccatatttgatgccctggaaaaaacaactgactgcatactcaagccaaacctcatcttttgtttctttaaaaacct

SEQ ID NO: 199397 - DNA, 230 bp, Zea Mays
caaaaattaacgtatgctgtttaatgtggagagcacacagcattcttctattctcagtcctatagtaaggctatctccaacagcccttaggctatcggctatctccagcagcccttaggctatcataagcagtctctttgctgctataaataaaaggtgcattgtatatgcaccaaatgctggcctaagaatatagggcggaagaatagttagctgtgtgctcaccacgc

SEQ ID NO: 199398 - DNA, 267 bp, Zea Mays
agcccttgtgcactttgtactttcagccatcctagtttatcttttccttgctatgaatgtccctaagtgggtgattaacaaaattgataaaatcagaaaaggatttgtgtggagagggagaaaagaggttaatggaggcagctgccttgtggcctgggattcagtcacaagacctttgaagtatggcgggcttgggattcctaatttacaacacatgtgttgggccctccaaaccaaatggttatggcttcaaaaaacagatcagag

SEQ ID NO: 199399 - DNA, 987 bp, Zea Mays
tcaaatgtggcctgtttagcaagtgttttattgtttttccagccagacacattgttttcttcaaggatccaaagtttgtgcccaacaatcactggcgatgtctgttgtactgtagatcagtttgacacattacaccaacaagtccaacaggtaaatgtgctgattgctgaagatgtacatggaccatgcacttttaataagcaaaccaatgtggtaataccacttatgtttgatataggtcaaattatcaaccagaaaaggcacattaatgagtgcttatcattcactgatcgcagttaatcttcagtaaagttgtctttgcagtgtatgaatatatatatgtatatatattttgttttttcaagaagaaatgtttggtgaatctgtaaccagctaacctgaaccttcttattttgttagtgacaagttcccttttattttacatgaggttcatgtttgcttcataggttatatcctccactcctttggtgctaatgcatacttctatctaccatcatgtagagcctctgtcaacaaatacatttacctaattgttgattatttgtttgttgctggtctttgtcataacatttgcactgtatttcctaatagacagtgctgcagctgtttggttgcatttttcagtatactattttatattaaatgtgaattgatgcctattttattgtacagtcacaagcctttttctctacaagttcaatgaaatttgaatatatccacaatgagtttctcttagtcaaatgtcttgattatttttttgcacgccaagtgatctagtggctccttggtgacttctactctagatgtatgttcaatacaaaacctcactccgtggtctgaaaatgtcaacatttttcaggccgttccgtttcttgttggatgcccagcatgcttgaggaatttcttgaatctcttctgtgagatgtcttgttctccaaaccaaagcctcttcattaatgtgacttc

SEQ ID NO: 199400 - DNA, 250 bp, Zea Mays
tgtgatgagtaaattggaaatacgtgggatgcgaggatttaattagtgcacgtaggtgtgtgagtgccgtggtgtgatatagtagtggtggcgtgagatgtttgtttgaggtgtgcgggtatatgccgcgatgtggttatactcgcaacgagaaaagatgtatgtattgtgacacgactcttagatcgctattatatgatcgtgtgaaggatgctcatgatggttgtgtgattaaggagtgatgtagtgg

SEQ ID NO: 199401 - DNA, 335 bp, Zea Mays
gtccaatcaacctcagggacgtcagaattatctgatgaggcaaaagtgccatccaatgacctttctccatatgcttgcctcattacaacaccaggttcattgtccttctctgctgttgggttggtcaatattccatacccaacccttgttccatccaaccgagaaccatcttgggccagacgtgatttacccctattatcgtctctgcctcgaggatatttggtgtcttgtggatgattagcatctctttgagaagatgaggcatcaccaaggactcttatgcgcagaaagtgcatgagctttgctggcacccccaaagtcaagacatcctctac

SEQ ID NO: 199402 - DNA, 346 bp, Zea Mays
caaggtttgtctaagattttcgtgcaataacggccatgtggaggctcaagcagttcatccccaaggagcagcccagccccagcggcctcgagggtcggacggtcgatgttggcaatgtcaaggtgcacgtccgagaggccattgctgagggtgggttctcatctgtctatgctgctcgagacctggtaaacccagcgaagcagtacgccctcaagcgcgtgattgtccaggacgaggagtcgctgaacctggtccagaaggagatcacggtgatgcggtcgctcaaggggcaccctaatgtggtcacactggttgcacacgccatactggacatgggacggatgag

SEQ ID NO: 199403 - DNA, 392 bp, Zea Mays
aaccaacaagcagaggaggtcgagggagtcacagcgaataagtgcatccttgtggtccagaagccgtgctaggaacttggtgatgccaatcttgtgcatctgatccctgttctttctcctcagcctagccagcaccttcagctcatgtatggcctcaagcaccatagcctctgtggtcgccatagagagcgcggtgcgtgcgatcctgacccgtgtcgcttcattccttgtaatccactctgcaattgtgctcttcaacggaagattactcctcagtgtcttgctctgcatggccatctttgtaacaggacatatcacaggttcagagccatctgtaaacttgtcaaagtaatcctctatagctttcctgtcataagtgatgccactctccg

SEQ ID NO: 199404 - DNA, 375 bp, Zea Mays
tgaagaattctttacccgagggcttagctaaggatgattggtgctgggaccagagtatcttgaatatagatgttggtactgatgatgtgagagacattgtgtttgtacaaaaaggctattggattgagctagtttcaactcatgatactaatgcttatattcagcagccagattcttctagacttgatttgttgataaaggtcctacctcactagagaaatctacattcctttttttatcaatggaaccttcatttgacacaatccttttgttttattgaacagaaaggatcacaaagaatttgtgttgaaacttcagggcaacatgagattcatttaactaatccttgtatttcctttgggacctcgtctgttt

SEQ ID NO: 199405 - DNA, 388 bp, Zea Mays
aggagctgaaactcttggttgcttgcacagtcttgctggaggtctttgtagagttgaaaggttggtgttgagatcgtatagaccgatccactggtggtttccctgcgcgaaagagcgtctgctactgtatttagccggccagccctatattccaccttgaagtcgaaaccaaatagcttactaatccactgatgctgaggtacagttgagagccgttgatcgagcatatacttgaggctgaaatggtctgtacgtaccacaaacttgctgccccacaagtatggacgccaatggtgtactgaatgtaccagtccaatgagttctctctcgtatgcagcgagcttgacatgtcgggctgcaaaggggcggctggaaaaggcaattggtc

SEQ ID NO: 199406 - DNA, 456 bp, Zea Mays
ctgcatgctccgcccaacgcccatgatcgccccaagggacccgaggtacagccagtgtggattcacaactcggcggacgattcacccaccaactgcgttcacggccgtggaggtgctgtcgcgaggtggcggtagaggcgaaatcaatgggcgatgaacgcagaggagaggcttcggcttgattttatactcgtagatccacgggaatcacggaggatttgtggggagttagttggggagcccccgcgcacagctcggacgcagagaagagataggggaggagaagaggttggttctgaccggtgggtccagatgacagaggaagaccatggccgagcaccagtgcgtgactgtcctggttgacccacacatcggcaccgcgggatggagttgggcctggcgcacgcggagggaaaaacagtaatgggccgaatggcgtgtagtgagcccgtccag

SEQ ID NO: 199407 - DNA, 570 bp, Zea Mays
aacccgacctcgcggcgatggcgcgacccgatcagcccagatttgcgaacgcccacgacgtgttcgccgaaatgccaggccaaaggtttctactttttcccagcttggctctggcactgttctgggcacgatttgcatgggcagggagggatgtacgtttggtggagtttgaaagtgaagggggggatttccgcggggagcggtgaagcggtcgctctcaggacgttaagcgaagactagtgtgaatcaggctaatggcgctttgccggcgtcagacgtgtaactgtcctggactgcgatgcgatgcgatgggtgggggtgtctgacagggcgggctggtctttgctgcagatactggggctggacatctgcgcggacaccatcgtcggcgaccagatgcagcgggggatctccggtggccagaagaagcgtgtcaccacaggtaaacagttactgctgcacatgaactgcatgcttccccttcagcgttatgtcatgctcacgacatgctgatgttgagaagaaaaaggtgggacgacatgattgtgtcgggttctttgtggtttaggc

SEQ ID NO: 199408 - DNA, 344 bp, Zea Mays
catgaggctgaggagttgattggaagaattgctgctgaggaaagagatggtgtggtttggacatccttgcttagggcatgtgctgctcgaggggcagaggaaactggaaagatagctgcagagaggatgatggaggcagagccatggggttcaggagcacatgtggtgatggccaacctctatgcaagcaaggggctgtggtgtgaggcagcacaggaacgccatttgatgaagcagaaaggtgttctaaaaggtgcagggtggtcatcagtcgaagttggaggggacgacaggggggttggagtgtttgtttcaggagatcggacaaatccccaagacagtgc

SEQ ID NO: 199409 - DNA, 317 bp, Zea Mays
ctcccttccaatccaggctactcatgcagctcgcacgccgccaccaccaccaactgccgcactgacgtgcatgcatgcgcagaaggagccagcgcccggcctgcggccttgcctgagaggagctccgtcctagcacggcaacaccaggcgtctagcgcgcggacgcagtacgtctgagcaaggcaagagcggcgtgacgaccacctgccgggagccgggtgctgcctgcccggcctggaccgatcaagcgacaccggccggtagacaagagacaggcgcgcacatatatagacacacacacagtcacacacgcgatg

SEQ ID NO: 199410 - DNA, 357 bp, Zea Mays
gctgttgagggggaggccacttcctcaagggaggctccacagcacattcagcgtcgtcacccacctcagcagatgattggagagcttcacgagcgagtcactcgctccaggtcacagcagatttctcactttgctcactcagcttttgttgctacttttgagtcccgggatgttggacatgctttatctgatcctaactgggttaatgctatgcatgaggagcttgaaaattttgaaagaaatcaggtttgggttttggtgccacctccttctaactgtcatcccatcggtaccaaatgggttttcaaaaacaaacagagtgaggatgggttgatagtgagaaacaaggcgaggttg

SEQ ID NO: 199411 - DNA, 756 bp, Zea Mays
gtctcttccaaccgcatcattatcttccatcatgttgtgtttgatgagacatatttccctttctttgcctcaccccatccaactcaccttgattttttattggagttagactctctgttcccaccattggggccccaccctttgcatgtacatctccatcggcacccctgatgcctgcaccactggtaccacttgggttttagcctcatgtggcctcagctctcgcgttgcgtgctcccctggtcctgcttggcttccaaacccgagtggccacgatgccttgctcctctgtgccacgcgtggccacgatactacccctctctgacatcgctctctcctatgccacacacgtcttggagatcatcatctacacgcaccacctactcccgactctagtagccacctcactccctctcggcgtcgagcccgtcaccccgcttgtcaatcaccactctatggtcatgcgggccaagcatgacttccaatagcccgtggaccagttgatcctcactgcccttgtctcctgtcctgacatgcgtccacaacacccttgtcgatcctcattggcgccatgctatggcagaagagtacgaggcgctgatgacaaacgacacctaggacttgatgcctcacccacttggttccaatgtcatcaccacaaagtggatctccaagcacaagttttatgttgatgggtccctggaggctggagctctacaaggcttgctgggttctttggagcttcgtccaatggcc

SEQ ID NO: 199412 - DNA, 349 bp, Zea Mays
cgcgaataaaattctagactcagtgaacagtggccaatggactgcgggttgatttccagagaggtgagggtctctttagaaaagttgacccgcgaaggggtacgggcgagtctcggccgttggattagatccgaacggcccagattagataagcacgctgcgaatcggtaagcaatcaggggcacaggatccagattcgacggtgtggatttaatgcgctccgatctcacctgcaccacccgatcgcgatctaacggtcccgatttcacgcaccgaagcggtacactcgatctaatcgtagccctctgttcacgatccaacggaccaaaggccatctcctacctccgat

SEQ ID NO: 199413 - DNA, 287 bp, Zea Mays
caaccgggtggctgatgctttgtcacgccgaccggggctggaacgggatgcaccacatcttcaactgaatctagtggcaacttcaacggtggttcccagttggttacagcaagtagttcaggggtatgagcaagaccccagtactcaaaaactgttgcaggtattagccactggaacagaccagggtcagtatactctgacaaatggagtgatcagatacaagggtcgtatttggttgggcaccaatctggttttgcagcagacagtcatgaccgccttgcatgcca

SEQ ID NO: 199414 - DNA, 424 bp, Zea Mays
gccgttcactcacatcctttatgcggctcctgatctccttgatgtctatgccgatgctgtgttgaatcctgccccttgtcagcaggtggaggcttctatcaatgaatcccttgaaactatgtggcttgccatcgccaactcgcaccatgaatctgtcgatgctgtcctcgaggtcgtaggacagctctctcacctcccttgtccagagcttgacttggatgtcaggtgggtggtcgatgggtgcctcggagaccttgatgagagcagcctccatgctcttgagctcagcctccaggaacatgatctcacccctcaccttcttctgcaggttatactcctccttgatcaggttggccagcttgggcaagagagtgcccatcgccccggtgactatctccgccatggttgctcagtcagagctctt

SEQ ID NO: 199415 - DNA, 202 bp, Zea Mays
acacgatttgatcgtagccgttcacagacaatcccacggccacctctaatcttcaagcttctgacgccgagtcctgctaaccaaacagagctccgcggcggcgccagggaccagccaacccccaccatgccaccccaatgtcccaaactcaacgccatcgggtgctaacttacacgaaacctatggtgatcaaccaatcttc

SEQ ID NO: 199416 - DNA, 858 bp, Zea Mays
cggtccttcctggttctttgtacgtcaacaacatccttgttgcccccaacatcatccaacaccttctctcagtctgtcgcttcacacaactgctgctctatggagttcgatccctaaggctcaccatactacatcttaccactcgtgctgtggttgctcgttgcgacaactcctgcccctataccacgttcgcttccccaccccaccttcctccgcccatgttgtccaaccctacgcccttgcctccacttgcccctgcctcgacttggcaccgccgccttggccacccagaccacgacgtcctctctcgactctcgaccacgccgtccattcctttcccttgcgacgacgccacctcgctttgccatgctgtcagcttgggcgtcatacttgcttgcccttctcttcctccatgtcccgagctactcaccccttcgacctcatccactgtgatctttggacatcccctgtccaagcattttcggttaccggtactttcatgtcatcctcgatgatttctctcattctttgaacttttcctccgcggctcaagtccgacacacttcttcacctgggtctccacccagttccgtcgtccggttcgtgccatccgatgcgacaacgaccaagagttcgacaactccaccactagtgccttctctctcccatggcgttcagttgtgactctcgtgcgtgtacacttccctcagaacgatcgggccaaacacattattcgcaccactactgtcatgatccgctgcctcctttttcagacgtccattcccgcccactattggcagaggccctgaacactactgctcatctcttcacccgtagtgacctggacacgacgtacct

SEQ ID NO: 199417 - DNA, 294 bp, Zea Mays
cgtgagttttataacaatgtgtcccgtgactttttcctctctcgcggcgtccacctccgcatgtcgtgcccctacacgtctcctcagaacggccgggctaagcgtatgattcgcacgacgaacgatgtcgtgcgctctctccttttccaggcttcccttcccgctccttactgggctgaggccctcggcactgccacctacctcctcaaccatctccccaccaaggcggttgcccaccccaccccttacttcgctctcttcggcgtccatccctcttacgaccatcttcgtgtc

SEQ ID NO: 199418 - DNA, 693 bp, Zea Mays
aggccctgtgcccttctgacttcaagcgccttaacagaatagcaagttcctgcaacttcccacaatcaaactggatcaaacgcctatcaggaaagtagacttgacgtcgaacaatagcagaccttataggagacaggatgggagaaaactcgttcatgcatttttctctatatgctggatcaataaaaacaggagagtttcctttgctgtaccagcaaacagggggaggagctcgagcagcaggaattgcgaatgtaaatgattcaacaatatcaagcattttctgaaagcgttccacagatggaagaacaagatctgcaaggcttgatgaatagtccatgtggcacaaagggttgttcctcttatcaagaatatttgatacatgatgctttacagtcaaaacatgtatcatgtttgtgccatagacaggcctcttttggcatctaactctattccaccatgcaatggaagctgccctttctctggattcctttattctctcctcctgtagtgctttctgaatatcttcaaaaatgtttgtcaaattacttccctgacgatccttattagagcaaaaagtatcaaggtcatggttccaggaagtggtactcaaaggaaaggcagaaatgacctcatcagcttcccaggaactcatgctaaattcattttgcgtaaacactaaattcatatcag

SEQ ID NO: 199419 - DNA, 264 bp, Zea Mays
tgcccgttaagcgcatcagctcgctccagaaggtagacgtgaagatggggtcccggtccgagacgatcgactggggcacgccatggaggcgaacaatgtcggagaagaatgcctgggccaccgattcagcagtgtatgggtgagctaaggcaatgaaatgacaatacttgctgaagcgatccaccacggtaaggatgacggatttcccgcgaacacgcggcagtgcctcgatgaagtccatgccgatgtctgtccagacacccg

SEQ ID NO: 199420 - DNA, 961 bp, Zea Mays
gctcgttggccggcatggctggcccttctggaggcttgaagaaacgcactcgtcgtggtcagagaaggaggaagactggtcctgagggagggcatcctgttctggtggcgcctccacccacgcctgtgagccccgctcgacatgtaaggatcatcgggcgctccagggaggttgatcgggccgaggctgaccttcgtcgggcgctgatcgtcacagttcttggccacatgagttctgatagcgccgctattgttctggatgcgctcgcctcaaggttttcttttgaagctgatgcgctccatcttcagcgtgctgtgtcgaactcttttctggtcttcttccccacagaggatcatgctactcgtgtcttcaatggtgggcagtcacttttcattcctcctgtcaggttgcacctcaagccttggtctcgtcaggccttgacctctggtggaagcgccctgcctctgctgctggatatcgagctgagggggattcctgcccacctctgggagcttggtactgctgaagttcttttgaatgggttttgtctgattcaggaactgcacccagaatcagtggagggcattgatatgtccgttctcaagctaagggcgtggagttttgatccggattgtttgcctgctgttttggatcttcatgttcaagagcctcttgttgaggagggagatggtgccattttccctcgctctttggtttatcctattacagtgaaggttacccgttccggtgttaggccggaggggagcttgcctccgcctccgccatcacctcctggtgatgtcgacgaagaccatgatcaagatcatcagaggcggcggctgcttcagcatggcccctcggcttcctcgtttcggacctcggtacactcgcggctgggcccgcgtgccccttcgtcttcggtggctggtggaccagttgatgccgcaattctcccgtctgc

SEQ ID NO: 199421 - DNA, 1494 bp, Zea Mays
ttgcagctgttgaaacaatggatatcacaaaaatactaactcttcaaggtggagaagcagtgtacccattaccccgaattaaaaatttggcagtgcatcccaaattcaatttggctgcagtaatttttgcggttagaccatgctaactatgaacctaaatatttttggtacttaatgacaagggtttcagaaacacttgacatattcaatttgtaggatatgtctgggacagaagctgcaaagaacaaagctgcatacacaagagaagggaggagacaactttttgctcttcttcagggagctaggggatcaactggtaaccttccttttccttgagttattttcatgtttactttaatggggccctcagggaaatgtgaaccttggttcgtacaggacaaaacaatacatcatatcatgctacttatgcaacactgatctaatgtcaatccttggtttacttgccacaccatacttatggtatatttgggtaaaaaatagatgtttcaagcagtctgtgaatcctaagtacatcttggtttactctggtgctacagctgctgttttaaaggagaaactattagccttgggatcatctggaatattagcagagcatcaacttcaggcacaactacaagagcagcacttgaaggggtaaaattcagtgctacctacatagatcataaaaactttttatttgtctgaattcagtgttttgggggttcaataatgattctatgtagctataattttttattggtttcatgtcatattgattgttgtattgatttcacctgttttcttattgtcagccagagccagctgactatttcagatgttgcaaggaaggcattccttcacagtgtatgtgacaattctcttgacagtggcttcatagtactttttgccagttttctttagtagctcaacctgaactgttactgcttccacacatttattgtacctgtctaggttacaaaatgatgtaagacctatttctgtttcctgtagtctcagtgctgcagaaaacaaataaattaggaatgcttgacaatgaggccttccaaagaatcttgtgcatactttagtgctgccatcctgccatgtcacccgtgttgccacattcaagcacaggctttcctaatgtggtttgcactgagtcgagtccttatccattggttgattctactagcttagtcaacaattgtgtttgtagaccatttctattttcttatatatatattatctgtgcagcatttcatggaagggcatgctcaaagcggtccaatccctcgcctacctcttgttacaatttcagattctagcaaccttttgcgagatgttcctgtttgtcaggtaaccgttagagtaatttatttttttatttacttgctctctttttgttctctaaacaattagttgattttgcaactccagccattccatctagagctgaatttcttcaacaaggaaacccgtgttgttcagtatcca

SEQ ID NO: 199422 - DNA, 463 bp, Zea Mays
acttcaatatagtagcaggcttgacgacggggttgaatgtatcatcagaatcaatgcctagacgtagggtgaatccacgaagaacccaaagggctttataccgctcaagagagccatccgcattgaatttatgtttgaaaatccacttgcatgtcacgatgttagcatcagccggacgtggtactgatcccaagtgtgattcttcaacaaggtcgtgtactcgtcttcaatggcagcccaccagtttggatcagcgagggtggcacgaaaggtcttcaaaatggtagacagtggagtggcgtggaacagggcgggcacccgaaagccggtcttggaacaagtggtcatgcgatagtaattggccactagggagacagccactgcaccgggagttagtggatgcccaaggagatcttcagtactgatggagtgatgtctgcaggaggtggagtaccaccagcaa

SEQ ID NO: 199423 - DNA, 425 bp, Zea Mays
agacaataaagattggttttgtagtgataattcatagaggaaaatgcacaaaaatagacatgaaaatttttgaattaatgttagacctccaccatttaatattttcttaataatatggttgtacgaatcaaatcgagctcaaataatttcatgcataaagtgcacattaagagatgacaagcaattagttgaaattaagcatattgtatgcctcttggtgatttactaaatgctaggggtatgcacaataatgtcacattagctatttcatgacgtaacaacatcagtgaaatatatatggggatgtcaggatgtgagacaaatacaacaatgatagagaatgtagtccatctcttcactaaaagaagcatgtcttggagatttgttgggtaaaggatgggtgtttgtgatataatcagaatccg

SEQ ID NO: 199424 - DNA, 730 bp, Zea Mays
gttcttttagatgtgcatcatcttcattaaatggagaagaacttataagggatggtggtatccccttgttggcaacacttctttctcgctgtatgtgcattgttcagcccacaacaccggcaaatgaaccagctgcaagaatagtcaccaacataatgcatactttctctgtcctcagtcagtttgagtcaggaagagttgaggttcttaagtttggtggccttgttgaggacattgtgcattgtacagaacttgaatttgttccttcagctgtggatgctgcactgctgacagctgcaaatgtttcggtgtcatctgagttgcaaaatgctttgctcagggctggatttttatggtagttgccttgcctgctatccttgttgcttctaagattaatgtggaaaagagatgctaaccgaaatatgatagtacattaggagaaaaaaattcctatcgctgatttatataattgaaatatacttgcaggtatgtgctacccctgctgcttcagtatgattcgacagcagaagagaatgagatatgtgaggcacatggtgttggggcaagggtgcagattgctaaaaatctgcatgctgttcatgcaactcaggctttgtctaagctttctggtctcagcagcgatgatatactgtacccagataacaaacctgcatacaatgcgctaaaggctcttcttactccaaagcttgctgacatgctgagaaaccac

SEQ ID NO: 199425 - DNA, 459 bp, Zea Mays
gtccccgaaggccggtaaggctatttttggcctcccgtgacacatgttttcatcgtcaaacgacgatttcgtgcctcccgtccgccacccatgatttggccactgagactgctaaggctgtttatggcctcccgtaggctatgggacacgttttcatggtcgagcgaccatttttaagtacgtgttccaccacccgcgttttggtccccagagcaccttaaaattgtccttggcctcccacgagctatagcacacgtttccgtggccaaagagccaatttcatgtatccgacctgccacctacgttttagaccggagaggccgttacaacattttttgccacaagtgagctatagcacccgtttttatggtaacctagaccccaaatccaatccctaaaccctaaccttaaacaccgacactaaaaggttttagtgtccaaaccatagtaaaatgaagt

SEQ ID NO: 199426 - DNA, 2931 bp, Zea Mays
ggccagcagcagcagcagcaagcagcagagcgcgccctgttcttgtgccgaggaattatttattgccaccgcatcgagatttatatagtacggggaaattgattgctcattcccctctgcttcctccatccactgatccaccccatgctgcgatattttcctccactcgccgccggggcagcatttgctcgcgatttataacctcccctcgccttcgcctctcctttctgcttgtctttttccccagtggggaggttagcacccggcacaagcaaagcgccgggttcttgtcgcagtttctgcgcgctcgctcgctttttgcccgtaagatctgatacaaagaggagagggagagccaagagaggagaggttctcgtgtggaattcttcggcgatgaggtccgacgcccgtctggattcggtggtcttccagctcacccccacccggaccaggtgagagcatcctatagatctgctcatgaagcggctttaattcggcggattgatcgttctttgggttttggtttcttgaatggtagaaaagttggtctttgtgacggtttatgtgccgttcattttgatgcttggtacttggaagcttccatttgaagaccactctgtctactgcactgtcctaagatggttttgtccatgtcacgatcggaatttggcccaaaaaacgatttcttctttgttggtattgttttgttgggattggttgtctgccgttagctgtaaaattatagtagcagatccggcgattcttgcatagtagtaactactagacagatttgttatgttataaattaaattaaaaaaagtaaaactattagacggagtaaactactgttttgttcaaggtctctgacggaagttctgttttcgcttttcaggttcgatttggttctgatagcgaatggccggaaggagaagtttgcatctggtttgctgaaaccgttcgtcgctcacttgaaggccgcccaggatcagattgccaagggagggtactcgatcacacttgaaccaagctcagggttcgatgtgccatggtttacgagaggcaccgtggagaggttggcgtctaagatttctatactactgtagtacagttgcttctgccattgcctatttccctgttgggtcattttctcgtgacaactcttcgcagatttgtgcgtttcgtgagtactccggaggtccttgagcgagtcagaacactggagtctgagatcctgcagctcgaggatgccattgctatccagagcaacgatagtcttggattaaaatctgtaagcgcagaagatttgtagcttatggatatttgttgtgtgtttctgtagaaataatgacatattcttgcttcaccatttaaaaggtcgaagaccatggaagaaagttgactgaaagcaatggaggtagtatgacaccgcaccaacctgattgctttctgtgagcatgttgcatagaatagtgcatgcctttgaggattgtctaaatctcaaacattatttcgttggcctaccaaaaagaaaagcaaggtgcaatccactatgattattttagaatctactcatcatggagtttgatgcaacatcacatcaagggccattattaagttggcacttatcattttaattcccaaaatgttagaatctaaccatcatggagtttgatgcgacatccactatgatttgtggacaagctttactatcgtctaatgttatgaagcaagtatgttgaatttgcagtgtgatcaaaataacttagatatatagctatattatttttgaagtcctgaatatttagtaatatcttatttccaactggagaattctggatggtattatgttctgcattcaggggaggactggaatggatcgagctgtttcttccttttatttgccttacctgtcacagcctgccatatctttttatttatttctgcaacatgcctgacactgtccatcaactaataggtggacgtgcaaattatgatcctgattcagccacagcaattgttgtctacaaggtatgatcatttagacaagccaaattttgtttgtgtaagtgtattgtggtacaacactgcagtctgattgagatatttgatcaatgacagcctggatcaaatccaacgccacaaattcagaatgaaacagcagcacatgaggagaattcaaagtacttgcacatctcagtttttcttgtagaatattatttgttaagtcttcacattgtttgtggctaataaagctgcataaactcatactaacctaggaaatcaggtggcattgtaaataaaaagaaataggcacccacttttgactccaataggatttgtacctggatggtgggggtgtctgcccacagcacccaccaactgaactaggctcggttcattaattaagctgtttaaggtcatactctacaaaatgaataatgaattaaagacatctaatggagaaatatatgcaaacatcattattcattcactgttctattgtctcggtttccattacgagcagcatatatactctgagatcatgtatctttctacagtagaaaactattaacagaactgcattataaattgcagagttcaattgctcagagtgcttgaaacccgcaaaactatgttaagaaaagagcaggctatggctttcgctcgtgctgtagctgctgggtttgacattgacaacttgggttacttgatcgcatttgcagagcgctttggtgctgcacgtctgatgtaagtatagccttaccattacttgctggttttatatgctggattaaactagttgtcttgatatcttctgtgtttaagttgtaacttgaccttagagctgctacccatgaagattgtatcatctgtcacttttactctagcatgtcatgaaatcacaagtgtggaactcctggatagtcagat

SEQ ID NO: 199427 - DNA, 503 bp, Zea Mays
acaaagatgatcacgctgctcttccaaatggttttggcttgaatcagttggataatgacataggggttggctgggaggcaagctgcattgaacctatcctcgatcaacttgtccatgggattggggtaccaggatggtcttcagttggccaaagacttattcaagcattgattgatgaagataggatcgatagtattaccaacaacacttacataagcgagggctatgcatttgatacacatgaaattcattttgatggaggaggatggaagcctcactcaaataattataagttagaacctttagcgaattttgaagcttcaaggaggggcccaaatggtctgacaatggattctgactggaaatataatgatgtgtcaaatagaagtggcaatgtcatggataaaaccaaggtgtggcctgagtttcagtacagtgagatgtgcttcaatgataggattatcattgagctgagtgaagttggtgtatctattgaacctgtg

SEQ ID NO: 199428 - DNA, 734 bp, Zea Mays
tagcctatgcagatgatagccctttgtgtcgataatgtcgaggtagccgagtgcaaggacgcggagccgttgtccaggtgtcgtgtgtagggtagttgtggtcgatgtagctatcgaggatgtcgtagaagacaaattgcacaagtcgtgggcacatgcgcatcatgcgggaaggcccgcaatgtgccaagggacgtcggtgtggatagtggtgtaggagaagggcggcatagacgaagacggcgacacagtcgatgcaattgtagaggaagaagcttatgccgagggtgatgctgttgaaccgccgtgaacgaggcatgctctaggtttgccacgcctgtaaacacgtcatagacgaatgcatgtgtcgattttgctagtattgggcgtactaggtagaaggcccaaccaattgtcagcgtctgaagggaccaacggagaaggcctcaacgacggtcgcgatgtgcaatagaacggcgaggaagaaggtgccgatgcagcccactgttgtcggagtggacgaagtaggcgaggacgagatgacgacgctggcgatgaggttgtgttggacgaaggcaaagaggtagtcgtggcgatagaacgagattcctagagttgctgaggcgagggagccacgatgcataggaaggtccttgacaacgccaatgtagtgcgatggcggtgctttatggtggcgaagaactcgaacaaccggagaagaccatgtgtgagag

SEQ ID NO: 199429 - DNA, 202 bp, Zea Mays
ctttgttttagttggagagtggatatggaacaccgtatggtggaagtctgtatacgcattagacctcgcacctgtccccaaaagtttttcacgttttttactgccaagaaacgcgacatgttcaatcatatgggcaattccttgctcatcctcctcctcatcaattgatccaacatgaacttccatgtgagcctcaaacctg

SEQ ID NO: 199430 - DNA, 203 bp, Zea Mays
gtttgtatttgtcatccaaggtgaggttgatggcaaggataattccagtgctgtggtaaaactgtgaaggcagaacacagggcacaggagataaccgtaacgcatgttaaaagttaattatgggatgatttggaggtagcaagattgaaagtagggaactagggatgaccggatgagtagacggtctagaaagacaagcccat

SEQ ID NO: 199431 - DNA, 711 bp, Zea Mays
atacattgtttctgtcatatccagcataaagaatcctgatgttaacttccttggacttcaataattggtttggctgtaggtgagatgctaactggacctgcaaaggctttgttcatggatgaaatatctactgggcttgatagcaacagcacatttcagattgtcaagtacatcagacagacggttcatgtgatgaattatacagtgatgatttcccttctccagcctccacctgagacctataatttgtttgacgacatcattttactgtcagaaggttacatagtctaccatgggccacgggaagacatccttgaattctttgagagtgttggtttccggtgccctgaacggaaaggagtggcggatttccttcaagaggtgacttccaggaaagatcaacagcagtactggtgccacaaccacgaagattaccattatgtgtcagtcccagagttcgtgcaacatttcaagacattccatgttggccagaaactccagaaagagttacaagttccttatgacaaatctaaaacacatcctgctgctttgactacccagaagtatgggctgtctagctgggagtctctcaaggcagtcttgtctagagaatggttgctgatgaagcgcaactccttcctctatatattcaagttttttcaattgtttgtcctggcagtcctcaccatgacagtgtttttcagaacaaag

SEQ ID NO: 199432 - DNA, 479 bp, Zea Mays
tagttgatcttgaaatctgtgtatgacctgtttaaatgttgtcttttggagcatatctgaatctgatgcatctgccctgactcctgagcttgtgaaatactcctttttttcatgtcacattagctttgtcataagtaaaacataactatctttcaagggcgaagcctggataatttattgccagggtcagtactaactcacaggttggaaaaaataataccatgcataatatcaataatctataaaataaaagcaacatattacgccaaaataatctttcacaatagtaattgcgtatcttctatatttttcctctacggttacgatcctccatcttatgtaagagaacaaggacctctagtcaaatactttcaccttatgtcatcttgtagatcagagcctatatgagctgatattatcctctgtcagctggatcatatggaagttcatcgaaatttacctcatgtcgtgagactcgt

SEQ ID NO: 199433 - DNA, 386 bp, Zea Mays
agaggtggtgcgagcaacacaggcacgaccaacagttgcacacgacgggaaaggtagcaccaacagcaagcgctagggaggccgaaacacccactacactagggttggtatggtggctgcgacgtggcgctcttaggcccgcgccagatgcatgtatgtctacaggtcctggggttcctagagctcaacatcaaccaaaatgtgctttggaagacccccggcgaagaggacagccttctagattggaagaagattcagcatgtgcacactagtgtgttgaagtgctcctgacagccctggatcgtggtgtggatgggcagcctcgcgagttcggcgagacaatgactgggaatggctaggtcgaaccgcaaatggcaaagatcctt

SEQ ID NO: 199434 - DNA, 679 bp, Zea Mays
atggcagaatgctgcaaacgatgcattgtttggatcaaagaatatatttgcttgatccggcctgaggtaccatgcatagcttcctggacttatctcatgctttgttctcattccaaacacaattgacccaaacgttgcaataacaaagagaatcacaaaaaggagatatattattttatccattcttcgttcaactgaactcctctttgatggtggctccattgcattttgcatcacctttgtatcatgtcccgtaaatattatggtgccatatatatacattgtattacgaagttttgaatcccttagcaggacctgttccggagacagagaatattgttgcccattgtagtatagtgttcctaagaaagaatacaatttctcattcggatcctcacaccgaatgaaagccttgaaactatggaaatggtcatcattcaagcccatagtcacctctaatgcctgtttccgcttcaagtttgtctcaccatcaagattcatcgtctccacatagcataatccatcacaagagctagacgaaaggaaaataagatcagcagggaagaactcatcctttttaactttaattatatcgccaactcgaagcttcttccattctgtctcatgaaatgattggatcccatcatacacctcaaccttcctattgttcacttctatg

SEQ ID NO: 199435 - DNA, 228 bp, Zea Mays
tggcttagatccctgagcttctccgccatggcggcagcggttggagtgagcaggtgaaggaagcttgtggaggcaggggatcgtggggagcagggaaggcaccggaggcgcgagaaggcgcagccctagaagcagcgagcgcggcgacgctagcggcggcggcggcgggccggattcttaccggaagagggagtcgggggagaagaaagaaggcggattttaattttt

SEQ ID NO: 199436 - DNA, 445 bp, Zea Mays
cccgccttccgccggtgccgccactcccctccatacccaaccagctacaccccagctcttcaatctcttactgaagaaagccttcgcctccgcctcaacctccaatcgcgacggtcacagcatccacgggggcagccgagaagcggccggaggaatccagctccatcctatgcggcggcagccattccaatgctccgtgatccaactcctctcctgtcaatcagaattggggcaaggatacgtccaagccggcggggggtatatcgactataggttggactggactggacgccggatttgggatcccttccctcgcaagactagggacttgggattgggtctggactctggaggaggaccgcggcgtggaagggagaatcaaaccacagtcgcagtccaatccaatcccctcggcgatttcttcgattttttccctccgcctcgc

SEQ ID NO: 199437 - DNA, 292 bp, Zea Mays
aaaaaaatgactcctacttttccagcattgacggagcaggaattcaccggcagtcagcaaactaaaaaaaagctgccatgtacgagaagcaattcacggctacctacgaaagttttctacagaattgttgcaattagaggcgaaatctactggtcgtgccgttaattaactgatgatgaaatttacacaaagagaatttaatttgacttgattttggcggaaaagcagaggaaggcaggagatgtggaatcagcagtaaccaggcgcgagggcactactactagtgttggtg

SEQ ID NO: 199438 - DNA, 311 bp, Zea Mays
ttttgcttccctttttctcgagatgggatttcagttttgcatgcatgcgatctgaaaattgtgaacatactttttactcaggtcaacatcatgatggctactttggggaggaagaagcggcaagccgcaacaaccttcatcgtgctttgcatcttgtcatccttctacatctgcaaagcgcagttcacgcctgcggacagctaccttgttgactgtgggtcctccaagagcacaatggttggccagaggaccttcacagcggatggcgcatctccggtgaaggtgtccacctcccaggatatacttgcggg

SEQ ID NO: 199439 - DNA, 319 bp, Zea Mays
cacatgggcaccgtctcctccttccccaattgcaagctccattcgcgctcctcgtcctccgctgcctccagcctagtcccatctctgctcgattggagaggtttgggccatgcttcctcctcgcgcgccacgttctcgacggaatttctcgtctacacaggagccaaggaacgctagaattagacgcttcccggggtcccttttagttcccctctaacgaatcataggtttgcagtttggtgtggacgtatcctgtgatttgtggatggttttggtgtagagtttagagagatcaagaacttccaacttggggtttcct

SEQ ID NO: 199440 - DNA, 220 bp, Zea Mays
ccataatataactgcatcaccagcctaagcctaactgtgttgttcttacaatgatagggtatgatagggctaattgtggatgcaaccgttccactgttacaatcatgggagaatatgctcgatggcacaggaggtagtaaggagatctatgttgatggatacctgaggaacttttcagcggatgtgattgctagagcatgttttgggagcaatttcgtag

SEQ ID NO: 199441 - DNA, 815 bp, Zea Mays
ctctgctatttcagaaggctactaccgacagggtggcggcgcgtacgaccgttcctaccctgatgacccgccgtctgtctacacgccgtcgcgctcggaccggtactggccggaagacgacgacgggggatacaagggtttcggtcggtatggcagcggtggccgcagggacggccgtgacatgaggggttcataccggaagtccccatacaggggcggctacggaagcgacttctccaggaaccactcagagcagccccctccgccaccacccaggaggtctcccttgaggtcagttgccgttccgatctgctatgaccctccgggcaatagaattaacagaggggacagggacaacctcccacgggtgacaccatggcggagaagggagagcagatctgaagtagccgatgctgatggaccgctttctgttggccaaagtactcggctctctgcttcagggaaggaggcttcagctcagcctctggccgcggcaggtcctcacgggacggaagacgaggcaccaaggaagaaggcacgccttggatggggtcagggtttggccaagtatgagaagcagaaggtgcagggtccttcggatcccgctgaagttgttgctgatgtaagttcaggtgatggcgaacagaagacctcccttgcgcctgcgccttctgttgcatctgtatttcctgctgcaccactgcctgagtctgcaccagcacctcctgctgctcttgcactttcgtctgctcctatgcgatgctcatctccagttactgcaccgccatattgttcctcaggtatgcaacccgtat

SEQ ID NO: 199442 - DNA, 374 bp, Zea Mays
gtacaaaaaaggctggcccagcgctaagtagtattctaatggtgtcaatgtccatcttcccatggtgaaaggcaataatagctaagagctgcatcatcaattaaaatacatattgaacattaaatattccggatgtatttatttatgacagaacacaatcgcaaaccactaacctggaacattaatagcagaaaaatccacaagcggtggaaactgcggtacaaatgcagaaaagtgcgatgttcaacaaaattggtctttcctgtctgtaaataaataattaaaagcaatcatgaggtgaaaatattgataagtgtgttaaacacagaagggatcaacaatcgagaatcgacaaaaagtgtatttattttttt

SEQ ID NO: 199443 - DNA, 461 bp, Zea Mays
ccggcgcacaccccgtctccgcagcaccacaccacctccttcccctgcgggctgcggctctgctgcctgccactcttctcttctcttctcctccgctcctgcagagtgcaggccagcacatgacgacggggccttggcgctggtgccacggcgtccgcgccacggccagcctggcgctgctcctgctgctcgcgtgcgtgtccggccgctccgtcacgtgcgcgcgagcgcagtccacggcgttcaccggcagggagaccaccagcttctccttccccaagttcgaccagaaccggctccagctctccaccaacctgacgttcaccggaaactccaccgtcagccagggggcgctgcaggtcaccccggacagcggcaacaacttcagcacgtacctcgccaaccaggccggccgcgtcttctactccacgcccttcgtgctctgggcctccaacgcgtcc

SEQ ID NO: 199444 - DNA, 1228 bp, Zea Mays
gcccgtaccctatcgactcgaacctcggagcggcggatcggtactcgtaggcagtggtggacatggcttcggcggcggtgatggtgagctcggcgggctccctgctggcgatgctgcaagagccggcgccggagctcaagctccacgcgctcgccagcctcaattctctcgtccacgccttctggcacgagatctccaccagcgtctcctccatgtaagtcccctcctcctcgcgcccttccccgctcctccagcggccccctccactcccgcccggccgacccctcaatttgcccgctctaccgccgccacagccgacggcaggtgctgcatcgccccatcgccgcgcgtttccattagtttcggtgaatttctgttagcctaggttcgattcgggctcgcctgcagaggtccggctagatggcggcggcgccgccgcgtcgagttccattcagagggaaccctgtgtccgatctgttgggatggaggttttgggagggttaatgtgctaccgttggtaactggaaacctagaatttttagaatttagagcttgtcatgacatgtcctccaatttatggacactgtttgctgaaaaatttgaactttgttgctaagtttctagattgtttaaggcaacaaatcccgaacttctatattcgggttgtcatgatagggtatgaatcaaatgtggtaactttgttctttaaaataaaaacttgtaacctgtgacaaagtaatactgattatgtgtttatactgtttaatgtctctcttaatgtcggaactgcccttagcttattggttgctcctcagttcaatagaagctatccagtcatagcggagaaatgagtaaatgctatatgagaattggtgtttatttcctgggagttgcattcattttagaaggatccgtatgaataccaagattcttcatgactgatgcaattgatgtgcatgtggcaatatattttgtctctttattatcctggtcactggttgtaaaaagttttgacaatcagtttgtgcttaggtgctttgctttgtcctgtattcctatttcctcacaatttgttccctgctgcttgcagtgagagtttgtatgaagacgaggagtttgtccagaggcaacttgcagcactagttgcctctaaggtatttttctacttgggcgagctaaatgatgctctgtcatatgcacttggcgctggacccttgtttgatgtttc

SEQ ID NO: 199445 - DNA, 417 bp, Zea Mays
tgctagacgtattcggtgactgttcatcagaattatggatagcaccagcatgatcatcactcagagagtgaatcgcttcctcgtgttgtagacaactaacgagacaatcattgttttgtacgtcaccattttcagaaactacactagaagatgagctcacgtcaattagatccacatcgttagaagactcttcgtctgtggaccagtcaacaccattcatttgtctgccagattgtgaaccagagtttggaccattggtggctgacactgtgggagcagaatcacttgacagtggcaagtccacacaggttggttcttcaccactgcttgcattatccaatcccaatgacgagtctattgcaggacctacttctggaggttcggcatacaatactttgtcaccttccttgttgtgac

SEQ ID NO: 199446 - DNA, 375 bp, Zea Mays
ttggtgatcaagaatagacgtgcgcaggagacgcgcattgatggagtcaacagcgtgtagatgcaacgacgaggatgacaacagacagcgatgttactgcccgaggaggcgacgcagcgacggccctcttgcttggcaaagcatcgcgcgatggacgacaaacgtctcaggagggtggttcgctcgcgatcggttgatcaggccaacagcgtgagaggcagagacgacaatggtgatgtcgatggtggagcctccctatcggtggtggcgacgacgagccgacatagatggacgtgcatacgaagaggcacgacataggcaggcgtttcggttatgtcgcaggccacgccagttgcaccgtcgaagaagatgaag

SEQ ID NO: 199447 - DNA, 300 bp, Zea Mays
gcaaagagagcattgggaggatatactcagggaatataacagcatcactgatagggaaatcttgcacaagacaaagaacatcacatagggtttccaaagcagcacagcggacaatggcagacggatctgaaagcatcgcaatcacatagggaaccactagctgtaggcgactatcatcatctatgtatgtggacgagaacttcagaagaatgaggctggcccttcttagctcaggttttttcacactgcgtatgcatgagcaaagtaatgaggcaagcaagaccatgccttcacagctca

SEQ ID NO: 199448 - DNA, 366 bp, Zea Mays
cacgaccatgctggagtgcgcgactacctctgcaaccgcatgtacacgctcccgctgccggggctcgaggcctacctcttccaggtctgctacatgctcgtccacaagcccagcccttccctcgaccgcttcgtcatcgacacctgcgccaagtcgctccgcatcgcgctcaaggtgcactggctcctcgctgcagagcttgagctggaggatgctgacgatctcgacgggatcgataaggtgcaggagcagtgccaggttgcagcgaccgtgcagggcgagtggccaccgcttgtccggccttcacctccatcccctgctgccagtccgcgaggtaaccccatgctcagcagaatacgatcgtcc

SEQ ID NO: 199449 - DNA, 498 bp, Zea Mays
tttctttctgcaacacagtgtagatcattaagccagatgttttgttgacttattcaaatggatactcctttttctcattatcatgccacatgtgtaattcataatcacatcatgtgattgggaacataccatgtaggacgtcatatatggttctggctgatggggccaaagatgaacataggtagcttataggattcatgttttttgcttcgttgaggcgtcttgttgcgctgggattgtgccacatgtgttgtcttgcacgtgagagatgcttctactcacccgcgacatgcttatgtcagtggggcaataattaatctctactcctttaaagcgtcactttcgttgtgcattctccttccttccgcatccctacgggccatgcagcccacacgacacataaccacttcctctccagtcagtgacacagaaccgctccctctcctcagtcatgcgcccgtcattttctccgcgatctccacttcgcctagtttggcg

SEQ ID NO: 199450 - DNA, 299 bp, Zea Mays
ggcggagagttgatttgggggaaaacccgaattgcggggctacggtgaacgagtggagatgagagtgggtgctatagctgcgtgaatacttgatggagttgaggacgcgctcaatttatagaccccgaggtcggtagctctcaatttgaccgcgatgtgttggcggccggagaagaagtgagtcaccggcatggtgattcgtggcctccttaccgtgacggccctcccggcggtcatcagaccagtatggcaccggggttgcgacgtggtaacaacggaggcacgtggcgttcggtcgt

SEQ ID NO: 199451 - DNA, 385 bp, Zea Mays
cagactgggaccgagagagtacgtacagagcacaatgcgggacctggtaattgggataaccaagtcggtggtggagggggtgatcagcaaggcccagtcggtgatggaggaagaaaatatgctacttattagcatgcagcatgacctccacttcatcaccgatgagtttcagatgatctattcattccttagcatcactgatgaggagcgtatcaacaacgcggtagtgaggatctgggtgatgcagacgcgtggtctggcctatgacctggaagactacatggatgccttctcctgcctggacaagaccagaaaatggtggtcccgcttgttccgagcatgcctggcaccaccggggtctccatacatgtcagtgacatctctg

SEQ ID NO: 199452 - DNA, 713 bp, Zea Mays
tggaatttagctttaaactgctacgtggtgcttgcaaaaaaacaaaagaaaacaaaaatggcatgtcctggagctcgggtacatgaacttttacattcttctttgaaaaaacaaacacaacgtgaataagtgtctgatgtgaaactagacgtactctaatacatgcaggattgtacgtaggacgtggtagaagtttggtcaataatatgctactaccaacgagcagcagcaacccagattaaaggaaatacatatacgtgggtggtgcttgttcatcactttagtaaaaagggtattttcgacagttaaagccatcagacataagttattttcgacagacggtcgtaggcttatgatcgacggtacccatccctctgtcgtaaagggtcaaaaatactcttatttccgaccgtggccgttggacataagctatgtctgacggcacctttcggccatcggcgtttatcctcggtaacggcagttaacggtcgtccatcgattatgtctggtggcctatattagccgacggcctatgttagccttcagacataatgaagtattatgtccgacggcttgtgttaagccatcagacataatgaatttcagcagttgcaaaaaattatatttttgtacatttctgacatttacagagaaaaccacagatttcatatacaaccacatgtgacggaacctcccaagtcattaggcccacc

SEQ ID NO: 199453 - DNA, 380 bp, Zea Mays
gtgatagcggtcgtaggtagaggaaattgggtcgaggatgatggggactatagaggacgttttgaacacccgctgcctaggcatgaaggttggcaactatgacgacctcgtagcctgaggggagggttgacgactgggggctccggggaggatccatgtagggagagccaagcagatgccacttagccttagccaactgcttggcgagggcattcgtcgtggtgtgttcgtgctcccaggtgagggcgcaacatgattgcgctcttgggctacagccacaatcgcgttagcagctatgagggtcgtgtcgccgtgaccaaggtggagtgagccgccacaacatcggtgggtgggagagggctcgaggatgacaccccagg

SEQ ID NO: 199454 - DNA, 1344 bp, Zea Mays
agccactgttgcaaatcctgatgaattagctggctggataagtcaggtaatgacaaatttcatgtttatttttttgtgagttggtcttcttaccctcagtgatgttttctgtaccctcagtaattactcgtgttcaattatttgtgagcttgacttccaactataaattaggtgtattttttttactattggcctaggattttgtaataaattacagtgggactgtacaaacacatgcatgcacaaatgttttgttttaaacataatgatttacctttatttgctcagtattgcaagacattctcctattttctgaagtatgaaatcattcttatgtatctttccttgtagattcatggtaaaacagagcttgtaacatcgaacaaacgtccagttccgcttacttggcacttctcgaagaaatattcattacaaccgcttcttgatggaaaggggaaaaaaatgaataggtaccatacgcgctagtccattttaaaagataaggatgtggttttgatgcccatgagtttctgtgtaccatttcaaaagtgcattttttagagtggcccaaattttttcttggagacgtgcagaactttaaaatcaaattcgttcttgatattaaggacaaaaataaaacaagtgcatatggatctcatgagtcatggcacatgggttttcctttcacactggaattcatatttgaaaatgggggctgcattacaactttccttttcttctattcatacaggaaactgcggatgtctaactcccaaaacttagcatctccaaagagtgagttctattatgtgaaagggaagaggaggtttagaacaaataaaattgagcaaggtaatagcaggcctttggacatatcgaaacaggttcagttatcaaagcatgaactcagcaatatgcgtcgttcccaagtatggactaaaaatcccttttaagcttcagttaattgcttctcacataatagatttgaattgccatatgttaattttctttctagaatacatgtggtccaattatgtggcatgccagattgatgccattttcttggtacctttaactgcaggttccactaatacgtgacactttatcacaactatgggaaaatggcatgcttccagctatctggtttatttttagtagaagagggtgtgatgcagctgttgagtaccttgaggattgcagactgttgcatgactgtgaggctagtgaagttgagctggaacttaggaggttcaagatgcaatatcctgatgctattcgagaaagtgctgtgaaaggactcatgcgaggagttgcggcccatcatgctggttgcttgccactgtg

SEQ ID NO: 199455 - DNA, 332 bp, Zea Mays
atgtgtggtgttttacttgagtggacataaacacaatctaggtatcccttgaatagaggggattattggaaaccaggtatcacaaaaggtcattagctagcccaggtatcacaaaaggtcattagctagcccagtggaaaaaggtgccttacaaccttaacatatgtttggatagttctctctctcaatttggctaaattttccatagtctttattttattttgagaaatgatgtggcaaattgatgtgtggtgttttacttgagtggacataaacaccatctaggtatgccttaaatagagggtagtataggaaacctggtatcacaaaag

SEQ ID NO: 199456 - DNA, 545 bp, Zea Mays
cttccgataatcaagatatagagcgtgagtgtcctagtccaactccaaggtctgaatgcaaggaatcttttatggagaactcagtattaacatcagcggtgcctgaaattgcaagatcttctgtatccgcttctgatacatgcaaaatggagtttgtgaatcagcaaagaccaattgaagcagatgcatcgaatgcttcacttaaccagcctcgcattttcgctatatcttctgataataaagatatagagcgtgaatgtcctaacccaactccaaggtctgaatgcaaggaatctattatggagaactcagtattaacatcagcggcgcctgaaattcttgcaatatcttctgcatccgcttctgatacatgcaaaatggagtttgtgaatcagcaaagaccaattgaagcagatgcatcgaatgcttcacttaaccagcctcacattttcgctatatcttctgataataaagatatagagcgcgaatgtcctagcccaactccaaggtctgaatgcaaggaatctcttatggagaactcagta

SEQ ID NO: 199457 - DNA, 295 bp, Zea Mays
agaacagcatgaaagaaattgagagtgagttcgaaataatgcaagcatacataagtcaagcagacccgtacagtgaaagtaacaaaattctgaaaccatggttgaagaatgtaagaaaaatagcttctgaagtcgaggacatcattgatgaatatgcctttctacttggaaaactggacaacgcaggatacttggcgaagaagttccaccattcgagatacatcactgcatggagtgacatttcttctcagttgaagcaagtgcaagcacgcctacaaaatttgacagttctgaa

SEQ ID NO: 199458 - DNA, 210 bp, Zea Mays
cacggggatactcaaaccaagccacggccgagttggatcagtcttctctaaccagagccacttagcctgcagtgcccaactcatcaattgcaaattaggaacaccaagaccccctaaacttagtggccttgtcacactttcccagggaacaatacaacttccaccattcaccttctttcgccctttccaaagaaaccctcatcgaatctt

SEQ ID NO: 199459 - DNA, 361 bp, Zea Mays
gttgtttgtgatttcttgctacctggcacctctggatctgttgtatcatacaatgcctccaagatcattcttgtggttccagatcctccccttgcacttgcgctaccgatgacttggttattcccacccttctataccactatgagccttttgcctagatcagcaaattcccttggggaaccaaactcacttgacctggagagctccgttgggtattctctgctaaggggcaatggtaggataattgatggaagtaaaattcagactggagaaagcaatacagttgattgtattcaagcaaaagatcactcagctgggagaacggaaatagcagcatgtctacgagttgctcaggttggac

SEQ ID NO: 199460 - DNA, 215 bp, Zea Mays
atctagcagtgttaatactggcatggatgtaagtttcttctttatgacttggaaattttcttcacactttggggtccacacaaatttgttgtctttcttgaggagctcggtcatgggtcttgcaacgctggagaatcctttgataaaacgacggtaatatcccgtcattccaaaaaagctttgaacttcactaacgttggatggctgcatccatt

SEQ ID NO: 199461 - DNA, 440 bp, Zea Mays
gttcatttgtgcagtgttttttagtccttagctattagagaatgatgcctggtaatacctgaatcggccactgcattttattatcctgttgttattaaatttggctattagataatgccagcgttttttattatcctgaatcggccactgcattttttagtccttagctattagagaatgatgtctgaaaattcactcgtatagataaggaacgttgtctagcaacaagagagatcatgtcacaaaaaatcctcaagctaaaacaagaacatgttacactatattttattatcctgttgttattaaatttggctcggggcttcggtaatacctgaatcggccactgcatagagtagtaaacctaaaaaaaatcagactcttattgttatataatttccatggtttcttcctctatgaataggagagaaaaattgatccta

SEQ ID NO: 199462 - DNA, 444 bp, Zea Mays
gtcgacgacaatcagtcccacctctctgatccagcgggtggtgctgacaagggcctccacgacgccatcctccttcacgaggctgctgcgatcatcaacctccactcccaggccgtcgctgtgcaaaacatccggagtctcgttcacgtcgtcctcgacctcgccaacaacagctacacccgctggcgcgatgagttccttctcgtcactggcaaatactccctggacagccgcatcctcgacgacactcccgcgcctcacttccccgactgggcacgcatggactgcgttgtcaagtcctggatctccggctccatctccccggaccttgctgaaatggccatggaacgcggcgccactgcccgcaccacttggctgactctcgagaaccaatttctcgggaatcgggaaactcgcgccctccacctcgacgctcaattccgg

SEQ ID NO: 199463 - DNA, 874 bp, Zea Mays
cacaacacaacagggaggctgcaccagaggctaatggttaccatcacagcccccatggtgtggaccagagtcaggttgtggatgctgataagcatataaaccatcattccacagacgacaatgctccctccagcgcttcaggccacagacatggtggtatcagccgtcatgcatccacatcttctgttgatgaccgctccatcaagtctggtgacgattctgatggggccgagagtaccaatggcagaagcagtaacacggagatctcgtttctagaaaatgataccgtctggataccacctcaagcggcagataaggaggatgaggcccagagttttgctacaagcattgcttatgacgacgacgatgacgattatagtgatgggataaagtggggccagtcaagtttcccatcccctggtaagcagcatgacgccggcactagcaatcatagggaggtacgagaaaaagcgatgctagaagctatgaatggccagctgaagatacttgtcagtcggtttctcgcatctgttggcattccgtcttcgaacgaggaggctagcgatagctggcttgacattgtcacctccctgtcatgggaagcagcgctacttatcaaacctgatggtagcatgggaaaggaaatggaccctggctcttacatcaaagtcaaatgcatagcatctggtactcgccggcaaaggtgaagcaaagttttgccttgaactttttctcatcaatagataggatctctgtttctgtatgtcaaactatatccgttcacccgtggcaatgttggtttggttgcagtgaggtgatcaaagggttagtattcaagaagaacgctgctcataagcacatgccgacaaattgc

SEQ ID NO: 199464 - DNA, 672 bp, Zea Mays
tattcatatggtgtaaatgcttcacatcctcaaataggtgccatttccactcctttttcagagctaaaggtatctcatcaacagttaaagggtgtaatgcatcagtggggaacttgacaacattttccaatagcacagcatagccttcaatggtctcagaagccataagattcttggcatgggccttcccagctgaagcaattttttgccctgaaatagacactttaccgttcgacactgcttgaagaagaacttgagctaacatgccaacattctttcttggaaaaagaagtccgtttactccatcatcgatctacaccatatgacaaccatgttagtttaactagaatactatatgcagtcatcagtatttgaacctagagatgaatcacaatctaatatgaggtgcaatcatgaacatacatgttttctaataattccaaggtctggagctataaccagcttctcaagactcatagcttcgactagcacactggggaataattgctcctcaagacaagaataatatataacaaggtcagctgtacgaaggaggatgtccttatcttcagcagcaacatgctccgctgcacctcttgggaagccaacacttagagcaacagactatcatgaacccgaaaactaatacaaagttagatacaatttaaagca

SEQ ID NO: 199465 - DNA, 514 bp, Zea Mays
cagccaaagcttgctgctctcccaacttcacaaaattccatggtaataatctttggtacagtaatgttaaatcttaatgaagccaaaagctcactcttatactgcctaaatttgtgccctaccataacagtaagctataaacattcttgaacatgataaaatctgatgatattcgcaccatatcattaattcattatgcttgctatttgaatggaactagttgtaaaagtgtttgcaacaattctaaagttctaaccttcactctgatttgcataaatttttgtgtcaggtcatgcataatggaccgctttatcctcggccagacaattttggtggtcataacatggcacctccgcattcagtaccaaatccatataatcttggtccattgcctattggaacttcagtgaggccaccgtcaagtatgtttgctcctccagattttccaagcgtatcttcagctgatgcataccgtcaacaccatgaagtcactgccatggtaaggagttgattg

SEQ ID NO: 199466 - DNA, 298 bp, Zea Mays
tctcttggtacttggatagacaaaataatactaggaggactatgataataaacagcactactccggcaagaacaaagccaacaatcttgagggttgatgtactgtgtttcttagatggtgaagtgctatctcgggtagttgatccttcagaagagtttgaggttgttttaggcgggggaggagatcttgaaggaaatgagggtgctggtgctgggggcgttgaatttgaagtggtgggtgctggtgttggagctggttttgatgctgctggtgttggagctggtcctgttgaaggcgg

SEQ ID NO: 199467 - DNA, 585 bp, Zea Mays
caaagacttggagaggttggatctttcaggcaaccggttcactggatcggtgccgagagcacttggcagcctgcctaatctgaagtggcttgacttgtctggaaaccttcttgtcggtggcatcccctctggtctggggaattgcaggctgctccgctcgctgcggttgttctccaattcattacacggttcaattccagcagggattggaaagctgaggaaactacaggtgttggacgtatcaagaaacagattaagtggcctggtgccaccggagctcggaaattgctcagatttgtcagtgctcgtattgtctagccagtccaattcagtaaagtcacatgagttcaatctgtttaaaggaggaattccagagagtgtgacagctttgccaagactccgggtgctatgggtgccaagggcgggcctggaaggaactctcccgagcaactggggaaggtgttctaatttagaaatggttaatctggggggaaattttctttctggagcaatcccaagggatctaggacagtgcagtaacctcaagtttctcaacctcagctcaaatagattatctggtttact

SEQ ID NO: 199468 - DNA, 287 bp, Zea Mays
gaaacacgtcaggactagcttcaagttccagcaacaccattgataccgagggtgctgaaactactgaacttcagagacataaagatactgcttgtcctggactcaagagacaagattcatcaaaatccgtacaagataatcaacatcctggacatgagaataagcaaccaaagataattaagaagatactaacaactctaagagaggagagcaaatttagggaaagcaattctcctgttagagctagccgtgtaaagctaaattcacctagcaatagagaacgctca

SEQ ID NO: 199469 - DNA, 204 bp, Zea Mays
gctctttagttctttcagctttttgtggagcgaacattacatgtttgtatgttccaaagcaaacgtcagaaatcaagttttatctgtagaggtttgctggcgaggattttcatccttgaagccatcctccatttgaaatggtctcatattccattgccttgggtagtggcattgctgcattgaaactttgggactggccatgag

SEQ ID NO: 199470 - DNA, 320 bp, Zea Mays
acggcgtcgcgggggcgggtggactcctttcttcgcccggcgtcggcgtcagcgtgatcctcgtatggggggaagaaggggattcgtggaggccaccctcgcagatgcgcgggacgtagacggggccacgcacggcatgccatggatgtcgcgatgaggtggagatggatgtcgctgggatgcaatcgaggcgagggatctgcgcgggagggcgaggtccgcggagattccaccttcatcgcggcgagattagcgggagggcgagggtggcatggatgtcgcaggcgcgagggagggggcgcgagaaatggggatctgcc

SEQ ID NO: 199471 - DNA, 511 bp, Zea Mays
gcgggcaggccagcatcctagcagcagccctctgctttaaatccggtgcaagataatgggcctccgtgctgctctgttccccactctctgatgttaattagtgagctgaacctttgcctttttcttactatccacctgtacagagtaagccattgtcatggagagtgtctgatccgcatccgctgctgctgctcccattgatgttgatccttatcaccccatgcaagatccagaggcaaaattcaatgacccaggctggaagtacggttattggacagaaatagggaatcaggataaggtgacatgcatccgatgcaacatggtaacaaagaaggaattaaaaggtataaagaacaccttgccgggggatatgaggacagtcatgtgtttcaacaccaccactgagattagaaaagagatgacagcttacttggagaagaagaggaacaggcctattttccttataacattggtccagtacatgggcaggtgcaggggcagaggctaggac

SEQ ID NO: 199472 - DNA, 1210 bp, Zea Mays
gcggccggtcgatccggaattcgttcagttcgtctgcttaggctgtcttctttttcaactccttgcgaaattcgtagcatctggagcttggggaaagttccgtcgtgtgatctaatcccgtgctttttttccttcggtttgttcgagggaaacgttcttctgcttcggtattttggtcgtctgttgcaagcaagcaatttctggttttcaggtgtccgggaagcagcgttactgtccccatcgccgtcggggattaggggaaaattgcgccttttcctttctttttgcaagctgtgtcccactccatactggcttcgattggattggattggatagatagctcgtccgtggcgtggcacagtgtagcattgatagcccagcggagtgatgcttcgctgctgaagcaatcgcaggtttggcggagctaaggaaagagctgtagcgagcacgatgttagccttttgaattggcctggccctgttccatgagctggcgtgtgtgagaatggcgtgagtgtgagctgtgggcacgaggggaaaggtgagaccccccttggtgctggactgctggtgctgtggggggagcggcagtgcatgagatgcatgtgatgcggcattaaattttagtgtagccacgattgagatgaatctataggtgaagcgaatgaagtgactaatgtggtttcatcagactcaggaatttgttagtattcgtccattgccaaagctgactggtggatgtttaatctagtcgtagcaatagatttccaaccaatgtgtgtaattattgtctcgagctaaggtggcaagaaacttatggcgtattaagaattgtccaaggttttccatgcagaatgagctgttctttgatcagcttcgtagcaactggtgacttgagtagttagtaccttcctgccacgtatattttaatctacctggggtggttgggaaacaataaaggacaaaggattgcataaatcgtttgcatcatgtgggtcaaatttggttgccgtgcacctgtgttagtctcacatttggtatgtgaagataatgaatgcggaactgcagacaggggagaaggggtagagagaatttgtacatggtcttgtttggtgcaatgagtgcatgacccttgtaaccaggttcctggatcaatgaggtcgaagaacggaaacatggtacgtggtaagatactttaaacgagattttaa

SEQ ID NO: 199473 - DNA, 1873 bp, Zea Mays
attcggcgacgtttgaatcggcgttggactggctatgttttaatctgcctggcgatgagctccccctcaagttctccagcgctggcgacagcaccatgtcgtctctcacaggtatgaaatttcaaggttttaaggtttaggcgatgaatggttctacatgtgtacacacatctctgtgcatgtgcttgtgttctcatcagtctactagggtaccctttgacatgaattggcgatgtgtgacttttctcatacatgtgtgcatagaacatatttgcatcattgatcatttgcctgcattctgcgatatacttttctgtgaagttgctgccacacccatggccaccgccatcggtggcatcaactagaccacgtgggcaatcgcaggaataatcagaggaagaggatctcaatggggaggaggaaaatttgcttccttcctctgtttgtcttctatatttatgttcggctccattatgtagtctatatgattataccttaggcttcatcttcatatgttatttgggccaatactcttgatggtccatgtactcgctagtttgtctcttcttttccaatatcgtataaatatgaagtgttgactttgtcttttcttttccactcatgaggctctgattggttgattaattaggtgtttctctttcatgctagattcatgtaatgattacatcgtttctatgtgttgtaggagctgaaggttctgttaaagtactgtccacagccaaggacaattgggtgccacagagtcgtgaacctgaggaggtgaaggtgagcaccgaggggttggaagttagaattggtgggcggagagatgagaatgtgtcactggatgatgggcgattgtcacaagctgcatggattcgtcaatacatggaacaacaagaggaggtatagatgagtgaacaagtatttttcacatgaattgagtcatctcttagtactctttgaaaaactgttggattttgttagtcttatgttttttttgtccgcttgcttagtctccaattgtatcgttctgtttcatacttctctcaggttgttctgaacttccagtggatactaagagcttctacatcatgaacctgtgcaacttacagttttagaagacaaataactgattttgttgtctaatctaagtagcacaatgttttgttctatttgaaaaaaagaacacaaaatggttacacaaattggtaactattgttcactgggaactatgtttcacaacaattcaagtctcttcttatttttattgcttatggtttatctttttgtttcaaaacgttaactatcctcactgcagttttagattttgacatggtctccaatgtgtagtttttttgtagaacgaggtaataccctgcttataaagataacatatgagtttttccaagttccaagccagggacaccagcgagcgataactctaatatgtagctttgactattacttgtaataactccatgccagtaaacattaagtaatagaatgtaagtccttgagatgacacatctactaatgttattttcttgtggtcaatctaaataatcttttttttacacatgaatgggaaatttatgaaaacatgacacctttcaccaatgtatctgaggttgcatgtacccaacatccgaatatcctatgcatacaatttcacaacctctatcaagtctttctgttaactgttattccttttcatttcttttaatatcatatttcttggtacattttttcttttggatatcactgatgttaggaagaggatgcaaattccaatgattcctctacatgggaggatcactgcttacaaagttttgaagttgtcgaagcaaagccaagtaggcggaagagcaag

SEQ ID NO: 199474 - DNA, 585 bp, Zea Mays
tgacaaccctgaagaagtttctgatatatctgacagcagagacgataattcagatgcgcttcatgttgatattgaagaccgtgaaagtagccctgttaattgggagacagatgcttcagaaactcaagctactgtgcctggaagtagtgaggtgcaaaatgaccatgcagggaagaggacctctactgtagatgatagctcatcgacttgttcatcagactcagtcccttcagttatcgtgaatggatcatatacaggaggtgcctggacaagcgtcagatccttatccaataggtatatcttcatgagctcctctatcttactataggttggtattgatcatgctgtattgcgattcaggggaaacaaccggaggaataaggatactgaagcacgggcagcacttgcacaaggtggatcaagttcagcgcataatggttttataggatctggcggcagtgcctctggccactcaaaggaaagatacgaacctgaggtatacatctctcggatatctgagatgattcttgttattcatcaaggaatgaaagtgcgccatgaagcaatcctttttcctaattcttg

SEQ ID NO: 199475 - DNA, 454 bp, Zea Mays
gttgcctgcagttgatctcatggacatgctcagggtgatgataatggagaagattgctacaagacagtccatagccaataaaatgcaaggccacatcctacctagtgtagttaatgatctgcatgagaagagtaggaatcttcgatataccatcactaaaagtgggtacatgaagggtgaggtttctggtgctagtagagatggtgttgcttggagatatggagtaaaccttgttactcaggcttgttcatgtggacagtgggatgtaactggaaaaccatgcactcatgccatagcattcataacttctcaacgaaatttgagaatcgaggactatgttggagaatgttattcggttcaaaggtttaaagatgcataccaatttgaggtgtatccaatgggagacaggttacagtggccgaaattggacccaggattcgaaatgaggccacca

SEQ ID NO: 199476 - DNA, 349 bp, Zea Mays
gtcagcattaaggtcattgcagcactgggcgaatacttgcaattatgcttctttctgaacacaagaacaaattcctgagtctgaaactgcattagccgcttcacttcgcctatagattcatctaaatcgtggttacatcaaaatttatctccacgtcacatgaatttgatgcactgcccctcctccacagtaccagcagtccagcaacaagggatcacttttccctcgtgcccacagctcacagtcatgccattctcacacacgccagctcatggaacagggccaatccaaaaggctaacatcgtgttcgctccggctcttcccttccttccttgattgcacaattgca

SEQ ID NO: 199477 - DNA, 861 bp, Zea Mays
ggaggaggagatcatgtggcttatagaagtagtgccagagtgatctcctcaatcaatcaggattagaccttcccaatgtgtctgatacagatggatccctacatcaatcaaggcgtctactaccataacaaccttggattctatctatgcaagcacacgccattacaggaaagcacacaccattacaggaaaggaatcttgcattgctaacaccccccgcagtcagagcgtcgaagccttggacgttcagactggaccgaaattctgtgaagcccgaagtaggtagccccttggtgaagatagcagcatactgcgacgacgtcagaacgtgaagaacacaaatgtcatcgagggccacacgctcgcgaacaaagtgaagatcaatctcgatatgtttggtgcgctgatgctggacggggttggaggacatgtagacaatgctgatattgtcacaataaaccaaagcggtgcagcgcgggggacatgaagttcctttagtaactgatgcagccaggtgacttcagcaacgacatttgcaacagctcggtactcagcctcggcgctggagcgggagaccgtgttctgacgcttggaggaccagaagatgagactatcaccaaaaatacaacaaagcctaaggtagacctgcggatatcaggacaaccagcccaattggcatctgagtagatcggcagttcagtctgtgcggaaggtcgaagtaacaaaccgagatgaagggtgacacgcacgtaatgaagaatgcactttagagtagcaaggtgaggctcacaggggtcgtgcatatgaaggcaggtctgctggactgcataagagatgtcaggccgtgtgaaagtgagatac

SEQ ID NO: 199478 - DNA, 284 bp, Zea Mays
atctcctagcgttttctcttgtctctccaattttgaagaataaccggagacaacattgagatagtcttgttttaacccttgaacctgaaccaaacaactttatttaaaagatcgtattatctcatcatgtcttgccattgcaccgaaacacaccctaagaaaagaaaagggagatgcctccacctcaccttgtcgctgcagcatctgccgtgcgacggggaagcatacgagtttggccaagagaaataaaaaacgagggtcaaggcgtgttagcagttgatcac

SEQ ID NO: 199479 - DNA, 734 bp, Zea Mays
gaattccaagagttggtggaccaagaaggtgccatttttgaaaagtgtgtgaccgctggtggcactactgttgaagatcaagacaaggaaatggagcaatctgcaggtgacgaatcaagagaaaccgaggctgagaatgctgtggaatataacaagaaggtggatcaagaagataccattaacagacaaggtacagctaaggaagacagtggtgtggagccacaagaggagaacgttgtggatccagatcaaggtgtggatgacttttctgtactagatgagggtaatgtggtggcacagtgcaccagtgatcaattgagaacaaccatggaagataatgctgcagagatgcaagaggtggtggagcaagaaggtgccatttttgaaaagggtgtgacctcagatggcattactgttgaagatcaagacaaggaaatggaacaatctgcaggcgatgaatcaagagtgaccaagggtgagaatgctgtgaaagataaaaaggtgtatcaagaagatgccattgacaaacaaggtgcagctgaggatggcagcggtgtgaagtcacaagaggacaacatggtggttccaggtcaatgtacagatggccttcctgtactagatgagggtaatgtggtgccacagtacacaagtgatcaactgagaacaaccacagataacaatgctgcagttgatccagagttggtggagcaagaaggtgttgatagcatagtggg

SEQ ID NO: 199480 - DNA, 444 bp, Zea Mays
gtttttcattttgtggtaatactgtatgaatttaggatatttacctgaatatccatttcttgtctgtttgggagtaaatgggatccagaaactgtatattcttgagtcttgactaacctgtgcattctatcatttgtaggcagttgctagtgaaggtgggactgatgatgccaaaagacggggtgatgcatttgcacatgccttttctgctcatctggcaaggtaaaaaatgctattgcatggcattagttccgaggtttttgtttctttgtgtaccactattggctgtggatagaatgctagtctcatatgtcaatattatccgttctctttgctacctaactggtgtctaaggttagattgatggaggagccagctgcttatggaaagtttggtttggccaacctgttggaattgagagaagaatgtctgagggaatttcag

SEQ ID NO: 199481 - DNA, 677 bp, Zea Mays
aaactttttagaacgtatgcagagggatggaatgactgatgacagtgaaatttgggctgggaaatatcaggaactccgactctgggcctcgtatagaggacagaccttagcacggactgttaggggaatgatgtactaccacagagctctcaagatgcttgcttttcttgataccgcctccgaggtagacatcacagagggtactaaacatcttgcatcctttggttcagttaggcatgagaatgatgtgtatcccatgaatggtggtttccggcggcaaccacaaaggaggttagacagaggaaccagtactgtaagccaactgtttaaaggtcaggaagatggtgctgctctcatgaagtacacctacgttgtcacttgccagatatatggaaagcagaaaattgctaaagatcaacgcgcagaagatattttaactctaatgaagaaaaatgaggcacttcgtgttgcttatgttgacgaggtccatcaacgaggctatactgaatactattctgtcctggtaaagtttgaccagagcttacagagggaggttgagatataccggattaggttaccaggtgaactgaagcttggggaaggaaaacctgaaaaccagaaccatgccatcatattcacaagaggtgatgcagttcagacgattgacatgaaccagg

SEQ ID NO: 199482 - DNA, 226 bp, Zea Mays
aatttggaatggagggagtatttgtttttgagattgccattacctgatatacatggatcagcacgttctcttttttctgctcctgaccactgatatcttggaaatcaaagttcttgtgaagttcacatttaaaaatgtgtcccattgtaggaaaattatatcaattatcggcctaacaccatcggcaaggatgaaagtggagttaaaagaatgaatgctttagccc

SEQ ID NO: 199483 - DNA, 958 bp, Zea Mays
gacaccaccaaagcacgggaaagcagaggaagcggagcagagctttgtgggagcgtcaatggcaggaacttgggtgaaggtttgcttgcctagccttcgtcttcctcctccgattctctctttaacttattcatccgtcgaattcgcaccggcaggtgtagcttttttggagacgttcctgatgtttgaatcggatttaagcttggtttttggttcgcggaaggatttgtttgtttcttgagtggagttttgcaagccatctttgatattaggttcaaaagtgagttgggatcagttggcgatagtaacccacccactcggatggtcggggaactggactctggagccctatgtgatctacaaagggggattgattgcgggattggtgggtggcgttgacgaggaagtttccattccgtcttcaatggatcttcgtcttcctagtgtcaaaggcatgctgacagggaagtcggtgatgcccaagttctgctcgagtcaacgagcttcttttgcagctgtatgcccccgactccacagttgccaatccttagttgttgcaacttctgctgaacttttgagcctcaaaaccttgcagtccgcagtcgtatggccactgttgcttattagtcacttgatctgaaccaaatcacaaggatgtcacaattcttagaattctgatttcatttctgcgaaatttgagcctcagaatttggtttcaacggggtggagagattaattgtggatgtctcgcttattatgcttgcaatttcaatgcttttcacccagatggagcagaagggcgccggtccgggagcacggagctcccacgccatcacgctgctcgggggcacggcctactcgttcggcggcgagctcaccccgcgcgtcccggttgacagcaccatgtacgccttcgacctcaacacccagacgtggtcggcgctggacgcgacgggcg

SEQ ID NO: 199484 - DNA, 387 bp, Zea Mays
catgctgatgcaaaatatatatcttgcacatataggtgtgcaaatctctcatgagaatttaaaagttttagttatgagctcccacttttttttaaaaaaaacccctcacttcacgcaaagctagcagtgatcagataactactccaaatgcatattaacttcaccaatctccatagttaaatgcacgactaaaaatgtatacatgtatggtactagggacatatactgtatgttaaatgatctacatatgtaatgtaacttatctaccattgcagaatattttcttcacctactccaactgatctgcatataattaaatatgcatatagactagtagactacggttgctacccttaaattcattgttgacggtaaaatctgttatgc

SEQ ID NO: 199485 - DNA, 426 bp, Zea Mays
tcttccaaggaagatgaccttcctttgacaggataggcatgtctgatttgcaggacggattagaagcagaacttacaactgtggacacctgatcagctgaataatcattgacaggacttgcaggtttaccattcctatcgcattggtctgaggttgttgtaagctctggcttcttattagaaacatcaacttcatcaactggtgaatcctccaaatgagaccttcccattcggacccttgctcttttgaccaatggcaagtgctcatctccatctgacttgcatacttcattctttgaatttggagaatctgaaaggatttcactgtactcagcacgtaattcatctttatttggtgttgtacaatcttcataatgaggaacaggttttctatctgattttcttattctcctgaaaattacttctg

SEQ ID NO: 199486 - DNA, 481 bp, Zea Mays
ctctgctatttcagaaggctactaccgacagggcggcggcgcgtacgaccgctcctaccctgacgacccgccgcctgtctacacgccgtcgcgctcggaccgatactggccggaggacgacggcgggcaatacaagggtttcggtcggtatggcggcggtggccgcagggacggccgtgacatgaggggttcgtaccggaggtccccatacaggggtggctacggaagcgacttctcccgaaaccatccagagcagccccctcccccaccacccagaaggtctccgttgaggtcagtcgctgttccgatctgctatgactcaccgggcaatagagttgacaggggggatagggacaacctcccacgggtgacaccatggcggagaagggaaagcagatctgagccagcagacgctgttggacttctctctgttggccaaaccacccggctctctgcctcagggaaggaggcttcagctcag

SEQ ID NO: 199487 - DNA, 361 bp, Zea Mays
gctgatttcattacatggcaagattatagggaagatgttatgaaatccttagtcctcaaatacttaccagagacaatgaaagacactcggtagagaatggcctcttcacgctcagcccctagccctagaccatcatctcccaaccccagccccgtcacttccctccttggcgtcaacgtccaccacctcaacccctcgccggacctcactccaaacccggcgaacacctccacgaacccccctcttcctgcatcagggcccacagcaaacatcgttttggcttcctagtcttggcgggctaagttccagagatggagtgacgacagtcctaccccctcgttttctggaggctcatgtgtcg

SEQ ID NO: 199488 - DNA, 338 bp, Zea Mays
tgtaggccatgatacatgttccatctgttctggttctggatggaatttgactgcattctgctatccctgaaagaagggtagcacgcttaagaggccaggaaaaatgccactgtcaccctcaccaaggagatcaaggtctcctgcatgggagacttatcacaagaggaacaacagtttcgggaatgtgcttcctgtgaaatcgaaggatgatgaactcgctttgttctctgatatgcagaaagttgagacggagaacttcttactggaaccgtcagaagattttgacgactcaatcggtagtgcttgtaaatttcatcttcctccctttccatacagtc

SEQ ID NO: 199489 - DNA, 585 bp, Zea Mays
gaattttgaaaaaacaggtggtaaaccaataccgccgagcgacgatttcggtaaaccgagtggttgaccgccggttttgtaattcttggccccgtctttctcatatctcgacctcactgctctggtgttctgccacatctggatccatgtcgtggcctctggtccccttcccttctccgagactagccccttcctttgtcgtgggtgcatacctcatcatatatgctcgacaagctgcacctgggtgtggtctccgccttcgactgcttcatcttgccagcacccacaacctccctcattgacaaaggcgctggcaaggcctcctccaagcggcgtaggtcgctaagggagatgaggagtggtctggaggggagcgagtgcagctccagcacggccaaggtccaaggtctaggaggaggaagacaaatgcagaccacagtgttgggggaggttcggtgacgggctacactgccgtgtgtggcatgaccgcgagaggcttgggtgaggggctacatcgccatgcacgagagaggtatgagagggctatgctgccatgaaggtagaggtgtggtctaggggatgcac

SEQ ID NO: 199490 - DNA, 330 bp, Zea Mays
cctctaacgccaccttcctaatacaagttgccatcttcatccacatgttatttgcatcttcttcctcggaccaagcgccctccacaaaaactctttacctaaaaacttcggatgtctcccctagaaagtgattaggacaaaactattaataaagaagagaaaaaggataaagaaaagaaaaagaataacccagccagcccaaaccagcccatctggcccattaaagttaggttaagcccacttgttcaccccctctgcccatctcttctcccagtcgcacagttccctctctatccagcaccagccgcacaactccctctctcccctctc

SEQ ID NO: 199491 - DNA, 843 bp, Zea Mays
aagtaccaaatacagggacctaacatccctctcgcagcttgcatttacggtatatttcttggatttgtacaatgtacaccacacatcagttgtttttttccctcaaactatgcatgagagctgtatgtcatttcattaaaaataaaaaggttacaagagctaggtgaaaacatccctgcagagtagttcttaacgaaagaaattgtatctttgtgggtatcaaggttgatatttttttagcaggcatgtggaggggttccgtgtgagtatgatggttcaaaaagttgagcacatatgtttaatctgataaaaatatgtcattagatggttcatgctcaacatgttgtgtagctctttttatggtagaaagtttagcttctcatttaagtggaggcattgatttatttccacatgcaccctgaataaacaaataggatgttttttctatcaattttattggagatcaccttaatggtgaatcaaatttaatgacctgattataccttgatggtagtgataacacattatattagggaagtaactttgctatgcccaatgagtattgtggtttatgatgttaataaattcagttcataagatcattggtgtccagcatgatttatggagtgctcacctgtatggttttccttgtgttttagcttcctatgttttttaatctctgatgtaggtgtgggatgtctcatctggtgagaaccctgaggttgtcggtggagccaccatatttctttttaacagcaaaaggcagcttaaaacaggaagacagaagctgcggctgtggcccacaaaggaggcagatggaggagtccccaccacaactcctgg

SEQ ID NO: 199492 - DNA, 1455 bp, Zea Mays
tggccatccaatttcagaattctatcctgagaggactagcgcgtatgttggtcaatatgatctccacaatgccgagatgactgtaagggagacacttgatttctctaggcggtgcctaggcattggtgccagatatgagatgattacagaacttgctagaagggagcgggatgccggcattaagccagatcctgagattgatgctttcatgaaagctactgcagtacaaggacaggagactaatattataacagatctcactctcaaggtatgattctaatttttaatgataggttggaaacaaaaacatacttattgagtttagtaaaacctctctcaggtgcttgggctggacatttgtgctgatgttattattggtgatgagatgatcagaggaatttctggcgggcaaaagaaacgtgtgacaactggtatgcatgcaaagcctgcaaaccatgtgcccttacaaagacctatgatcaaatcatcagtttatagttggaaccccaattcattgcatattatctcaggatttgtctattatttttttcatgttttgtgtaggggagatgctaacagggccagcaacggctttatttatggacgaaatatccactggtttggatagctcgagcacatttcagattgtaaagtttatgaggcatttggtccatgtaatgaatgaaactgtcatgatctctctgctccagccaccgccagagacctacaatctttttgatgacataatcctgctatcagaaggatacatagtgtaccatgggccacgcgagaatatcctggaattctttgagtctgtcggtttccggtgccctgacaggaaaggtgtcgcagactttcttcaagaggttacttccaagaaagaccagcaacaatattggtatcttgatcaggagcaatatcattatgtatctgtacccgactttgcagaacgtttcaaatcattccatgcatgccaacagatgcagaaggagttgcaaataccttttgaaaagtccaaaacccatcctgctgcgttgaccaccaaaaaatatgggctttctagctgggaatcactcaaggcagtgatgtcaagggagcagctattgatgaagcgcaactctttcatctatattttcaaggtcacagtgttgatcatccttgcattcgtgtccatgactgtgtttctcagaacaaagatgccccatgggcaaattgctgatggcaccaaattctttggggccctgacttttggtttaataacgatcatgttcaatgggttcgctgagctacaattgaccataaagaagctaccagttttctacaaacatagggatttcttattcttccctgcatggacctttggagtggcaaacatactcttaaaagttcctatctcgctcgtggaatcagtagtatgggttgttctcacatactatgtgatgggctttgcacctg

SEQ ID NO: 199493 - DNA, 1308 bp, Zea Mays
cagagctgcatctctattaacaaacatttgtggtgactgttcataatatcgctcagaaaaggcctcaagaattctctgtatcttctgtgactcaccaggtaaccggaaagtttccaagaagagccttaaggcagcatccaaattcatatccttgaagtcaaaggttctagcaaattcatgaaggacctggatagagaactcatcatgattacccaggtagtccccaagaagattcttgtccaatccaggtgtgtacctgaagaacagagcaacattgtgtggatcaagtttttcaggcaaaagatgaacagcttgtaggtactcaaaacccttctttttgtccctattaaaatgttcaacgccaatcattagctttgtcttgatgcttttttgctggtgaacaaatttaacccactggtcaggatcattactgctctcacatttcaactgccagaaaggaaaatattcacttatttctggaactgtttgatcatgatgttgaggtgcattatcagtccgctgtgccattgcctgaatgacagcaaccaaaccatccaaagcaagcacatttaaagctgacaaaggactattcacaggaaatgcgctcttagacagaaggttagctaactcttcaaaaatatttgagcactgtagatcacagtccatatttgcatacatctcagccataaactctttctgccagcaaaaatcaattagagcctctagggcaacttcttgctgctgataacttgctccatatctactctgtgctaatcttaggataacacatgagaagaaagcctctatttgcagcttaagttcatggcgcagatggtaaaagagagtaaaaacaatgctgcacacagtcgacaggatcagagggctcattgacaagccaaaatgcattagattgcggaacaattcatcctgtacaaatgctaaaagtttttgatgtctgtgtatagacgaagccgaaaactcaatagccgaattaatcaaccccagagcaaagagcggcacatcctcatcaaagtcaattggactcatccttgggttcaactcaatgtcttctgctatgttcaagagggagcacaagaattgcaatatctctaccatacaaggaaccccaaagggctccatcaagtctttgtcttgcataacaccagaaccgtctcccacttcatcgccagagctgttcaaacatacgtagtcactcttcccgttctcagtctcctcagcacccaaacatgggttcttgcaaccagcaacctacgtaacaatgctaccacaaaattaataaaattcatt

SEQ ID NO: 199494 - DNA, 466 bp, Zea Mays
aggaggaggaggagcctcagcaccagcggcatcaccagcggatgccatccaaatggacgcgcagatctcgactcactgcggggtgccatacacagcttcactactcgccttcgatcccgtccagcgcctcctcgctgtcgcaactctgtgagccccattccaaacccgccttcacattagtacatcacaaccaaccctaaaccactgccacacaattcattcagttgtaaactagagctttgctaatttatgttctccacccctccaaatcagttcattgcgttataacaaaacaaagaaactactttgcataagcatggaaacaggttatttagttgttgtatgtctcaaagacctagttcttattgtgtaattgttgatagcttttctgcactacaaactgcagggatggtaggataaaaatatttggcggtgataacattgaaggcctccttatatcaccgaa

SEQ ID NO: 199495 - DNA, 335 bp, Zea Mays
cgcccgacgtcgttgttagtcgccagctaagtatggtgatggttatcaccatggccatcgcggtggctcactgggcctataaattcaccgcgctctcacccccttcatccaaattaaccaagcacagctcttcgtcccttagttacgaagccaacgaatcactagccaccctgttctgtccaccaccctcaaagatcatcaaaattccctagaatcggtctcttccgccgccgtgaaggacccatccgtggccagcactcctcgggtcagtacataccaaattgcttcctattctagcttgactttggccttctattgctctcggagccggctaa

SEQ ID NO: 199496 - DNA, 600 bp, Zea Mays
attttgttttgcagctggtgccgcaacccggacggccggaccggacggacggcatctgctccctgcccgtgggcggctggccccgatataaaactgacaagagatagactaatcaagtctctcaacccgagtctaatcttggtccccaatccaatcccgcacccaccattgcgagagatcatcagaggaccgcgtccaatcgaagcggagaggaggagaagggtgtgctgatggcgacggcggtggcggccacggccgcggcggcgggtggcagcaatgtcgagttcatccgcgcgcgcagcgacaagcgggagtaccgccgtgtggtgctcgcaaacgcgctcgagatcctactaatcagcgaccccgacactgacaaggttcgtcttcgtctccgtctccgtctccggccgccgccgttcgcctgctcccctatcgcggcgccgcgacagcgaggaatgcgtgtgggccgaacgaaggcttacggaccatctatctgcttgcgcgattgattcggttgctaacctctctttgcttctcgctctgctcaggcggcggcgtgcatggaggtcgaggtgggctcgttcagcgacccggagg

SEQ ID NO: 199497 - DNA, 470 bp, Zea Mays
gtccaaacttctaatcatatccaaattgctgggcacaattgctctagctaatttagcatcatggttgctttcaccagaatggcgaggcacaacctctttcttcttattaattgtacttgagtatgctgcactgttcaatttcataaaacatgaatcacaaacacggtatggttttgcaggattaggagccaatgctgctctcaggaccttatgtgaggtgcacgcattacaatggacaagaccacaattatggcaattatgcctcttcctggtgaacccaaatggttgccgacatgaggcacattgcgactgctcagctccagaaacccacttatgttgacagatagctgaagtgaagtttgaaccacaagctatgtgcctaacagccctgtctctcaatgattcaaccagtgtaggtatttttctatcctctacgtctccatgacccagtcttccattggccccctttc

SEQ ID NO: 199498 - DNA, 532 bp, Zea Mays
atttgttttgaataagctgcagattttggccagtaattgatgtcctttagttgtctcgtacttgtgtggttcgcgcgctagaggtttggggatgttactatgtctatagagaaaaacacaagacagaatttagcttgcagctgttagtgcagctgcctaagagttacaatggaggttaggggatgttacaatagggtgccgccttgactggagggaggctggcggcggggggctggaagacgggacctggcaggtggcatgaaggccgacagtggaggacggctggcatggaggtgggcgatgcctgctgcggagagcagggaggtggggaagacgggactggggggcggtcacaggggaggcgccgcggaaggaggcgtagaggacaggggtgggggccagaggggccatgtgggggaaaatcatttcgcttacaatataagcgctttccaggccgcgtactagaaaatcgggatggacgttgtattttggatggtgggctaagcggcttgagaattaagcaaggtgtttg

SEQ ID NO: 199499 - DNA, 484 bp, Zea Mays
agaaaatccacatcgggatatgtgttcactctcgcaggtggagctatttcatggaaaagctcaaaacaaactgtcactacatcgtccacagagtatgccgagtttgtagcgtgttttgaggcttcggggcaggtgaactggttaaagaagttcatacccggtttaaaggtggtcgacaacatacataaaccactaaagttatactgcgataatgctccagcagtacagtatgctcacaacaataggtcaagtggtgctgccaaacacattgacataaagtactacgttgtgaaggataaagtccgggatcaaataataagtcttgagcatataagaagtgaaaagatgctcgcggatccgcttacaaaaggcttaccacccaaagtgttcaaagaacatgtagccggcatgggtttaagggaaagcctatgattcctggactataaatagggcctaaagttaaagtaattgtttcagatcggag

SEQ ID NO: 199500 - DNA, 239 bp, Zea Mays
attgagtgttccagctgcactcctgtagttctggacttctggtgcaaccaacgtcttatttcttgacccctttgctgccactaaaactgatctgtttcaggcaggagattcgctctgccacgagctcaatgacttcagttccaaagccgctgaaattcctccgcccacactttggaactctcaagtcctatttcgaaacaatgccagagtccgagctcaaggtatctgtgatcacttcg

SEQ ID NO: 199501 - DNA, 291 bp, Zea Mays
ctggtgcggattctggtgaaagcaaaggatcgtttctgcaagactctgaagctggagaaaaggatgtctaccttagccactcctgcatccacgacgagatactacatcaacggcgacgagctgggaggaaggagtactctgtcatgccacaagtgtaccatgagtctcgggaggatgcggagcgtgtaagaggacgacacttgttgggcatgtcatcttggcgtgctccgcacgagaatgccaggaagccaatacgaatatacctcaattatgatgccgtcgggcattcgc

SEQ ID NO: 199502 - DNA, 1528 bp, Zea Mays
ctcctgagcaaggatgagatggcggaggctcgtgcggaggcggagcaggatttcgagagggaggcgaagaaggggaagggaaaaaggaagaggagtggcggcgagtcgtctggttttggcgtggatgacgacttggggatactcttcggtggggccaccactgggaagctcccacgctttgctaatcgcatcacagtaaaggttacctcctaaagtctgttactatgcagcaatgggtagaaagtggtagatcttccaatcgaactgcatccttaaccttgaaatacgctctgggggtctcttgactgcttagcataagtcaagagtactgtttatctagcgattagaaatgagaaaatgctatatagaccttaagcaggagcccctgttgtgcacttctctttaaataagataacagcagcagaagcaagcagactgctgccgacacccccttctaaatcaagggatttgacaggttggagacagcgaaatcaagataacagcagcagaagcaagcagggctagaagcaaaattgaatggtccagcagcggaatcgaggggtatatggtggaatcactggggtgaccgcatatgcataaggcgatgggccactgtggcgaacttagaccgctttgacacttaagcaacacttgaataatgtcttaataaccatgattagaattattgtctatttctggcctcttccaaataaacacagaattattgttatgtgggtgctctacctctcttctccatcaagcgcagagcagccggggcttgaccctggccctttgtcgtccctgttacatgctataatccctgtccactcgaatttattcaaaggcccaaggagctagacttttattcttatatcaattcacactgaacttctctggcatgtttgctctaacaaatagctggtgagagcaaacatattttccattgttaatcctggcaacgtttcagatggttcagatatccattcaaatcctgcagcagcagcacatatactgatgcacttcccatccaatatttctcatatttttgaactaaacgctcttcataaaatcttaatggatttagcttgttttggacagtttcagttgctagaatatggtacaagttatgcacctcgatgcacattaagattaaggtgatgtagggctacacgcgaatctttctttggtcattgcattagttgaggctacaggattgccatttggccctttgaatgtgatgtctaggatatatatcgctagctttgtgttgggtggtgttactgtgattattcttatttgttaccttgaaatgtttggattttggagcatgtgatgactggcctcaagttggtagcaattgtccttattttaagtcagctatgtttactgtttgtatctgtttattgagagcatgttaacatgagacatgtagtggcttctttaaatccttcacaaaatgctgctatattgctgaactggtaatgcccccctccccttgtcagaatatttcaccaaatatgaagctctg

SEQ ID NO: 199503 - DNA, 273 bp, Zea Mays
ctggctggtggctcataacaggtgctggactgctgacagattggaaaaaagggggctcattcatccaagcacctgtccattatgtgaccaagaacctgaatccattaaccacctactggtctcatgtgtgtttgcaaggagtttctggtataatctgcttagaaaatttgggttggataaccttgctccccaaccgggcctaacatcctttctggaatggtgggagacagcttctgaaacagttcatggaatgaccaagaacggattgagctc

SEQ ID NO: 199504 - DNA, 354 bp, Zea Mays
atgtggattacgcttgcaaatattgaagtgcctatgcaatgcagttgtaccattgacatacgaatctgccttaatgggacgactacaatacttacactttcccttcttcaacacaccttggtcatccttaatcttgatgaagtgctgccacatttcagacctcggagccatttctttccttcctgtttcagttgtgttcttaccatcctcatccgcatccttgtctttgtcttgtctaccaacagtttgaaccacctcatcctcacttcgctttgttgttgcatccactagctccagctccatattttgttcattttcagacccaacttcgcgatcttcttcaggttcagaagg

SEQ ID NO: 199505 - DNA, 3937 bp, Zea Mays
atttgtgcctagtgggcttctcaagggtgattctctggtcctaagcgagctggacctaagcgctaataacctgacaggtactaactctacttaacagtcctttcagctatcgtcctttttgctgaatgccatacatcatgaacacatggccgagatttgatgaatgggctgatatgcatttctgtgtttagtggagttggggtagctgatggaatcagataaaacaatgtggacaccatacaaatgtcatgttcagttaaactgccatatgaatttctattgtggtgcaatgtgcctcccccattgtatttacattacagtacctaactacattacaagcttcttggaagcgataccctttcctggctacagagttaagaaccaggctatcttgtcatgtggttggccttcagcagcattagactgttagtcaatgcgatttgtgaaaaaaaccatagaacataaaattctcatttagcaatttgtgtattattgctatatttatctgatgcaaatgatgatttgaactgttaattacctagaaaatgaactcaataatgtccttgagtctgcaccatttagtttttcctgttcttttcctgtaaggtaacttctatgtacagttttcattcagcataagagattgattgtgcaaatccatgctcatagtgttgcctactgtggcattgtgcctaaaaacttagttagctttgttcagtgcaactaacaaattggtccttgtaagttgtaacaatttggtgataacaagcttgatatagtagttacacatgcagagaggtagattgattagatgcattagcatgattgtttaatagatatatgacaggaaataacacaacagccagcacaaataataagttctgataattgatgattaatggtgtgcttttctgtgttgagcactagacgtggggcatatatcctggtggcaatctcatcgaggaaagcagataatgctgtggacacaccatacaaatgttacgttcagctaaactgaactaacattttctgtttcgttacaaatgagtggaagtaacatgtggatatgtgacttgctttatttaccctcttacatagagttgcagtgcagtgtatcttcaccgttctagttataataccttacactgctctatgcttctcaacattagtaccttgtcctggtccctggactcctggcctacaaagtaaatagctagggcatcttgacatgtggttggctttaaatattgtgggctcttttctaataagagcaagtaacaggactagcaggtttacctgtataagctatgattgaattgaactgttgcatttcatgctgattatctttggtcacattgtttcctactatggaattgcctaaaacttcgtttacccccccacccccaccacccacccacacacaatgaaactaatgaaccagttcttgtttacaaagttagtgatagcgaccacacagtcggtttgttatatgcactagaatgatttgaatcacaaagtcggttggttatatgcactagaatgatttgttgacacacatttctgcgtttaaatggtaagtactggggttgggatatatgtcctgatggaaagattcttgttgatgaaatcagatatagcaatgggcaaataatacaaatctcatgttcaactaaactgcactatgaatttctcatttttagtccattgtgaatggaatggaagtaacatgtgcatcttttctgttaagtgaatggaagtaacatgttcagctaaactcactacactccagtcttttcaaatttagtattttgtcattgcctactaagtaaagaactagccatccttccaattggttggctagagttagtccatacaacttgtgacaaaaaatcaaacatgaattctcatctagcactatgtatcattgtatacaaatgatgatttgaactgctggttacccaagaatatgcactgaattgtatgtgcatgtgcttaagtctgcaccagttagcttattctgttttcctcttaggtaagctctatatagagctttcattcagcatagaagattctttatgcaaatgtgtgctcataatgttccctactgtgccagtgcctaaaacttattaaatttgtccagtgccattaatgggtttattcttgttcaaaaaatgcttataacagacttgatatggtagttatacatgcagcgaggcagactggttaattactagcttgagttagcatttataaagggaaggaggtaaagcaacataaataaaaaagttctattaagtggaaacgagtaccggatttgtggccttgtatcctgacggcaagattcctcaattgtagaagcacataatgcagcaggtgcaatatactaatgtccagggccgggccagagaaatttgaggccctgtgccaaatctaaagcatgtgtaatatatgtttttattaaaaaccagtaataacaatctgtaatttacagtaatatatattgcaatagaatatcaaaagaaacatttctattttatttgaataacatcgttcttttggtgggttttaaagaaaatttgtacaatatgcttatattctatcttctccaaagcttcactctcgagtgctattgtggctaaataatacgtcttttttatcatagtagaacacaaatatgaatttagtagctttaatttagagaacttcattcacgcggatagatatgttaagattctatgaagatttattctttagtggagcgctcggtattttcacttcagcgcagcggtatggtagggagaaaaatatgtgctatatattaacatgtgtagaagatcataaaactagaatatatacatctactaagttttgaggccctcaatttttggaggccctgtgcgagcgcacggctcgcacatgccttgggcccggccctgctaatgtcatgtcgactgtcgggttaaactgcaccatgagtttctgttttgttacaaaagcatggaagtaatatgtaaatatgtgacatgtaattgttttatttaccattttatctactaataaattagagttgcagtgcaatgcacctccaccattctagttatagtaccttacaccaaagcttctcaaaactagtaccctgcctagcctacagagtaatgaactaggacgtcttgccatgtggtttgctttaaatgctgtgggactcctttctgatacaataagtaactagactagcagctccagctgtataaactatgattgaattgaacgagtgtatttcatgctatggtaatgatacctgaggccatgcaaatcattggcttgctttgagtaaaagtaatgggtgtgcccctagaattcagtacactagaaaatactgtaagactgcatagaacatgaatgttaagtgtgctatttgcatgtttcctttcctactacggcatcctctatgatgatagttcgaggaccacttttttcttatcttttgtgctaattgtatttacttactatgcagggcatatcaatatgatcacatcaactactttgcaagtccttaacctgtcctcgaatgccctttttggggatcttccattgcttgctgggagctgcactgtgttagatctttcaaacaacaagttcagaggaaatctatcagttattgccaaatgggccagcgatttggaatatgttgaccttagtcagaacaacctaaccggtccagttcctgatgcgagctcacagttccttcgcctaaactacctaaacctttcccgcaactctctatccgagaccatccctgaagctattgctcagtaccccaaacttaccgtgcttgatctgagctccaatcagttacgtggtcctatgcctgctaatttgctaacttcgtccatgctgcaagaactctacatccgagataacatgctttttggtggcc

SEQ ID NO: 199506 - DNA, 423 bp, Zea Mays
cgagcgcgtaacaatccgcgcggatcgggggggtccgttcatcgaccacccctcccctgcccctatataatcattggcccacgactcctttgcctcccagctcggtctccatgaactccgagccagaggaacgtgagaaggagatcgaaagggagcaaccgagagaagagagagaaaatgggtagtcgccatggttccaagcccccactggcgttcggtgtacacgacctggttgcgggtggtcgccagggcatggggagtccttcaccggcgtcgatttgggcaacgccggcctcatcaccgggtgatttctcgccgagctttggggccccaccgtgggtctgtcacggaccgtggtcgtggcattggcgccgctagaatcacggtgagtaaccctgcaacaacgtcgcacttacctccgcc

SEQ ID NO: 199507 - DNA, 398 bp, Zea Mays
gccgaacaggtcggccggatgcagtagccccgcgcccccggcgggggcatcaaaccgtcagtgctcccaaatcgtcgtctagctagggcgaccgcaacgcaacggttgttggagtagcaaacttggttttaaggtggagggaaaaattggctgggctgaaagcagaaagccttgtaatgtacatgaaagaaacggaacggatggcgcgctacaatctgagctcgccattgccgcatatatctgctttaagagagcattgcgctgccttgcctaatcgaaacgaaacgacacgaaatgttgcctgcaagtttttgaacgtgtgggtgagtaaatcgcacggttgggtaccagtactgcgaggaaataataatgcagccagccagtcagtgcaaatccgg

SEQ ID NO: 199508 - DNA, 317 bp, Zea Mays
ctctatttgctccactattttagatttttttatagccacgacacgctgatcacacaaaatccctttgtaaacagtgccatgcccaccatgacctagaacacgagtagcatcaaacttgttggttgcttcctctagttcatccaaagtgaatatctttgttttgtttgtggcattttcatttgatattagttgctccaagagtagaccttgatttttcttgaagtactctcttcgaattctcctttggataccttttttccacttaccggtgagtacaattgcaccaagtgcaaaacttatggatccaagaccacaaa

SEQ ID NO: 199509 - DNA, 399 bp, Zea Mays
tgagatggatgagtgattaagataggagattattgagaagagattgttattgctggtacatatatatatttagctggtaagataagattattagtaggtgtatgtataggttgggaacatacatgcatggaagatggtaccacacacaccaagcagcattggagggagaggagattattattgaggtaattaattgtaacatatatagagagagaattgaagcatggagccacatacatacatacataagctattagtgcagtgcttgctgttgggtcagatgattgggtatgcatatatatttgtaaaaaattgtggagccatgtcatgtatcttttgtacctagctactagctacacatgtaggtagctgtgtgatacacacacttctcattccgtc

SEQ ID NO: 199510 - DNA, 744 bp, Zea Mays
atgaaattgtgtattcttcagaactagaaccgaagaaagagtttgagatgggggttgatggtgctgttccattgcaaggagctgcagcttctgttgcctctgttttccaccatgagccaatgtccattgatttgtctgagaatgatagcggtaaccattctggcccaactactgcgttggaatcctgtgaccatgtgcaaaatgaagagagcatatcccaagaaatttccatgaccactattgagcaacctatagctattgatcaagttgaacctgtcaacctgaatgtagatgaacttgtggttgatgatgatcaacctggttttgctccaaggtgtgaatctgctaggctggataaacctggatgtacttccaaaaaggatgattcaaatgagattgttgaagatagcaaatcactggaaaatcagttagaaatttgcaatgcagctactatgtctgatgagtgttcctccagaaatgcaaatgaagatccctctccaattaatatgtctgctgagtgttcctccagaactgcaaatgaaggtttctctccaattaatgaggcttctcatctagctgaggagtcttgcctttcagacaagtcatacaatgctatcagttatgaaaatggaaatgggcctgctaaatcttctgaggagcctgacaagtcatgcaatgctatcatttgtgaaaatgaaaatgagcctgctaaatcttctgatgtggttgaaaccagatgcgtgg

SEQ ID NO: 199511 - DNA, 490 bp, Zea Mays
gtcgatttttaccggtttaccggcggtaaatcattaccggtggaaaacagttttttcagctaaaatggttttgtaaaccgtggtgtgcagtgtacaaagggagagacccctcgatgtctcgtatcagatccaaatgggaggagcactttttgaacccgccgtcgctagctgctgccgctctcttgacgaaaggcggcgtttgcaaagagagacactggccagacacctccaccgcctggtgcccataccaggagtgggtagtgtttgtgtagaaagaaacgggatatgcgacggcatattggcatccgccggtgccaattggcatggcgacaagcgacgaagaaggtggtggtgggtggaggtgtctggctggcgtcgccgtcgctcccccccggtcccggggaatctcacgcgcacggcacggaggagaggaacttgttgggaacctccgctgccgcgtttggtggcggtggggcgagcaaggcaccgg

SEQ ID NO: 199512 - DNA, 244 bp, Zea Mays
taggcggcgaagggcggtggcgaagcgtagagtgagtgaggtggagggtggtcgtcttcgtgtggacagggctggcaagcgggaattgttgtcctcgccggttggggcgagcgtaggtgagagggaattgcgaagtctttttgagggtgaggagctgaggataatgttgtttaactatagggagatgggtattatcccgaaggttgaaccaatgtaaggtatgatgccctcgctgtacgtatgt

SEQ ID NO: 199513 - DNA, 784 bp, Zea Mays
gcctggatcaacatccatatgcctcgaggtttgcatttgatgtagaagagagtaattttgctgctgaatgtttgtaggtgctggacttccatgtaaaacaatgccaccactgtgattagcattattgtgggaaacattcatagcctgaaaattagctcctgggttctccccatgtttagcaccaaggatgccttgctgacgcaactgtgcaaaggatgaaacagcattgatagaattctcatctgaagaaggcttctgcaaggattcgtttcctcctgttacggtagttcctgtcaactctaggtttcccttctgggaagatgctaactttgcatcactatcagcagcttgttttggagattgattctgtgagttcgctgaacttgttgcaatatctgatggagttgatgccctctgcccttgatcatctgccttctgagagctccataagttggaagctgcagcattatttggaaacatcatagactgaatgatgttgggtgtaatcttgttaggttgcataccagttaggcgctgtgctgatatgtttgtccatacattcttgaacactgttgcagagttgctttgctgaggctgctgctgcagcatgggtgcaggaccagatctatcatctgccataggatactgttggcctgatcctaattgggggaaacacgcaattggttgcccagtattttctgtttctgaactgtgaaatggtgaagatagagaattttgatgctgaggagtcagtgactggctaggggtggaaggtagctgtgtg

SEQ ID NO: 199514 - DNA, 371 bp, Zea Mays
cactgtaactctgctgaatttggaaaggcaatacaaagaactcggaaggcggcactcagatctgcagaaggagaaggacttggtgcttgatgaagtgatcaagatacaggaacagataaggcttgagaggaaggagcatgaagattgtacacagtcaagcaacattagatttgatgctctacagaagaagattagtctattgctagaagagggcaggagtagagaggtgcagcttggtgaggaggagctcaagattgtcaaagctgagatagagatatttgtcttgcagcagtgtttgaatgacatgacagaagtaaattctgaaatcgcagaacaactgcgaaagaataaagaaatatgcaaggtccagg

SEQ ID NO: 199515 - DNA, 213 bp, Zea Mays
aattattagtactagcactagcaggaacacaacaaatctattttccacatgcttgatagcgactggtccgagtcctacgccgtcgccgggcacaaactgcacgtgctcggctatctcgcatatgattagtgtgtgtgggttggatcggatgcgagtgactgattggcatttttagcatcgataatattttactatttttggatgaaaaaaaag

SEQ ID NO: 199516 - DNA, 709 bp, Zea Mays
cagcagccacggatgtgtaaatatagagaagcctgtgttccatacagacaatgctggggttcagcaagagaccatggcagatgtagtcaatgaaagtgaaacaggaaatctccaaaaggatccacctgcaccaacttttatttttcaccaaccgtgtatgcctgaaagcaggtcttacgtccctccgcaagaagatactatagatgctgttggtctaggcgctaggtcctcagaaaggagtcctattgtggaggggaacatgtccgttggatctgtgcttgcttcagatggctgtgatgtacctttgcagggaagcattactgagccctttttccagcaggataaacatgaccatactgttatagttggaccaaaatcttgtaagcgaaaatctccaattccatcttactgtgctcatggagatggggcagatggtggtggctccagcaatcagtcatctaaggtttccattcgtgaaggacctagcactcatgccacagtaacttcaggttttgacagaatcagcgatgtcttaccaacagatgcacctgaatctgagcatttgcctgagtgcataactgcacaggatacaaccatttcacagcctgacagcaggaaagctcatttgagtgctctgcaacaggaaaggggtgagaaagtaacccaagatctggaagatatctctgcaaatattgggtcagtggaaaag

SEQ ID NO: 199517 - DNA, 219 bp, Zea Mays
atggaacccgctggggtttgctcccgacctttcgatgagagtgggggataatgcgatttgaggaggatcgacgttgtgctgcccgactacaacaccaagggttgtgctgcgccttagcgacagttacaccgcctccaatttgtgttgttcttgctgtgccaagaacaaccttgaacctgcaagcaaatcgaagaacaagcaagaacaagtggacaagca

SEQ ID NO: 199518 - DNA, 459 bp, Zea Mays
atattagggacaatagctattcaaatcaaacaagacacatgcctaacgagctatttactatctcaaatgaagaagctagcagtacacatgattgtgaaagttctcggcacaatactgaatgcaatctagaaaaaaatcaagaagattctaattttttagcttgcccagtacatgaaatggaaattgccaaagaggtgaggataatgccagggagtcaggttttcagtaaggcgtgcacagatgctcagcttgacaaatcaaagcacatgtcttgtctggtgggtgatgctgttgttcttaattcagcaaatgcagatgaaagtgcttgtagggaggacgtgtgtctgcagctttctctagacaagtgttcacaagagctccaaccaacttttcagcatcgatttgatggtgctgttaccataaacaggcatgctgtggcaggagcattagctgggacag

SEQ ID NO: 199519 - DNA, 598 bp, Zea Mays
cttcacccaatagataccatgctggagatagctgtggtcaatgtagtcaaggtagttgatgttgaggtggctgtatatgaagctgctgacacaaagaggtgccatgatgatgacaaagatgtgtcggggtagtcgtcatgaaaggggatgatgctgaggtcgatgtagttagggctatcgaggacgtagacaaatgcagtgacacaatcaagagagggttgatgtagtcaagctgcgagggacgaatcatgcgacatggttgccaggcttgggaatgcattgtggatgaagcacacactagtgttgccaatatttgacgtacgaggtagagggccccaaccatgcatcagcgtttgagggaacattagaggtcttggcgatggttgctgtgcgctgaacgatggggtagaaggtgctgatgcaactcacggatgtcgaagtagacaaagtagttggggaagagacgatgacattaaagacgtggttgtgctggacgaataagaagccatacgaagtcggacgtgtctaaccgaaagattagtccaaacggatgtgtctgcccaatggcagcagttcggacgcaaggtatggtggtgat

SEQ ID NO: 199520 - DNA, 988 bp, Zea Mays
ggaagggtcttgcttaagttcaacaactaacccaagctttctcgatgaacttcattcttctattgcttctgcaaagcctaagagctgcgctccagcaacccccattgaagacagaggttctagttcaccatcagatatgctaagtcatgaagaaagagttccaatctgcagtccacaatcagcccctttagcatctgcttctgatatgtgcaagatggaggagatcatgaatcagcaaagaacacttgtggtggatacatcgaatgcttcagttaaccagtctcctgaatcaagggcttttcctgtatcctctcctgataaccaagatattgaccgcgagtttcctagtccagttccaagatctgagaataaggacattgctgtggacagctcagaattagcaccagcgtcacctgaaaatattactacgaatttgcctgtttcagatacatgcaagatggaggaggtagtgagtcaacaacaagtaattggggctgttgtatcgaattcttcagataaccattctcctcaatctaaagtttcccctgtatcttctaataatgaagatacgaaacataaataccccagttcaaccccaaggcccgagaataagaatcctgcggtggatagtttactttcaacgtcagctgctcctgaaaatctaacgacaacttcaacccatgattctgatacatgcaaaatggaggtagtgaatcagccaaaaacatttgaagcggatgcatcaaatgctccacttcatcaacttcctcattctcacagtttcctggtaccttctgacaatcaagatattgagtgtgaatgtccaggtccaactccaagatctgacagtgaggaagctcttatgaacaactcagcgacaactgcatcagcctctgatacaagcaaaatggaggagtttgtgaatcagcaaaaaacccttgaagcagattcatcaaatgctccacttaatcaatctcctcattctcac

SEQ ID NO: 199521 - DNA, 367 bp, Zea Mays
gtttacttgtagtttgttggagggacatgtgatggcttctagtagaaaacaagttatttagcgtgaggctgtaatatactacaataacaaaaacatgggtcaatcatttggtcctaacagatggggcaattggtcctaacgcacgagcaaatatcagtgtaatttcacaacagattgttgttatggagtgcacacaccttatggggggagagtagtagggattttgtgttccaagatgacaaacacagacaaagctgctctacaatctgaatctgaaaaagaacaataacaattctgattagtatgacagcaagctgataaaaatggtacagtaaatgagtatgatgttgagcaatgcaaaggaaag

SEQ ID NO: 199522 - DNA, 1514 bp, Zea Mays
cgctcactgatggagggtggtagaagggcgagcgagtccctctcggtactttcccattcctccttatatttttcttcttcacgcgacgtgcctcgtttttgtgccgcagggtacgaggcaagtagtggctcgcccgggtcgcgcgcgcagcttggtgggttagggtttgggatgggtggcacttgatattgttttcgggtagttttgaaggcgtagttacgaattcctgcttgactctgggaattgggatttggagccttttgttttcagtagcctcatgtgttttttttgcggtcagactggtttggggcttggttcaagttcaatccgaccgctgtaaattacagctttacttgcttagagtaatgttttgctgggagtttagtgctagcgagctcatggtcctgaggtcaaagtgcaccacacgtgttctattcatgggacaggagggagtacggtcttagttgactgagaatgttctgctagcaaatgtagaatttgtacttcccttttggctattttaaaacagccacaccagtctttatggttcagtcagtactgcaattttggtgcgggttatttgttatacaacaagcatcattactttgtactaggtggcagtcttgtagagtcgtctgagatgctgcctactgccttaaatttctcacgtacactgatacacactcacacatgatgttgtttgttgcaatgatgttcacacatccgtggccgtctgagtacttttgctcccatatatgaattatgttatatataaatatgatgctccaatatatttagcttgcttgctgcaaagttgctgatttatgtttgacttgttggaactttgactttatatgttttgaactctctattttgcaggcatacacccatggaccatgacgatactgattttcagagccaaaattttcaactagctggtgtaggaagtagcaaattcccatcaggtttgcgaccatttgcactgccaaaacttgatatcgaggaccaactacaaggccatcttcgatttgataatttgatagattcagaagcatttttcagcgtacaagggcacgagaatagctggattgaggttctgtccactggaagcagtgttgttgattttagctctagcgcagctgaatcttgctcgatatctaaaactaataatgtctggtcagaggcaacgtccacagaatctgtcgaaatgctattgaaatcagtgggaggaaatgagacaactggtaacatggacagtaatgctcaccttcagttaattggtatggacagtcaaactgatcaatcgagtgttcatcctaaatctagtacctccccgacagatagtactgtagtgccaactgagaaagatcagtcttggagcactcattctagaatgactgctgacctttcaaacactgagtctcagcttgaacattttgtgcctttcttactggacaagaaagctgcgcaggcagcagattctgttgctgagaagtgccttacaggtgagaagt

SEQ ID NO: 199523 - DNA, 535 bp, Zea Mays
gtgggaagtacaaatgaatcagatcatactgacgaggctataccaatagatctgcaagataatagctgtacaagagcaagtcggcgaactgaggttgctgtgcccttgcggcggttgagaaatcttgactcatcgtgcgagccatctgaaaagaagtgcaaatttgttgtcaagttaggtgcctcggcagatattcggcggccagaggatatagcatctaactctagctcagtttcagatccgatggcttcaaagacttgtcctgtgtgcaaagtatttgcttccacttcgaacaccacattgaatgcccacatagatcagtgcctttctgttgagtctaatactgagcttgttgaaactgtccttgtaaagcctaaagtgaagccaaggaagaagcgattaatggtggacatatacaagactgctcttccatacacccttgaggatcttgatcggaggaattgcactaattgggcagttgagttggctatgtctccagtgagcaaagaggtttgcactgagaacggaagcccag

SEQ ID NO: 199524 - DNA, 224 bp, Zea Mays
gtgtaggtcatctctggtcgaataggtgtcgcaatttttttccttgagtggcgcattatggatcctggacccctctggattggaatgccaagtactctgtgtctggagtctgcagggagttgttgcgtcatgctgatggagtgtggtattggtactgtagtggtggtcctggtatttccattcttatgttttcatgcaagggcgcgtggaccatgctgttgttt

SEQ ID NO: 199525 - DNA, 736 bp, Zea Mays
gcacctttgccatccttattttggatctgttttctttctccctctgctctctcctgacactcatgatctgccttttggatcttacttcaatgaagccatctgcatcaacagggacctcaatgccttgctgcttcacaacacggacagctccagcttgcaatgaggtagtatctccatcaggaacagcacccgttctagacttcttgttcccaccatgagatctctcataagggacattgtgtgtacttctaaacgagagactctgatcacttgctccatttatcctagatgccttgctcatatcaagttcccttctattagtatttctcgctggaatatctcttgttccattggagcttgttatctcatcttgttcaccatggcaaaatgattcagaagtttcattttgattcttctcgatgttttcccgaactctaaactcagttcgtcttacattcctacgagcccttctctggaatcctcctttggaatccttatgagaaggctcaacaattgagccagtagatctcatgttaatgtctttaacagcatatccatatctcctcccccttctatcagagacaacaccaagagcctttggatcacccatggctctcccctccaaaccatattgagaagattctacattgttggacgtaggcctgtaattcctcttcaaagagagaccttgattcctcccacttggagttgtaccctcagcaaactctctgtccac

SEQ ID NO: 199526 - DNA, 444 bp, Zea Mays
aaatgatcaaagggatctccggagggcaaaagaagcgcctgacaacaggtgactgcatattactgccatttaagtatgctagcgctgtcagctgaaattagttattgcaaaatagcacgctcttttcagtgttcaagttgtgctaatattgtggtacttgcaggtgaattgctagttggttctgcccgcgtgctgttcatggatgagatatcgacaggccttgacagtgcaactacatatcagattatcaaatacctaaggaattcaacacatgctcttgacggaactacaatcatatccttgcttcagccagctccggaaacatatgagctatttgatgatgtcattcttatagccgaaggtcaaatcgtataccaaggtccacgtgaatatgcagttgacttttttggtgctatgggattcaggtgtccagaaagaaaaaac

SEQ ID NO: 199527 - DNA, 345 bp, Zea Mays
gtcctacgagccgggtgacgcacgcgtgcccgcggtggcgcaggagatggaggaacgggccgccttcctcgacgacgttcgctaccgtctccatcaggcgcaagaatcccagaaacgcgcctacgatcagcatcacaggcaggtcgtctacaacgtcggtgactgggcccttcttcgtctccgtcaacgaccatcggcatccctgccacgttccaccacaggcaagttgaagccccgctacgtcggcccctaccgtgtcaaggagatcatcaacgaggcagctgtacgcctacagcttccatccgacgccaaaatccacgacgtcttccatgtgggcatccttaa

SEQ ID NO: 199528 - DNA, 343 bp, Zea Mays
gccgatccccgacacgcccctgtacagcggccgcgacatgcctgctgctgcggatggatctcacgaggcgcaccagtgccgcatggagcgcgacacgcgggccgccacgccactgggccgcagcagcgagcaattccgcgatggcctgcgctgctgccgccgccgccgccgccgctccactgagcgctagcgctattgcgtcctcgccattacacgagtaatggggagagagaaggtagcagcagcagtacagtaccagaccaaagtagcaatcgagtgaggcccttcggcgtttccctccagaatcccttcgccgttttacccacgcgtcacaggacagaac

SEQ ID NO: 199529 - DNA, 369 bp, Zea Mays
ttcaaaacaatagatcaccttttaaacctcaaatgacgtttctatgatattgagggcattgtattcacacgagacggtattagagtacaactagtggatgaagacgttattgggctagcaaatgaccttttgtgatagcaggattcctataatcccctctatttaacgcatacctagatggtatttgtgtccactcaagtaaaacaccgcacatcattatgccacatcgtttctcaaaataaaataaagaccatggaaaatttagccaaattgcgtgagagaactttccaaacataggttaaggttgtaaggcaccttttttccaccatacagttgctaaaaagcaagaatataaagaattcaaaacaa

SEQ ID NO: 199530 - DNA, 247 bp, Zea Mays
aatatgactcatgacataaaggagcgctactttaggttcctactgcattttcttggtgcaattggcttgattatcacacattgtattatttttgagtttgctatctatagacaagttttgtttcctgacaggggaaaaagcttttctgatgttttttgcaccatgactaatagtgactgcagccttatatgcccttgcaagcaacaataacattttgaacctcgacaactttcctgcaattgataga

SEQ ID NO: 199531 - DNA, 503 bp, Zea Mays
cctctgagtcgataactctccaatatccatctttggattcaaaaaagattcttcctgagccagggtcatttggtgatgctgaagttgtaaactgccaatacctgtttcgccgccgatcctgacctaggggcaaggatctgtaaacataaagctgctctgcccggtgaccaatgtacgatttcaactgagatcgccttttatcagcataagcatactgctgaacatacgaagtatctggggttgcgaggatttcctggcatacgccatttctctcataaggtagactaccagcattaccctgattatgctgatcaagcatctcacaattgttgattgtcccgacatgttcatcattctctctataagcatcacacgctggagttgaagtaatctctgtcacgttgttttcttgatatatatcaggcttcaaacccatgtcagagttatattgtactctgctagtaaattcttccttgaaacgcctcttgtcaagttgcgcttct

SEQ ID NO: 199532 - DNA, 631 bp, Zea Mays
gcatccagctggcaaccaagctccctccccgaccgcctataaaaggaccgcccaaagcccctattcacctcgcaccactcaccatccctcctccctgagctcaatctgtgcccacgcggccaccctcccccaactttggtgagatctccatatcctcctccagccgtccagagctcaatcaagctagcgcacaagcttcactgcttcctcatgaccacaatgcacctctcctcacccccaatcaaccaccaccacctcgtcagcagcattaccatcacggtgaccctccaccccaccgtggctggccctccctagcttgcctccggccaaattgagtctggccccatgatcacccacctctccttgtgctagcacacctccccattgcccgggaaccagagcaacgacggagaaccgtcatgaacctcaccggcggccggttcgccctccccccatcaataactgctaagcgccgtttccctccccctccttctaacacgtgggcctagccccttcacgcaatcgcccattgttcccttccccgtgggcaagctaggccttgtgctcgcaccgcacctcgcccagctggcccgaattgctcccgccaggcccactagccaagaaactcctt

SEQ ID NO: 199533 - DNA, 429 bp, Zea Mays
aaaccatcgggcccaggaggcttgtccatcagaagttcccggatagtgacccaaacttcttcattggagaatggttcatcaagctcggaaagatcatggtgttgcagccccaaggactgtaaatccaaagtgaaatctctttgctcagctgaaccaagaaacatatcaaaataatcatgagctgcttgctgcttgtcctcctgacctgtgaccagctgatcttcaacattgaatttagcaataaaattctttttcttgtggtcacatgcctgctgatgaaagaaagaggtattggcgtcaccttcccggaggtaaagaatgtgggacctcaatcttgcgaccgtgccctcgagggaagccaagccaagggaatgcatctttaatttctgtctgaaaacttcttcaccggtcgagagagcccgattatct

SEQ ID NO: 199534 - DNA, 508 bp, Zea Mays
ggcgactagtgctggatcagttatgtgtgcttggcgcaggttgttgatgaaggagaatcgaggtgccaccatggtgaatgccaaaactgcttccatgttgcggcgggagagggcgtcggcgacgatgttggtgctgcccggtttgtactcgacctcgaagtcgaatcccagtagcttgcccacccaatgatgttgagggatggttgccagacgttggtcaaggaggaacttgaggttgtagtggtcggtgcggacgcggaaatgcctgccccacaggtatggccgccaatggcgaacagcctgtacgaggccaatgagttccctctcgtatgccgcaagggaagcatgttgaggggccaccgacctaatgtagaatgccaggggtctcttgtattgtagcaacacggttctaaacttgtaggaggaggtgtcgcactcgacgatgaagatcttgatgaagtccgacaaggccagcacgggggcggtggtgagtgccgccttgagcgct

SEQ ID NO: 199535 - DNA, 409 bp, Zea Mays
cccgccagccatctcccaatcatcttcccatggtcgacacctctagatcgacatccccgccgacacgaccatccctggtgcgatcgtgcggcccgagccaccgtcggctctgttaacggcgcagacacctccaactctagaggcgactgcgtgcacgctcgatcagccctcgtctccctcctcggctccttcctcatcgtcgtgcgctcccaccaagaccacatcccctgcgctcggcacctcccctctgctccagactgacgccacaccctgtaccccgacacctcccctctacactaggccgacgcgcgcgcctagggctctccactgcttctcccagcaagaccacgccctctccccacctgcgatgagctctcctcctgtgaagttctctccaccgcgtcaagca

SEQ ID NO: 199536 - DNA, 277 bp, Zea Mays
gaatttggaatctctacaagcactagcacaagagctgagggatggcaatgttgagctgaaagagattgtcaagaaccatgagagcattgaacttgtgcatatcgataacctaagaaagttggagaggatgtcagagacaaatgcacatttagagaagtctttgtcagctgcaacaactgagcttgagggactgagggagagcaaggtggcattagaagaatcatgcatgcacttcagatccacgattaacactcatcagtctgagcgagctgtgctt

SEQ ID NO: 199537 - DNA, 451 bp, Zea Mays
tttattttgaagctgtccttattaatctgcatgcctcatctgatggctcaggtccactatttgcgctgatatccagcaagaactctttcttgacatacataccttcattgagcaaaattgttttgttactgaaattgtaggtacttgagcatatgtgcatcgtattctttatggtcccaaatacccaaattttcttttaggacccctactaatgtttaatctagtttctggtttgcttctaattttactttctgtggtataacccctagtccacttactggttcagttatgcattattagtataaggctgttgactgcattgtttatgaaagtcaagaaaggatgttagtgcttctgtgcatgccaaaagaaaatctctctgaacaaacttggcttctatgtgcttattgtttgaccatttctgtcgtggactagcagtagtgccttatat

SEQ ID NO: 199538 - DNA, 306 bp, Zea Mays
ctctccgtctagattatgtttttgctttgtagggcgtgatgcgaatgctctctggtgcagcgacataggttttgtaggggcggttaactggaattatgataacctaaatcattatcgcattatgagctctgtttatattttacggtgaactcttctttgcatgaacattgtgctgtgcatcatttgttaaacaacttccatatgctgtggttatgtcaagaacataaaagttacttcatattcgttatttttgcattggaatgcccattatacatggttaagtaagtgttaataagacaaatctac

SEQ ID NO: 199539 - DNA, 310 bp, Zea Mays
tataatcccaaacaaacaccaccttacccctataatctaggttcataacagttagagtgtgtgttcctatatgtatccgtacacgggctggcactactgttgggctgtcggtccattaggttagggtttaccctgggtcatatatgtatccatctcctatgcaatacaacaaacactccacaatcttacatggtatcagctaggttagggttttctccatgaccccacatccgccgccagacgcctgtctaggtctggccgccaccgacttctgcaccgccgcctcgggaggctcatccttccctcccgg

SEQ ID NO: 199540 - DNA, 1082 bp, Zea Mays
cccgccgcctcctgctcctctcgtcggccgcggcacaaggtgcgtccccttgccacctcgcggctttttgtggcagtggttggttccgaggcatgtgcccgcgtgatgtggcaccggtttcgagcgccgcccgcccgatccgcgccgccggctgctcgatctggccgccgcacgcgtcgatctgcgtggccgcgcgtcaagcgtttgggatttagggtttcagagttcagcttgattctacgcacccgaggctgctcaccggtgtatctctgcttctgctgatcgattttgattagagctgggctcgagtcacgtccctcacctgaaaattttaatccatttggcattcaaatgatcacccctaacaaaaagcattagaaattgattagattctagttggattgccctctttatggcacggcatattgatcactggccacgttctgaattgacttcgttgcatgaactgcaggagtgatactgagcctgtgagaggtattccatataatgccataatctgggatggcattcttcagcaactccgggagcaaggctgattcaggagggtacaacctgaatgaaaaggccgaagatgagggcatctacgagtcagttcaggatgggaatgttgacctgagttctaggcagtggaacttaaatgagaaagcagatgatgcttaccattgtgaagcagagcaatatgaggcgggccagtcaggtttgtactcttctgagaaggcatcagggcagcatatccagaaaggaggcagatcttctggtggtccatggggcacaaattttctgaaggattccaggtccaaacagatggccgaggatgttccatcgaatagtggtagaggaatgaatgctgctagcttgcatgatggcttggatgatagtggagaggatgatgagctgaacagggcaaatggtgaggtgcctgctgaggaaatgctctccgatgactattatgagcaggacggagaggagcagattgaatcgttgcatcgtggcgggacgaagcaatcaagctgttccacttctggtggggcagcaaaatctggctcacgacaaatgaaggc

SEQ ID NO: 199541 - DNA, 1852 bp, Zea Mays
aatatacacttttttcatgtttatgacagaagtgttgtacactgggaggcctaacagtagcatgggtcaatctttacgagaccttgagaacgaccatgcagatttccagttgacaccacatgatccccattctgtggttggagaagctaatttgccgcagcataatgtcccaagggacagcgatctgagtcctcttggcttactttggtctgagctggaagggcatccaaaacaacctctctcatcaaatgtacttggtgtaaatgaacgtagaaactccaagcctacaacacccaaggacattctacctgtaaacatgagacaagggccacttagcaggatgaatgaagtttctagtgtgcgtgatgagtggcctgcaaactttggacggctggacaatatgaatggccctaacatttctggcagaatccctcaggttgaagctgagcatcatttgaattttgatgggcacctcctgcttcagcagatcagacgggagcaacagcaacatcaacagcgacaggagcaattgatggcccgtagtaatttagagttttctggtgcatttcccgggcaggtgtttgattctttgcaccaacaccgacagcctatgaatcaacagcttcctgatgtagagcatcttttgagagtccagtttgaacttgagcaacagcagcaacaccaactccaacaagagcagcaccaacggcagctacagcagcaacgacaagcccagtttttgcaacgacagcaacagcagcagcagcaacagatgattcttgagcaattgttgcagcagcagctgcagggttctaattttggaccaacaaatatggttgatcaagtcttacttcgtgaacatgtatttaatgaactgcaccagcagcctcaccatttgcaaaggcagcatgatgcagctattgaacaacttattcaagccaaatttggtcacgggcttcatagggagcaccataatgatatgttggatgttctctcacgttcaaatcagagacaaatgcttcctttagagcagcaaattcttttaggccttcagcatgagcatgaacaacaacttcagtcccaacaattggcaaatgctctgcggcaacattcaggcagggaagaagaaatgcacttaagtggggtctggccaatggatgatgctgcccagtttatccgctcaggaaccagtccaaatcagagacacggttgtttcgatctcctggagaaccttcagagatcgtcatcgtttgatcatcatgaccatctagaccgcagcttatcgttacaggaacgattgcatatgggtggtctaggtattcactccctagaacgatctgattctttgcctggtggtggtcctggaccaaacacagatgtcataaatgccctatcacgccatcatggacttgggcagttggaaacacatggtgatgtataccctttgggtcaaatgcctatgcttccttcaggtgttcatcctcagcaacataggcatcaggaacagcttcctggttctcacataggaaggcgtgaaaggcactggtcagatgccaatggtcagttgcaaaatagtctaatgcaatcttcacacatcaaccagttgcagatggaagtggagaagcagaggaggaatgtggaaatgaacctttctgttgacaatccacatgcatgggcagccctaatgaataaagagaggaatgcagaacaagatttgagtgatatgattcacaagaaacttgcccttcaatcgcagcagtcccttggttttcctgatgtttctgttgcggcatcatttgggcataaagatcactttgtgcaacctgttgcggagaaccctctgaaatcagtg

SEQ ID NO: 199542 - DNA, 354 bp, Zea Mays
cgacaccgcggccgcaatagttgaatacgtttcatcatcatcaaccattttttatacatcatcatcatcatcaaccatttttttgataggtcatcatcatcaaccatttttaatcgcactctctcgggcggccttaccaaactccctgcatcttcttgcctagaagtgcagtacttgaatgaccaatcgtgcagctgctgcgatactactctccttgcccacactgcgtcgcaatggtgcaccgatctcctgctccagaagctaccaccgctctgtgcttggcactgctacttcttctctttccctgaaccagctccaccgccaccaccataggcggcgctccaaacacggtgg

SEQ ID NO: 199543 - DNA, 311 bp, Zea Mays
ccccaggacgcctcgtcttaaagcatgtgcgtcgagcgaagatggagcagagaatgccgatgttggggatcttcaccctcatcggcaagttggccgtagtcggtggccaggaaacttctttggctcgcccctcacctgtgcgtggacttattgaacagagataatcttctgagcgtgaccaattgctcaacagagtgatggctccaccacggaaggacccactaccacaaacccgcttcactacctcaccatcaccagtaatacgtttgtccttgcattcgccattatctcctcgtcgtgtagcaataagc

SEQ ID NO: 199544 - DNA, 285 bp, Zea Mays
cgtcgccgtgcgacaggctgctggccaaacgcgcgcgcgatagccgaggggaggaggacgtagaggaggggtaagccggctgcggaattcaccatgaccaataacttcctcacgacgataaagagcctgaagctgatcgagggttgcaaagccgcacaattatacgccttaagctccgttggggcagcctccacgtccggctcgggggatgccggagggagcagcaacggcaagccccagcctcctccgccgccaaagaccatctcgatgcggtccggatcgctg

SEQ ID NO: 199545 - DNA, 399 bp, Zea Mays
gtcgccgtgcatggctagcaagcgatccaaagccccaactctaccgcaaaacctagctacacgatgaagagaccgtagagagctgggttgcggtgccttaccaaagaatacggtgatgaccggtccggtccgtggcgtggcgtcgactacctactccggtgagaaatccttctcggctctgggctccccatgctccgatgaagccacgagcacgcgctacgctttgcggcaaacatcgcacggggatcagatgggctcggttggtgccgaccatgtgcgtcgacaacggcggccattccacgttctctccctccccgagtgtggcaatggcgagataggtaatgaaggagctgtggtggttttgagtgtaatggagagaacgttgcgccgcataagtac

SEQ ID NO: 199546 - DNA, 382 bp, Zea Mays
agcaccttaccagcgtagacgagagatttgcaaaatacagcaacactctgttcagggagactagccttgaggtgaaccgcgaacagttgactcccaaggagaacgacaaactcaacaagtctatctccacctaccttcgccttctagctggctatttgcatcttccctctgccctcaagacccttgaataccttatccgcagatacctgtatgaatttagctcagctaattttgccgatggccctacgagctctagcttattctcttgtttctggtgggaaccttcatgtagggtgcatgtatacaattcggatgagttgctgctgagcgcactgccataccatgatacacatgcgtttgttcggatcgtgcagttggtcaa

SEQ ID NO: 199547 - DNA, 434 bp, Zea Mays
aggttatggaaatcatgaggacagcgtgaaggtattcctttccctcttgcatggtatttatttaggatcaatcacaaaagacccaacaaatattcatcagagtgctttctgtttatttcaaactgaattagtttaggctgggaaagcagtaactttagggttgcttggcaagaaatgtgaccttttggtgaacccgaaacccatgatcgtcccatcatggactgaggccggcgtacgatatatggtggcaaaaaatctaggaaaattcataaccattggtaacttcaggtgaggctgcttcaattctatgaactcgatcgtatatatactacaaattaaaatccctgataatatgcatatatgattctcactcacgtccgtcttctgcacagcatgctcgaagatggaggcacttctcttagttttggcaaaac

SEQ ID NO: 199548 - DNA, 382 bp, Zea Mays
caaaatatctaaaataaccaatacctttctcctcccctcacttttcccacccggccaccccgcgctcaaccgctcccacagccgaagccgccgctgtcgcttttacaggctcctagactctgtttatcgctgcccaggcagcggttctcgctgctgatgcgctgcttgagtcgagcgcccagtcggcggcatcctcccacgagccccgtcgatttatcgccagaagctggtggtttaccacgattggagaaggtaaaccatgttttagttccggtaaaccggattcaatacccatatttagttctatactacgtatttattgctcagatttagttttgtggcgtttagggttttagatttcgtctcgataatatgttttcgg

SEQ ID NO: 199549 - DNA, 457 bp, Zea Mays
ctgtgagggacgggcgaccttttcccgtgcgtgcgtggtacggttgctgaacttcatccgtgagtttgtgtggccgaatgttttttcatcgattgtcctatgtgattgagttagtaggtgtctttaggattacgattggatatttggattggatggaacaggggtaggttttcttcaattttgagcggcggagcctgcactgaagactgaagctgcttgagtcacgcctgttccgacgatttttgcagaaatcgcccagcctacgggactgattgggcttgaagttgtggcgcgtacgagagatgcctcatgccagagcttctgttattagagactgaagttctgcaagcgcgtgctgctgctctggagttttagcagctgtgttgagtggttgggagccatggagtcacggatggatcagtacgaggttttggagcagattggtcgcggcgccttt

SEQ ID NO: 199550 - DNA, 483 bp, Zea Mays
tcaagccaacatcatattcttacacgtcttcgaatgcatgggcataaatcacagcctgctccagccaaccgacaaccccctgtacggcttcggaggaaaaggaactttcccgggcaaaatagaattgccacagtcccttggcaacaccaaatgcaagaagcgagcaggtagccttcggcatagttgatatggtctacccatacaacgccatcatgggtagagggtctacaaacaaactagaagcaaccatccacgctgtgcatgaagattccaggtccccagggtgtaataaccatatatggagaccagcaggtcgcccacaataacgagagatactttgtccctggacagtgcaacgtgcattgcctcaccaccgacaacgaagatccaataagctgtgacggaacctcccaaggtattaggcctacctacagatgtccttgccctaaggacctcagacagtcatgcaggtgtgcataatga

SEQ ID NO: 199551 - DNA, 374 bp, Zea Mays
ggctgtggtgggggtatggtaggtgacggggctggctgggagtgcatggatcgcaggagaaaatcctgcatggctgccattgaccaggacagatcgtggaccgctgtggccacagattccagcgtgagtattggcggatgtgtggtggaaactggcggcgagatggtggtggacggccctggaacagtggaaggcgatggtggcggtgggtggctggtgaatggaggatcgctggacatagctgataccaggttgataggatttctattcctaccagggatctccctcaagctgtactggtgtactgctggaggttggcgggggactgggcgagagggacgccgggacgccgtgttcacggcgtgggaaaacag

SEQ ID NO: 199552 - DNA, 379 bp, Zea Mays
ttttaatccgtaatgaggagcttcacgagttagacaccccgttcactaagttggagattgacaacattataaaatcattaccttcggataaatctcctggtcctgatggtttcaataccaacttcattaagaaatgttggcatatcattgctcaagacttctatgatctctgtgaaaaattctatcatgatgaagtttgcctaagaagtattaatgggtccttcattgttttgatcccgaagaaggagaatccgtagaaggtgggagattataggccaatttcgttattaaacaatagtatgcaaatcctaacgaagcttttggcaaatcgtctatagccgttcatgtcttgtttaattcataggaaccaatatggttt

SEQ ID NO: 199553 - DNA, 365 bp, Zea Mays
gactagcagttcagtctgtgcggagggccgaagtaacaagctgagatgaagggtgccgtgcacataacaaagaatgcgctttagagctgcaaggtgaggctcacgtgggtcgtgcatatgaaggcatatctgctggactgcgtaagagatgtcaggtcgtgtgaaagtgagatactggagagcccctgcaagactgcggaaatctgtaggatcaatcactggattaccaatagtgcagacagcttgggattgacatcaacaggggtggaacagggcttgcattcagccatgccagcgcggtcagggatgtcaatcatgtactgacgttgagataaaaacaaaccagctgtcgtgtgttggacctg

SEQ ID NO: 199554 - DNA, 394 bp, Zea Mays
caaaagtcaacaaataagtatttctttagtagagatcaagggccatgagtataagaggcaggctccataaaagttttaataaactcttatgcggcctacaaccacgacctttgactctcgtattactctgactgtagataaccaaactcacacaagagtaatcttagagagcggggctaaaatgagaagtgtgaaatactaaaagaccttgaaaaagttagcacactcattaacaaatggccagatttttaccagttcttgattgaggcacttaaattgtacaggttaaaaacaatgagtataagtgggaggtggatccgagcacgaggctacagacgccggactccgcctcatatatcaccagcagctccgcgatgttgtacccttccagaac

SEQ ID NO: 199555 - DNA, 484 bp, Zea Mays
gaaaatttggattttaggcgcttgaatcgagtactcattttgattgatacgattttgagttttcccccttttgcgtgagtaatagtgtttccccttcgaagctcaatagttgctggtttatctgtttttacttcaagttacctgcatccagtagaagcttgtggagtattaatcccgctttgagtgctcgtcgaattgtgctccataacctgttagctattgaccttacaggactgcactgattgatgagactaaagcttttgctatatgttttgtttcaataggtgggagtaatctgtatttgtggagctttgcttggtgctgaaaattgtgcaaacatgagatggcttcagcatatagcgtgctagaagcgggcaccgtgcaactgaacccatccttcttgtagccagattccttattccaatgatgcagtggttggtaggttgcagtagatgactaccggtgatcccttgctcctgtcatc

SEQ ID NO: 199556 - DNA, 319 bp, Zea Mays
gacaaataaccttcgttagaaaatattttcgttaccacaaataataagagttagacacaagatgtttaccttaaaattagaatagaacaagttgccgacaatgtgctgtcgtcggtagcggcttatatccgcttcgagctttgggaagccgatactctttgatagagtaccgacaactttcgcaccggtttgatctcgtatgcagcctaacccttcatcatcaataccaccgaagagaagtgcccccggccgatacccgcaagatatagcatactcttttaattcctcttttttagcttatgttagcttctggccaatt

SEQ ID NO: 199557 - DNA, 349 bp, Zea Mays
gcaacagtaaaggagctgcgtagtttcttggggctgtcggggtattaccgtaaatttgtaccccattatggtgtcatttgcaagccactcaatgaccttcttcgtaaaggggaattgtttgtttggactcagcatcatgatcaggcattccaagccctcaaacaggcgctgtgtgcagcaccagttgttgccttgcccgacttccgtcgcccatttgtggtggaaaccgatgcatcagcaacccgtattggagtagttctcatacaaaatggccatcctctcgcttatcttagtaaggcattgggtccccgctctcaaggtctctcaacatatgaaaaagaatatctag

SEQ ID NO: 199558 - DNA, 389 bp, Zea Mays
cctacctcggccacatcatctcagcggcaggcgtggccatggacctggccaaggtagcggccatttacgactggccaccgcctcgctccgtccaggccgtgcggggcttcctaggcctcgcaggatactaccgccgattcgtgaacaactacgacacgatggctgccccccctcacgaccctcctcaagaaggacgacttcgtctgggatgacgcgacgaaggtcgccttcacggcgctcaaggcggccgtcacgtctaccctccgtcctcgccatgtcggacttcgccaagctattcgttgtcgagtgcgacgcgtcatcgtccgggtttggcgcggtacttgtccaggaaggacacccagtgccttcttcagccgaccggtcgcgcc

SEQ ID NO: 199559 - DNA, 425 bp, Zea Mays
gtactatgttcagtcgtccggatttgaagaccctgcacacgccgacctcgtttgtcgtctgaacaagtccctctacggattgaagcaggctcctcgcgcatggttcagtcggttttccacatacttgctcacccttggatttgttgaggccaagtctgacacatcactctttgtcttccggagtggatctgacgctgcctatttgctgctatatgttgatgacatcgtcctcaccgcttcctcgcctgcccttctgtgtcggatcatttcagccctacaacaggagttctccatgaaggatctcgatgtgctacatcacatctttggtttgcatgttcatccctcaggcgatggtcttctctcttagaagcaatacatggtggaactacttgatcgcgcaggaatgtcaaagtgcaagccttgtc

SEQ ID NO: 199560 - DNA, 522 bp, Zea Mays
cagagactacaaaagagtttgagactagatggcaagcttggataacaacatatcacttagagaataatgaatggttggttggacggtatcacatccgtgagtcatggattccagcttattttagaggcatttctcttggcggcattcttcgaacaacgtcaaggtcagagagtgcaaattcatttttcaactggtttattggtcgtaagcttgcactaattgagttttggatacgattcgacaccgcattgaaatgccaacgacaagaggaactgctagatgacaatacttctctgcattcgcacccaaagttatatacatcatgggatttagagagccatggtgcttctgtttttacgcctaaggtttttataaaattccaagaggaggtcttggcagcaagagagcattgtgatgtgcaacgcacgaatgaaatggccgatagaaaaattgtttatatagcgggcaagtctgacagagtcagagaggtgatttgctttaatgatgatcggctatataagt

SEQ ID NO: 199561 - DNA, 300 bp, Zea Mays
tgttttgggtacggcggcgggattgcccccatggcggtgccattgctgaccatggggatttccaaatttaacgtcctacgaccctaaccaatcgcgaaacacgtagtgcggatcaattgaagataggagagccaatactcaccgaggatggcatgcgcaggagtttggcccgcggcggactttgggttggcgccggtgcgagagctctgaagagaaattcccaggtgactttccaccatcgatgcctgcaacctccacacacgtgttcgggatgctccggcgatggcccccgacctcttc

SEQ ID NO: 199562 - DNA, 387 bp, Zea Mays
gttagacgctgcacttggtataaaaatatatgcaaaatattccttcgtttttgcaaataggtgtaatgtaagtatatgttaattgtacatgttacagtaaatcgagaaataatgacccctacatgatctatgtgttacaggctgcatttcggaggcatgataaggtctgctaatgtgcaatgtaagtttgtgcataaaaacaggagcacaagtgcataaccttggtataagcaaaatgatatttgtttagccatgtgttattttgtgttaagcatatgctcttttgtcgatgcaagtctgcaattaggggatgcgagttacagtgttgacctttgcaattaggggatctcaactatgatgtcccaacctacagtgttgacctttgca

SEQ ID NO: 199563 - DNA, 757 bp, Zea Mays
atcaagcagaagagtctgaacatcaaactgagaaatgaaagattgatcgccatctctcatatgtcctacaaactccagtagctctggtgatgcccattttgtgtttgctggcaagggcactgattcatttggtacttttgtgtctactggcaagggtacccatccatttggtacttttgtgtctactggcaatggcactcgttcatttgtcacttctgtgggaacgctctcagtatttgtaattggaagctcgaccttttttgcaggaacactacaatctttatttaccttccggcatttttgaccctttttccttgaattagttcgccttcgttttcctgaggagcagtcagtaccagcatcatcatcattattagcgtcatacaggtcatcagacgactcatctttttctttcctagcagaagtgctaggaacattccatctagtcttggcaatagtaagttcttccaatgttaatgaaagcttccctttcagatctaaccaatatagcttgaacaggtactcccagctgagtatgtcatcaaaatcaacctgcaatagacacataacatgaaaacgaaagggtcaattgagcatatagggcagtgcaaggcatggaccatatgaggttcggcgctaagcaggacactgcggcttgtgggcaagataggcaaataatatgtgaaatattaatctcccaaaagaacagtagcgagtgaatgaccaacatgctaaaaaggtctgtaggtaaataaca

SEQ ID NO: 199564 - DNA, 410 bp, Zea Mays
ctaggccgaatgatacctaatttcagcaacctaattctcaattccatctttgagaggagggtacctataagggcgtatattcactggcctagcacccggcaccaatggaatcacatgatcacaagctcttacaggtggcagaaaagtcggcttagaaaataccagagcaaaatcatctaacagcttggacacctcaggttgtaatgtttgttctgacgtgtctgtaagctgaaatgtgaagcaggatagtagctggctcctcctgactggtgccttgtaacaataccggtgctccttgatactgaattaatacccacttgtgtttccaagccaatccatacccaaaatgaggtcaaaggtaggcagaggcaataccttgaggtccagagaaaactcacggtgctggatag

SEQ ID NO: 199565 - DNA, 316 bp, Zea Mays
ttttgtaggctcacttaatgggatcatattgggggcagattgagcatcaggcacggttggcacgacctcaacaccacgatcatagttttcatcttcagggcgagaggcaactaacaaacgtcgtaccactacctccatgacttgcttttgtgtcttcatagctgatttaacataattatcccactctcactgacactcaattgggatgataagtctttgcacgttgggcagaggacctacgtttagcaccccatcaacgacaatgtcgtcagcatcatgacaacaaatcttctccttagccttagcaactacctca

SEQ ID NO: 199566 - DNA, 804 bp, Zea Mays
agcttgtcataggctctcaagtttttctgatcggtctcagtttttccaatttttcaagtggatataccaggtatgatgtcattgttcaacataacttggaaatatatttcgattacttatttatgcactgattatgtttttactaatttgttttcaggagcgatattatgttgggcggggactttatgagagtattagtgattatgccaggttctttcttttaccttaacgatttctgttatattatcatattgtggcacccttagtttattatgaactgtccaggttaacatctggagcagattttttttttaattttcaaatcttcacttcagaataccgatatctatctctatatgaaacctgtaaatattttcttgagtattgcatgtgaactagattttggttgaaaattaccaaggaattctgcttgtagtttcttttgtttcagggttggtacatgtgtcacttatcgcgaagcctacgaaattactaatttggaattgcgttaaaatagcttgacatacccttgttggttcatttacatgttgatgttaacagttagtggcaattgctcagtgtgattacttccagcctttaacagttactggcaattgaccaagatattaccatttagtagatttttgattacttgccataccgtcatttatatactcaccagacatcagttctctgaatagtgactagttctcacttattgttttcaagtgtgttgtgttatatgtttgtgacaattttttcttaagcagatacgtgatattttgggtcgtcatactggcatgc

SEQ ID NO: 199567 - DNA, 291 bp, Zea Mays
gatttgtggtaatgccgcatgatgattatgaaatttgtttgcgggatatggaagtcatcccctgaattatataggcacgagtatgctgcaccggcttaagccaccactgactttagccgatagctccgttattagggcatagtggtcaccccgagttaagcaagcgtgagcatgttgcaccgccttaagtcgttgccggcttaagtcgattgctccatttgtagggcatagtggtcaccccgagtaagtgtgagcatgttgcaccgccttaagtcgttgccaacttaagtc

SEQ ID NO: 199568 - DNA, 369 bp, Zea Mays
attcaacatatggtcttgttatggaggtacgttaatcttgatgttgcatttgagtatgagtatgtgactcagctctcgtgcattccatctcagacccagctgtggtggtcctgattgacgcttctgcaaaccttttgttattgcctgaccataattaagcagctcattccgattgaaatgcactgattcatgttatctgttctccatttatgtcgtctgtttttcacagtagcattatactttcaagtttttttgcattgctctttatgtggcataatcccttctgtctattctaactttctggtactgcaggtaatgcttgtctgtggaaagtacaatttggtttatgagttcttcaataaggtggat

SEQ ID NO: 199569 - DNA, 325 bp, Zea Mays
ggaacacgtcggcgatgccccgccgtggtgtgctctgcgccgccggtgggtcagccgatggggagaagaagctgggtgggccgttggatcggcaatggatgggcgaggggtcgcggaccggtgatccatccgtgaacggtcgagattaaaacgtcgacaccgtttcgagttgatcgcttccacaccattgatcttcacgtctagggtcgggatcgagtccatgttactttgaatcgccaccctcggttccggatctatgggttcatataagcatactacggtgatctaatcggggtcgttcaattctggtcgggtggctgataat

SEQ ID NO: 199570 - DNA, 346 bp, Zea Mays
ggactacctcgtttcctgctgagggattgtcagctgttgtgccaacactccctgtggcctcgggggcagggtcggatgttggtctggattctgcggattattcacgtttggaatgttcggccatgatgaattgctcccgcatggggtctgctgcgccattggttcggcctgatatctttcctggaccctcttgccctcgatactgcaagcccattctggtttattctaggagggaccagagtctgcaacatgatcttgattcattggctgataagtctgcccctaccagtggtaatgtcaatgtctgtgatgttgttaattccatgtcttcggaactgcattcccc

SEQ ID NO: 199571 - DNA, 360 bp, Zea Mays
ctctcttgcaccgtgttatgcccgtggtcgccagcgatgatcgccgaggacatgagcgccaataaatctgtcgccgtcagagagacaaaatcgaggtatgtgtgtgatgttgtatttcagatattcagtgtccaacacagagttcgattacagcttttatccctcacacacgccacggcccacacgacccaacaccattacaagatacggcccacacttatttattgtgccccatccggcacgccagccttgtcaccatctttaggcatcacctcccgcactaccggctctcgcttcttcctccctcgccttgctctccctggttgtcaggcgtgacatctgctccctcctgagtgcttg

SEQ ID NO: 199572 - DNA, 552 bp, Zea Mays
aaacttcagtacaaaatcttgagaatgaggtgatacgactgaaagaggagctttctgtccagctagaaaacaattccaccttggacaagcagtttgaagaagccaggagcaatctgcatgctgaaatttcagagctacgtgcagataagaacacatctctattgaaattacagacgtctcaggattctgtcaggaatcttgagattgtggttgaaaagcaaactgagaacatttcaactctacagcaagctaatgatgagttacagaagaacatctacactttgacggagcaatcacaacgagacaaggcggagatgcaggatgagttgaaggcaatacaagaagataaggatgcagtgctaacacaactgaagcagtcagagacttcagtacaaaatctagaggatgagttgacacgactgaaagaggagctttccgtccagctagaaaacaattccaccttggacaagcagtttgcagaagccaggagcaatctgcatgctgaaatttcagacctacatacagagaaggacacatctctacgggaattac

SEQ ID NO: 199573 - DNA, 832 bp, Zea Mays
tgacagcgattgattttgggaaccaatttggtaatcagtacaatggagtgcaacagagaagaagccttgaaagccagggaaattgctgttaagaagttggaaagcagagattttgttggtgctaaaaggattgcccttaaagcacagaggattttcccagagatagagaacataccccagctgttaactgtctgtgaagtacattgtgcagcagaagcaaaagtaaatggaatgttggatttttatggaattctccaagtagaaggaacagcagatgaggtgaccataaagaagcaatatcgtaagcttgtcctctcacttcaccctgataaaaacagttatgctggtgcagaatctgctttcaagtttgttgcagaagcatactcaacattgtctgatcgaaccaaacgatatgcatatgatgtcaaatggagggctgctcccaaagttgcaccaaagcaggctacacagccgacacaaccaaatcaggctacacaacagaaacaggatgcaaaaccaaagcatgttgctaaaccaaagcaggctgcacagccaaagcaggctacacaaccaatgtggactacagagccaatcaacaaaaatagcacaaatagtagtgcagcaggatatggaccttggacattttggaccgtatgcattcactgtaaaacaaaatataagtaccatggtgacatactcaatcgtcagatccgctgtcagaattgcaggcagaatttctttgcacaccagacaagtacagaggatgtgccttctgcattctcatcaaaaacagcaaatagtgctgcgcagcaaggctgctctacaaatatct

SEQ ID NO: 199574 - DNA, 292 bp, Zea Mays
tctccctcaacgcgatcaagagggtttccttcagtgacactatgcaggtccgggtggccgtgggcaccgccgttttcacagcgctcctggactcagggtccacgcacaacttcattgctgaggacacgactctctgcaccgtgttgcccctgcaacgtcgtccacgcctcacgacaacggtgacaaatggcgaacgcgtcacctgcccaggcgtcatcagacagccccgctcaccatcgacaatgacacattgtacgtcaacctcttcatgatgctactcgccgaatacgac

SEQ ID NO: 199575 - DNA, 376 bp, Zea Mays
ctgtgatcgctggaagatttgggttgatcacttccttctttcttcttccttttcctgtcgcttttccccccctcttgttttatctcttgaaaaatcaagtctccgagcagcgagggagggtttataatttcgttctgtttttatgattctcctctaaatcatttgcggaatcatcttatatattacaaatatgatacaaagaacccctccctttataagggagagagtcgacggctccatcttgtttgtttcttaagaaacaatttgatgggtgcaaacctgctaaccagatatcgacgaatggtcggtgctagtggtactacggcaattgccaagaacttgatacgtggatccatgtgatagcgatgggcactgt

SEQ ID NO: 199576 - DNA, 318 bp, Zea Mays
gcctagacccgaacctctattttctcttgcaagatttgacggtgatgcaacctcaaagagattcatcagaagcataaggcaatacaattgcttatttgctttcacatcaatgggtgcacaaatagataattcagtcaatgatggtcgtggtccaccactatttaaaatatgtggacaagtgcatcatcggattggatctctattacctccagatggatcatcaccaaagttcattcagttgtacatttacgacactgccaatgaagttcaaaacagaatgaaatgcctaggagatgagatcaataaccaagataattt

SEQ ID NO: 199577 - DNA, 442 bp, Zea Mays
tgttggggggcttacaggggttggtggaagatcggaatgtaccaaccattcacatccaactgcttacgtcttggcaaaaaccggaccggcagcacctgggccacacacccttctctggtgaagccaagccgttcggaaatccaaagttcgtgggggacgtcaagatgatggttgacctctagaggcaggtgcgcaggcagcttagggactttggggcaaccaccgcttcttcggtggcgtaagggaagagcaagcaatttttgagggcatgatcgccgggaggcatccaggcctctaggtattgggtgttgttgccccctaccgtcttgatccatgctctcgtgggagccagaggacccctctccaccttgagactgactgcctttaggagacgaggagccaaaaggggagatggagccactgacgcgtccatagctaggat

SEQ ID NO: 199578 - DNA, 301 bp, Zea Mays
gatatcgaggaatggactcagatcgtcctcatcgagatcctcttgcgttatgtaatagccagacatgggttggtcaaggattctttactctttgcttcagatttaccgacagagattcatggcgttacagattcagatgctgttgctagcgtgcccacccaatctgattctatcgtcaatggggtttctgatactatatcaagcatcatgctgttccggcactacatcgaacaatgctcaggttcctctgatagagaaggcaataatttagaattatcgtctgtcaccgcaaacaacaacg

SEQ ID NO: 199579 - DNA, 828 bp, Zea Mays
gaagtactatgatgaagttgcacttcctaagctggtatgtattaataactgagattatgagttttatgacaaacccaagggaacaccttctcctgtggtcaagttttgtggcattacaagtgatagattttaggagggcaggtctggtgcaatagtgagagcgtcttactaaagtcaccaggtctcggattcggaaaagcctctctgcatttgcagggaaaagtttgccttgctttatctcttctcactcatgtggcagcctccgacattgggtccgccctagtgatagatttccatgggtgtaattttatatttatctttttagtcagaagcctaataactaatcaaagaatatattcaggttgctgattttggttctctggaactttcacctgttgacggtaggactttgactgatttcatgcataccagaggcttacagatgcgttctctaggacgagttgtaagtttcaaattctgttttatgtttgatagaatttccaatttctttgtaaatgctgactagataactatctgtataggtcaagctttcagagaagctttcacatgttcagtccctatgtgtgcatgagatgatagtgcgtgctttcaagcatatcgtccgttctgtgattgctgctatttcagacattcgacaattagcactaacaatagctgcagcgttgaacttattgcttggtgtccctgaatctgatgtctctggaagttctcctaatgtgcatcccctagtatggagatggctggtgatcttcttgaaaaagagatatgaatttgagctcacggagaaacattaccatgatgtgagga

SEQ ID NO: 199580 - DNA, 333 bp, Zea Mays
atctcccgcacttgtcgcgcggcttgaccgaactcatcctcgcccctgggtataaatccgtggccgcggcatcccctgggccattggcgagctgcatcaccgaacagagggttagagaaaggaagcgagatccaccgcgaacgaatcacgggtacgccatcgatagagactcgacagcgagtctgggagcttcgtcggttaccctgggacgcgttcgatgcggcaccggggtcgatggccaacctggtggcggggaatttctcgccgtcgcgcagcgacgccatgaatccgtcgtgcgccgtggccaagcttcatccgtacctcaatgccggt

SEQ ID NO: 199581 - DNA, 435 bp, Zea Mays
ataaccagtgagattcttgagactgttcttagcaacaaggtgatggacagagaaacacctgtgggatctgaagatgtgcttagttcaccaacctgtacacaaccttgtttgcaaaatgaccaaagtaaaagtgtagttacctttgcagcttctgttgaagcctgcattggtgcaaagcaggaaagcataaaacttgccaattccccaatgcatgacaccaagagtgcatattcatcctcggtaggaccttttctttgttctcatgaagttgtttatttttataatatgtacgattttgcagttgcaatctgtttaggttgatggaattttttatcccttccactctaatggttgtagtaatgttatactgtccattctagtgtccaacagggcgcatctcattcaagttgtatgattggaatcctgcagaatttc

SEQ ID NO: 199582 - DNA, 352 bp, Zea Mays
taaagaacttgcatccagtgccatggaacggattgatagcgtgaagaacagaacaagtaaagaaacaggatttgtcactgaagcttataacaatgatgcctttagtggtggtattactgaaaagggttttgcgcagttcagtaacagttctactcacataaagcccaatgcttctggccattgttcactacctgaatcaaaaactccaacaaatggaagtgatatcaactgcatcaagggctcttcggttaatagaggtgatgttagcttcacaaatggctcgtttgtcaataggcccatcaacaacaatgaaccaaatgtagctaggcttgaggtgatggagaagttgaat

SEQ ID NO: 199583 - DNA, 667 bp, Zea Mays
ggatgttgcccatggtcctagagatgagggtcaccactctagagattgtgccaaatctctatggtgtgtgatctgcagaaaggaaactcatgttaccgctaagtgtgtgtggcccaaacgaagcaaaccgataatgccaattgtcggtatggcagcagatggattgggattctatgcttctcaatatgcgaaaaatctggctaaaaaatctaagaaaaacatattaggtttggtaagggtgttggagggttatgtgtcggctgaggatctcgaaacggactttgggttccactttccttggggtcgggtgtggaaagccaccaaatgtcacatggggtttcttatgcagtttccctctcttgatagactagaagaattagtgaattttcctgaggtccgaatgaagatttcgggggtgaagattgtagttgctccttggaactcccaagcgacagcaaaagcaaggctccacactgcttggattcgtgctgaaaatgttccagaagagattcagaattaccaagcgatatgtgaattgggttctaccattggtgcggtggaagagattgatgtagaagctctggagacaaaggacattgttagattcaaagtgaatgtaaaaagtgtatcaatgattccctcggttatagaaattggtattaaacct

SEQ ID NO: 199584 - DNA, 625 bp, Zea Mays
gccctattgcattgcagctctatttgcgttgtctatctatactatatatatatcctccacgatccacacgtctcagcggcagcgctcagaggtcacagcacacagacagcattcattctttcttctccgtcagttccctccactgccttcttggagctgaagctctgcacccttctcctctccccacaattggatcacgccctatctgtccgtccatccggcctcaagattccacggcgctgcgcaaggtgaggctgtccctgctcttttttctcaccttctgttgtcaccttccacaaatctgttatggccgtcgtcggtccagtccacccatggtggaaagtgatagcaaatcccgcagagaatatgaatatggcgccatttctcctcttgccgctacgtacgtacgtaacatccaagattcattagattttgcatgcgctactagtacactactagatacagtacttcgacgtcatctgatggaagcatgagcaagaacttgatgcaagcgttgctcttctttctcctgctgctaattaaattcttcccttctcatactagcgtgcctcacgcaatgaatgccatgcaggaccttccatccattgccatgtcgtcaaaccag

SEQ ID NO: 199585 - DNA, 411 bp, Zea Mays
cccaaatgcccccttgagagcgagcgcacacacactctctctctcttcttcaacctcctccctctctctctctctcttccctgcattcttaggcttacatacatggcatacatggctcagcagctcgtcggccggatcacaatggaggtggcgccatcgaagctgccgtcgacgatggccaggtgtgctaggctcccgaggaacctcgacacgatcgcggaggacgacgacgacaaggaggcagcagccatggagtcgacaagggagctgcctctccgcaatgcgagccgcggcgcgcaggtcgtcgtcgtcgacgcccctgtgcactgcgccgacaagctggcctgctacctcgcccccatggcgaagacgaccgagtgcctcaagatcaaagcctaagtttgtcaggac

SEQ ID NO: 199586 - DNA, 524 bp, Zea Mays
gggccgcaatatgatagtcgctaacacctttggatcattcgctttgttggttgttatgatccttggaggattcatcataaccaaaggtcgagcctctctattttcttattgataacagttcaagattatatgtacctaatgttccctcgataactaacagaaagcataccagtatggtggatatggggttattgggtatctcctatgatgtatgcacaaaatgctatttctgtcaacgaattccatggtcattcttggaacaaggtaatacttgactttaaatcctctctctttcagcaaatgcacacgtagcgtatatctgttaagttttgcagtttgggttgtacacagctcaaaacatggatgcatatgttctgaggctataataccgaaatgacttaagatataagtattaatttaattttcttcttgtaaacctattttatttttatatttatacatgctttctgttttccagcaatttgcaaaccagaacatcacaatgggtgaagcgatactcactg

SEQ ID NO: 199587 - DNA, 298 bp, Zea Mays
ccgtggagtagcattttctgcaagttggttgaagccaatagacgattggcctttggaatctcctggtccatcaacgggcgcatctcgtcctgcacaataccaaaaacgtggggttggtggaaggcgtggcagaagacgttcggttgcatctgaatctggtactgctactgctactgatgaggacaacagctggacttggtggactggaggaaatatttcaaaacgtactttgcagaggggggctcttctacattcaaccagaagaaaagctgctcgccaaggtattacatggtttaac

SEQ ID NO: 199588 - DNA, 345 bp, Zea Mays
cgagtacaatatttagaattatttttgttagaaaaaattagttgttgaagtctgaaaatggaagctgtgaagtccaagctctaatctctaagactcctttcgaagcctggcatggaaagaaacctagtgtcagtcatttgagaatttttggtcctgtgtttggtgtaattgattaaagagctaaagtatgcataccttggtaaattgtgaagaataaatattcaagccatgccatgagaatgtcattgactattaaagattcaagccatgcatacactgttgatctacttactgaaggtggagagctgttctatacttctacatagcgtggtcgcaatttcatat

SEQ ID NO: 199589 - DNA, 362 bp, Zea Mays
cggtacgacggcgatgaacgccggtgagccctcctgactcacgcactcgccctaatcccataatcgaacgcggatacactatgtgtacaccaatgcgaattacatggagaagtccttaccgtgcgccacacaagcaggagcactgaccacggcggagggcggaattgcggtggttcctctacttcggcgagaaattgctgcgcaactgcccaagttctggggggtaaggtcatgacaccattgggacacctctatgaccctcctaagccatctatcgaggatagagcgactctggacgcaagccgtcgacggcgctcctccgcttttctctcttcttgccgctcctgagctccgactgcgtc

SEQ ID NO: 199590 - DNA, 283 bp, Zea Mays
gttacttaatgctggtataaaggataaagccatactccaaatccacttaagcttaaactggtgatcttagatcaacctgaccctactcaataacttgacctacgaaagcaggttacataactaattccatatagcatatagctacctactaaaccctctatccatttgtgacctacaaatctatcttaacctcttatccctaacccggatggagacaccaaagagcaagaaggaggagatcaacctcgtcaaggaaggagagaagtcaaaatcgatcttcaaa

SEQ ID NO: 199591 - DNA, 1433 bp, Zea Mays
ccctgctccgccacactccccagaggttctgaacgcagatctctcgccgcagctcggcctcgcgattccgctggagactgttcagctcctcgccggcggcgctgattcggtaccgcttcgcttcggcttgcgttcttgcactcctggtgcttattttggggaattttttttcacctgagtttgtgatgagcgcagatctgacgcccacgcagcagaaggctgaaggagggcactgggagccgagggggaggctaggggttaggattccggcgtgatgcagcgcccgggacgacttcagcggtcggggtccaagcgcgggctggaacccaccggtggcggcgacgacgacgaccatgcgcccaagcgcccgcgcgtccccgccctcgctaggtgcgcgtgtgttaatgctttgattctgctacctagagttttgtcattggttaaggtttgggttccatccctagttttggtattgttattgctttgattgattgagatgactgggaagtagtgatttctattctagtgctgccgtttctattaagcttagtagtatcggtagttcggtacaagtgagtgcaggaacaggaagtttgcctatgagtctttttgtcgatttgattacctgtcggaggcacaaattgccagaaaaaggatgtccatgtgaaagggatgtttttttgggagttatgagtgtttgctcttttggctgttgggtgcgctccagctcaataagagcaccaaatcactgagagcaaagatggtagagacattatgctgtagaaagtggatgatcagtgctaatagaactgaagctcaatattggcatattttttgcattttgaccacgcagacagttggtaacttcaatttgcctggctagcaggctggtcttgccatgatgttcttgagacaattatcctgactcagaaatcaatactttgtttacttgagttagtagattatcaatcggtgccaaaaccatgacctaggttatcactccactcttattattatcaatactaccttttgactgttactaacacatatgttttcttcttcttttaccatgttatttatttctttatttattttggtgcctggtgttgggttttcatctctagcatgccccaagtcccaactttcttcggataaagaggttttagttctggagctctgccaagaaggcctatactagtgtgggaactgaatcggggtgcacagttagggttagctaatacattagatgcaacaatttttataatcaaatgagatgctgataatacataaaagtaaatttggtagagtttattggtaggttctggtttttgatctaccgctcttcaaactacaaatatgtttgttgcttagctaacgaaacatttttcagtgtcattgtggaagctctcaagatggacagtttgcagaaactc

SEQ ID NO: 199592 - DNA, 521 bp, Zea Mays
gaactagctagtcgacgggacagagaatgtcgattgagcgacgtgtcaccatttggtggacatggccggggtcgcggtggatggcagtcggatgatacaccgacggctcaagtataataacgagccaataggccaggggcggggggaccggtggatcggtccgctcgcaacggtgggtagatgtgagcagggtcggcgaagcgtgctgggtgggacgcaggtgacggggccgtgcatggcgcaggttgaagtgacggagccgcgcatggcgcaggcgaggtcaacggtgctgcgcgtggtgcgggcggggtcaacttagtcccatgaggtgcatgtcgggttgacggggccgcacatggcgtagtcggcacaggaagatgtataggtagtgggggccgcgcgtgacgtagtcgaaggcgacgtggccgtgggttgcattaaagagggtagcgggagaggaacattgacgcaatcgacatcgaggagggaatcgaggtcggggggtggggaggagttagcaa

SEQ ID NO: 199593 - DNA, 272 bp, Zea Mays
ccagacttgagtgctgacggcatggccttcttcatcgcacctaccaagaatttctctgatgcacgggcaggcaagtactttggcttgctcaacgaaaacaacaatggaaacacaagaaaccacatcttcatggtcgagcttgatacctacaaaaatgctgaggtacaagatatcaacgacaaccacgttggaatcaacatcaacggtgtattctccttcaaatccaatacatctggcttctatgaagatagtggtgccttccgggagctgac

SEQ ID NO: 199594 - DNA, 487 bp, Zea Mays
ttggtctcatcactgagctctttgttgcccataaaatttctaactttcagtgggacattcgacgctttgagatctttagtgtcatcactaacttcatatatcagcgtctcatcacttccatcttcactgcccacaatgtgcttctttgccctctcaccatgagcaccagaatagctaattagcagagcatttgtactgcatgactttattaagtcaaagattttctcttcaatcgtcaccatgattgcattggatgcagcaccctgtccacgtgtcggtcactgctctctcaaaagttgatgcacttcgcagtacattatagagatcaaaagcttggggaagaggactggaccatatatcacacgatagtcctttacaataagcaactcaaggaatttaaaatgcagatcaagtgacttaggtagcttgaagattgcatccctttcaggatacttacccacaagagccttgaagagcttcacgaatt

SEQ ID NO: 199595 - DNA, 367 bp, Zea Mays
gatgatgaacatgaatttgaaagatctgacagtatcttgcaagaacaagtggaatctgggagcttaattgataaagtgattgaagatagggtagagcagctggaggccagcaggaaggctgagaacacagagaagaagctgaaggtgtcaatgaaaccgttggagtgggcagaggagcttgagaagaggcaggcctcgtctggtcaacattgggaggaaggagcagctgcgcagcccatgcaactagagggaatcggaaagggcccaccagctatcggttacatgcaaattgagatggacaatccagtaacccgtgtcatgtcctcaccgtcatttaggtcagaccatggctctccccaggtgctgg

SEQ ID NO: 199596 - DNA, 316 bp, Zea Mays
cacaagttcttcatagttaattggtgactcttcgtctatcagtagctcgtcttctgaaccatcttctatgagaagctcctctactgcttcctcttgtcgttgattttcgtttacttgacagttagccatattttctacctcccactgagtttgcactgctacgtcttcaagatccttggcgaggtcatcaatctcaactagtgctcggttaaattcgtccagcaaaggtgagttgaaaggctggaaggctgatttgacgacatcaacgatgtcacaactacgcttttgaacaactctgaggagagtagccagtgct

SEQ ID NO: 199597 - DNA, 306 bp, Zea Mays
ccacatgttttttcaagcttgctgaactttcgaatgagatttaagataattgtgtcagtttagacttcagctctacacatggtgacatactgtgctgcactatatcttgtttttatttgataaggtattacagtttgttgcttgttaaagtctgctgcttagcctggtttagtttcatgtgtcttatacaccgtgttctgaatgcaattcatgaaagagttcagagatgcgtgttagcacaaccagcacctcctccacacaacacattactcacacacactgtttttaatgaagtgtgcagttgtt

SEQ ID NO: 199598 - DNA, 589 bp, Zea Mays
gtttgtatgaagacgaggagtttgtccagaggcaacttgcagcactagttgcctctaaggtatttttctacttgggcgagctaaatgatgctctgtcatatgcacttggcgctggacccttgtttgatgtttctgacgactctgattatgctcaaacactgttaggtgaggaactgcctggtgcctgcatcatggccagttaattattgccagcattaaaagtactatgttaacattatttcttgtttattttttcagcaaaagctttggatgaatatactgccatccaatcaaggggcactggggaagaaaaaacgatcgaccctaggctggaggccatagtggaaaggatgctggacaagtatgatagtttcctcatggtccattatttcttggtttattaaaatgcagttctgagttcacacatacatgttgcatttcaggtgcattcttgatggaaaatatcaacaggccatgggtatgtctgttgagtgccggagactggataaactggaggcagcaatttcccgatgtgataatcttcatggagtgctttcatattgcatcaatctgtctcaccaatatgtta

SEQ ID NO: 199599 - DNA, 304 bp, Zea Mays
ctatgttcctattctaatatataaaaacttgcatcccctaattgcagaccagttggcaccttaggggagaccttcctggagcagagatatgtcaaatgaactatattgtagctacctgttagtaccttagggagaccttcctggagtcgaatctccgatttgtccggccagcatgagggactacagccccactataaggcggctgcatgttagagatcataaattttgtgctgaggaagtttgacctggaaatgacgacaaatatctcgattaggcgacataatcagacaaaccaggcaaaaac

SEQ ID NO: 199600 - DNA, 553 bp, Zea Mays
tcgccggcgatgcgattcgtgcgctctagtgtgcggataacggctgacggtgaaaagatctcgcacgaggatgaactttaggcactatactgccctgtcgccgtacccacttgcaccggcgatgtggctgcgaccgccgccatcgtgtcgtcgtttatctcggttacgacatgccttaagtcgtttcaccacgtcgtcgcaggccgtgaagacttggcaatgaccgtcgtagatcgttaaccagtgaatgccacggtagcgaactcgagtgactcatttccttatcacagcgagcacttctctgttcaaattcgtcctactcgcgatcgccctccataaattgatgcctcggcctgttctgttagtatgttacgaacacagcgcaccgctcctcaccgtcgattagccaccatagcgcttgaatttggtttttcctccaaatcagtttaccgcgccgctgttagacaccgcaccgtggccagccacccacaggtccgtcctcgcccttcttgaccatgtttctacaccctcgtacgcttgtgatgctcattgg

SEQ ID NO: 199601 - DNA, 473 bp, Zea Mays
ccgacctctcgtcgtccctcgtctactccctctcgaccacacctctcgtcgtccctcgtctactccctctcgaccacacctctcgtcgtccctcgtctactccctctcgaccacgccgcatgcgttgtactacccatggctcagacgcgtagcttggcgatggttacaacatcttctgctctatgggcgggggcacgttgtactacccatggctcagacgcgtagcttggcgatggttacaacatcttctgctccatgggcgggggcagggacggggaaggcggcgaggccgtcgagctcagcatcgtcgaacgacttcgacgacgacaacgagcaagcgcgggagagaacggaaggagttggcgtgcgtgattgaacagtgcatagcgagcgtcgtgtgtccgccagaaatagagggagagagagccgctataatatagaggatgatttagcgtttgttgctggacacttac

SEQ ID NO: 199602 - DNA, 387 bp, Zea Mays
cgaacggccaagttatgggtatggtttgcagttgctgcgctggtagatgttgctgttttgacaagtactggcaggcttcgcacctctagattaactcggttgcatcactccttgttgttggccagtagaaacccgacctgaagaccttcccaaccagggtcctggatgctgcgtgtatcccgcactgcccagcatgaacctcttctagcagttgctttccggtggctgagagaatgcatttcatgaggactcctgatgcgccccttctgtacagcgtttccccaatgagagtataatgagccgactgccttgcaatttgttccgctgcatttttgtcatctggttcctcttcattttttatgtacttgatgatcgactccctccagt

SEQ ID NO: 199603 - DNA, 429 bp, Zea Mays
aggggctcatgttgagtttaaattctagcctaacccaacattgctgcttatagacaaaaagtcaagggtaagaacaaagttgtggaatcatatgaagtaaatatttagcctgactaagaaccagtctctagccctacctccatcttgattttggccaaggcatagcagaaaagggactcaattccttaataatccttggtttctggaccatctggaaccataggaatggctgcgtcttcgacaagatcaccgcaagtgtaaatgttgccattagaagggctgaggaagagagggagttgtgggagatggcagggcccaagagcctctctctcctaacagctccaattcctgggctgtaaagtggttgtaatggatgttttctgtattttcgtttttggccaccgtaaagtggtttttttcttgtacttg

SEQ ID NO: 199604 - DNA, 320 bp, Zea Mays
gaaagttgcactgatccgcagaaggttacttgaagctcagagtcggcagaagagttatgcagacaacaggcggagggaactccgatttgaggaaggagacttcgtctacctcaaggtttctccaatgcgtggtgtcaggaggttccaagtaaaagggaagctagccccgcgtttcgtaggtccctatcccatcattggcagggtaggacccacaacataccatctggaattactggaatccatgtccgacatccacaatgtgtttcacgtatcccagctccgtaaatgcctgcaagcactagaaagtcacatcgaagaag

SEQ ID NO: 199605 - DNA, 428 bp, Zea Mays
tatgttgtatcagtatcatctttttttatgtttttatttgcagaggccagaggttttgaactagcagcatttctagacttccgtattcccaagaaatgtaatgagacccatcaaaataagattcaggttatttagtgtacttaatgagacccagcgcatttctagactttcgtattcccaagaactgtttatcttggaacgattactcagctagacatgccgatgaacaattacgagcatgagaaaattactctaggtttttagattgactatggactcttgttgctttgttgaacagttgaaccaaacttctataaaatggactcttgcgcacttattctagactggcattcttttgtactgagtcaccaatgcatacttgctgatagtttgatgttggattgggtaacatctgaacatcttgtgcc

SEQ ID NO: 199606 - DNA, 341 bp, Zea Mays
gaagcatcccagctgccaaagttctgtgctgaatagaacgtctgttccaaataaaatacacctgaggagccaaaggtcaagcatcccagttgttcaaactgccactgttacactccacgcttgtgaattgttttcctttctttatccgtaatggactgctaatccaaacctgctacttgtagattcctcattcgtcatgcacttttttccttgataaactggtgaaatacaaaggttcgtttatattatagtagctttttatagacaacgaatatattatataccttacctttgtcacaaatacgatctttcctgcctttctgtgttatctcgaaccagcg

SEQ ID NO: 199607 - DNA, 373 bp, Zea Mays
ctcctgctcctgtggcgcgacctgtctgcatccgggagagatgcgattccggcgtccggaagaggtgtgtgtcgtcgacgggcatagctcatgttgttcggaacacagagaagccagagcagctagtcgatggatggcagttggtggaatccaagcagtcaaagcgacgccgattgaagatggagcggcagcgtcagagacggcccgtcccagaggacctggctggcaggtgctttaactgcctctctcaagatcacttcgccttccagtgtacgcagaagacgaggtgttttcggtgccggaagcaggggcatcgctcctttgattgcagtctacttaagaggccggtgaggcttgaggctgtgaaggtggt

SEQ ID NO: 199608 - DNA, 298 bp, Zea Mays
gcccagccttcttctatctccccgctcataccgtggcggcgcggtttcagctgcggcgacgcacgccagtgagacgtgcaatcgatgcattggtcaccccaaacttgaatccaaacagagctaaacgttgcgcaggcagaggcgaaagtccgaggagtcttcttaccggtggttgtgtcgtgcagtccccaggccgcgacgaagtgcggttccatggcaattgttggcgtcggtgagaaattggggcagcaccaaaggcttcttccacccgcgagtgcctcaatgatcgctgtcgtgc

SEQ ID NO: 199609 - DNA, 297 bp, Zea Mays
tatttttggcattgtagcttaatggtactggaaggggagccattgctgcttcatcaacatgcaaatgtcatagaactgctccacgtactcaacgcgctgcatgccctacaccatctccttactgctaagttgtctctgtgcctcaaaactgaggtgcccaaagtgcttgtgccaccgccatgcatcattgtcatggtgggctacaagacagagagattgtgcacctacacatggaggatgtagatgtgattgcttcctctgttcaccttagtgggaaggcggcgatggtgatcctag

SEQ ID NO: 199610 - DNA, 292 bp, Zea Mays
ttcagattgagaacattgttcgtctattgttggagttggaacctgaaacagatccagtgtggcattatttaaatattcaggttcaattttaatctaaatatgcgtgctggcttttcaattctgtgacttctgtttgtattttctttttatttataccataatatttcctatcagaatagcaggattcatggattgtttgaaaagtgtactcaagatcatgactcgagaatggaagttttgcaaaataaaattcgcgaaaaagtgctctctgattcgaagtggaggcagctgc

SEQ ID NO: 199611 - DNA, 720 bp, Zea Mays
taattgatgacagtaacctttgagcatattgagtgggtagaaagtaggaactacaattttaacatgtagctgcaatgtttagactataaagcatgtggtcaacaaaaaccaacattcttactattttcctcagacttaattcttaccgaggaaatacttgtttaacaaaacgaggcaaagtaatcgatgtctccacaaaaaagcataagcatgagaacagaggcaaagtaaccaaaacatactgatacagatttaagggataaaacatcagcatattttcacatgttataaaccagaaaactgaaaagtgaaaagtaaaatcagtgcatgggaaattttctacaggaaacactatctagatatgataaacaagagaaaatccgggataacaggggcacatggctaggaagaacagagctaaacaatcttagtaagagaaagtcatcagcgagctaatttctttgttcaactttaaaaggtacagtagaaagaatgcccttccccacaccctctacacacacaattttaattgtgttcaaccagtaacagagatcctagatttggagaattaacatgccagcccttgtgttttgcattgtgatgaactcatgaacaaccattagtttgtaccatgagcagaagaagaaattacccaggtagggatgcctcccacaatgtactaaactactaatccagtctaaacaatgcacctagaaggct

SEQ ID NO: 199612 - DNA, 578 bp, Zea Mays
gtggaggtcagtcggccatggcgcccacactagcggctggaaggttgggcggcgatggtggcaggaggcggcggtggctgctaagggaaggagagactggataccatattggtcgagttgaaaccctaacccattgagtgggatgagtgttacatgtattagagctacatgggctggtctcaaggcccataacacttggatagaataaaatagtctaacagatatcattgttctgtgcctaatggatgacctgacccttttgtacaatgactcaggactggttgagattaagtggaacagtaaattaaggaagccatgctcacgaattctgtagaacccaattttatgtgttgacacaggatatgttaagtaactgctcacttgttaaatgggtgtacttgaaaattacttagcgtatgataacacctgccttgattgtctatttgatcgtcaaatttatgaatcgtagctgttgtaatctgatcctgaacgtaggttagaagagggtgcaacaacgacagatgctctttacttagcagaaagaaaagggcatgatcaaacgaagaaatcactttctg

SEQ ID NO: 199613 - DNA, 314 bp, Zea Mays
tataagcaaccatcccaatcttctgtaacaccttaaaaggaccatagaacttataggccaatttaggacagggtcgactaaccaccgacttctgcacataaggctgaagctttaccaaaatgctatctccaatctgaaactctctgtcagatctatgcttatcagcctggagtttcatcctattttgagtagctgccaacttctccttcaacatgctagcatgtaactgtctgtcagccaacacctcagtcacagaactaggagcaaccccagaaagcataggagcagcagcaaacacagggtcataaccatac

SEQ ID NO: 199614 - DNA, 286 bp, Zea Mays
gttaacgtagcgatcgaagatgatggccccaggcgttggtttgaaaacggcaaggcgggcattgacgcgatgcggatattaggctatctccaaccattccccaattcatctctccttatttgtactattccagcagtttcaaatacctcccccatttcattatttcccctattttctctcaggctacaacccatggttcatctcctctcccctccccctcgtgagcaggtaccgctcatcctcgacaacgtccaacgattctccccctcgggccggctatctcccc

SEQ ID NO: 199615 - DNA, 445 bp, Zea Mays
ctagtaatcatataggatcaatctaggggtgcattggtgcagtgtcgcgctagggcgagtctcaggcgtgcatccaccgtgcgggctctgttccaccgtctggcaccgctggaggacgaagatgatcgcgccaccgtcgatcgtatgttgaacggatcggatttggtctagccatcagatgtggttgggtgaatctgagccatcggttgcgtgacgggtggctatgatcgtgcgctggttgataagaaggtggaccgaggaccgttcgatgcacagcggacggtagagattagaagataacgtttcgatacattgccaacctaatctgggccgtgcgtcgtggatccaacgactctgggtgcttcataccctttcgcgcgtgtcaagttgcaaaagagtccctgcagaattaggtaatcaacccgtgatccatcctttgtaaaag

SEQ ID NO: 199616 - DNA, 308 bp, Zea Mays
gcggaatcaatcaaacggagctcgagtcagcggctggatcgagcaagagggatgtccaacacctggaacaatgggtggaaggaacggcaaaaccacgtcttcctgcgtgaattcggaaccccagaaatcagaaccctcgcaaaccggactccacgcggaacgaacggttcggagatctgtgtagcggaatcagcccagaacgcgagcggagaaattcagaacgaaaaacctgcaaatatatgagaacccagccgagactagcgaagaagcagaagagattggtaagacagagactgcgagacgcgaga

SEQ ID NO: 199617 - DNA, 279 bp, Zea Mays
aaccgtagtgcctcgagcttcgtgccattgttttctcggagagaccgagaacctggtgttctgctggtactttcactgttaacccgccattgctgacgcacatgcccaaaggagattgtcccgaagctctaattggctggagcaggggcatgggagcacggctgcacgggcatggactgacggacgtgatggtccaacggtttcctctttctcgaattgaaagatgcccccggcctgccaagagcaccactgcttcgctggaaaagggcacaatttcag

SEQ ID NO: 199618 - DNA, 321 bp, Zea Mays
ggcttaatatcggccgtttgatccaaaatctacgcaccagattagtctcgcgctagttactccaccgcgctctcccctagccacccgatctagatcttacagaccggattaatctcgcgaagggctattcccttgatccatccgtagccgttagatgtggatccaacggcgcaaacatggttaccctgagatctaatcttggccgctcaaacctggatcgacggccaacaatgccccttccacctcccgatggacaagcaaggaggcggcgctcccagccaccatggccgtgacccatgacatcgccgccgcgatctggac

SEQ ID NO: 199619 - DNA, 484 bp, Zea Mays
gacgacgcgacgcatgtcggggaagtggaagtcacgtcggagtcggtggagagtgcactgcatgccctcatgcacctcctcgtgcaccgcggccacgatctccaggaggagtggcgaggtggaagggatgtacagccggccatcataggtgaccagcccgtcgacgaggccccacggggctgtacgggtacctgtctgtctggttgccatcggcggtgccagatgctgacgcagtcctgtccttcatggctgccatgtcggacttgagggtctgcatctccgaggtcatggtcttgagcatgtccagcacgtcggcgagagacggctcagacatggtggctgctgggctggttgcagattcagatgaagaggtcggcgagggtggggtgggcggtggtctagggctggcggcggctggtgaggaggtggaggatcggctggatcgctgataccagatgtcaagggcgtagtgatcaagggtagg

SEQ ID NO: 199620 - DNA, 454 bp, Zea Mays
ccaagatctcgaggagcaagtaactccagtcgatccagtagaggtggtgtggaccgtgctggacgaggcaattcagttcagtctggatcgagtggcactggtatttttttttttaataaggaagtttcactccatgtgttttggcatttggtcactcagtttctcatcttccattttcaaccgaaccagattatatggcttcaaggtcatcaatattgggacctgctgtggcagctaccaatgccatgcagaagccaacagttcctaggtaacagatgttcaggagctggaatttctgatatatctgattgttttgtttgtagtagtggtaacctctatgcttgcattctgttgcagtttgtccacaaacaaagatgtggttcctaatggatcagttggagcacaacaatcatcatctggttttcagcacaattggtttggggtgccaggtcag

SEQ ID NO: 199621 - DNA, 441 bp, Zea Mays
ggtgcctgaagtgtaatgttgtggagagcggtgccgcctacgctgctctggctaggatggttgtgtcgaaggagcccaatagagctatgaactcgatctcgtcttgatcgtcatcaaagccaaactgttgtccggtggacgttgttgttgtgtgggtagacgacaggacatgcacgtcatgtgataccatggtcctgcaatcacaacgagcggtagctccgcgtagacacttagataaatgttgcgcaccagaaatatgttacttgacaacatattcaaaaatattggaggctcctattcattcataaatttaggactattggaggcaataaatccatctccgaagtggacacgtgccacaatcgtagaatcaaccacaacatcagtgttggactgcagtcaggttaaaaaactcatctaacgtttcctttatgtcaccac

SEQ ID NO: 199622 - DNA, 306 bp, Zea Mays
ttcatgtcggacgttttgggcgtgagaaaagtttggattttttgaagatgtaagctattgtgatacttgctccttttgtgattgatttgatctttgattcttagttgacaaacatgatgcgtctttattaaaagcagagagtaatgcaactaaattaaatgatctaaatgccatatttattcattcttcattcacgccttacatcattggctacttggaactaaattttgctttatttttttaccagggtaatggaaaggttgcctggagtaagaattgcatttattggagatggaccatataggt

SEQ ID NO: 199623 - DNA, 320 bp, Zea Mays
tatggtgaaataggcaactccatcgtcttatataatggcattttcagcagacgtatataatggcattttcagctttcgcgagaattataatggcactgatatagtttcacgaatagttatggtgtgcagcgtgcttcaaaaacaacaaaactataatggcgtgtactaacccatatttcagctatactatagtttactaggcgccaacagtatgcactcgatgttggaagcgcatgcagtggttcaaaaacgagcatgctaatgtgggtctcaagttactaattgttgatttgaggcatgaatagtgtgttagatgcttg

SEQ ID NO: 199624 - DNA, 378 bp, Zea Mays
tgttgaaccaactacttatcaggaggcttctgggattcttgagtggcagcttgctatgattgatgaattggctgctcttgaacgcactggcacatgggatatagtttctttaccctcgcatgttgttcctatcacttgtaaatgggtcttcaaagttaagacaaaatcagatggttatattgagaggtataaagctcgtcttgtggctcgtggtttccaacagactcaaggacttgactatgatgagacttttgcaccagttgcccatatgaccactgtacgaaccttgattgcagttgcaacctcatcttcttggactatctcccagatggatgtcaagaatgcttttctcaatggtgatctacatgaagaagttta

SEQ ID NO: 199625 - DNA, 335 bp, Zea Mays
tattaactatctattatcatttgtgttagaaatatgtttcaactcgtgtgttagctccataacaaaaggtgggtacgtgttaattaaaattatttcatcatgacaaacgatttcattaactatttaattaaatgtttattcgatgattagtaaagaagtaatctagttcagactagtttatagttttaatttacgcttttataaatacacgttaatgtgatgaatacaaacacaaatatttagattccatacccgtctagtgtaaacgcgatgtctattagcgattgtcgcgtggcgtgcgtgctgctcgagcacgtcgtctcgcgtcgtttatt

SEQ ID NO: 199626 - DNA, 358 bp, Zea Mays
tagtgtggattagcttctgttctggttctgcggtcgttcggagttcgagtcgatgtctacatggttttggtgtctctctccccgttgcttggtcacctcagaccttgatcaggtataaagtcagttacccgctgttcttcagtaaatttacgttgttatccaattacttttatatccaaccatcctatttatcatcctactgtcgtgaagatcgggccaccctagtaccgaatataacccggtacatatcatctgatatcaaagctttcgttgtcatggtaggtcttactgtcatccacttatttatcacaatcttcatccatcttatattttgttttgtcctatagtccaaagccaa

SEQ ID NO: 199627 - DNA, 910 bp, Zea Mays
ggaagtagcaaattcccatcaggtttgcgaccatttgcactgccaaaacttgatatcgaggaccaactacaaggccatcttcgatttgataatttgatagattcagaagcatttttcagcgtacaagggcacgagaatagctggattgaggttctgtccactggaagcagtgttgttgattttagctctagcgcagctgaatcttgctcgatatctaaaactaataatgtctggtcagaggcaacgtccacagaatctgtcgaaatgctattgaaatcagtgggaggaaatgagacaactggtaacatggacagtaatgctcaccttcagttaattggtatggacagtcaaactgatcaatcgagtgttcatcctaaatctagtacctccccgacagatagtactgtagtgccaactgagaaagatcagtcttggagcactcattctagaatgactgctgacctttcaaacactgagtctcagcttgaacattttgtgcctttcttactggacaagaaagctgcgcaggcagcagattctgttgctgagaagtgccttacaggtgagaagttgtcctcttcaaacaacacaccaggaagctgcccaactgttggcaactattttggggcaggccatgatgataattctttggacaaatttaatgtaccctcagctgaagtagattcaaagaaattgaataatgaatctttcccagagttggctcccctgcagaacatatatactgattcatatcacttcaagaaagatattaaagaatctgaggctgttgttactcctcaagattcgaagttttgccatatcaatgaaaataaagttgaaggtggactacaagaactgcaaaatttgtcatgtgctggtcagtccttgggcgctgtaaacttgtccagtc

SEQ ID NO: 199628 - DNA, 302 bp, Zea Mays
tgggttctgacagcctctctcatcgcaaaagaccgaagaagagacttcaacggaatcacaatctacaccatgtggaacatttggaaagagtgtaatagaagaattttcgaccatagctcactgtcggcgttgcaggtggcggggaaaataaaagaggccttacgcttttcaggagtgttgttgctctctagcagcctaacctagtggttttgggcccctgatgttcttttagttttcccggtgggtcttttcaagcacaagatgtgctcctagtgtgtgtgatctgtgatccatgatctttg

SEQ ID NO: 199629 - DNA, 803 bp, Zea Mays
tcttcgccaacgcatccttcctccaaattttctttcagaaagtcccaaggaggctggcttctgcctttggttactgcatccagatccttgttcaagaccaaaagcaaagtcagtttatttatctctctcatttggagacataataagaaaaatgtttactgattagtacattactttgatataagtaaaggccaatcttcttcgctttggtgaattttgtatgttacagttaagtttagttaactctttgtataaggattacttctgccattcattgcatgtggaaatatgttagatatggttaatgttatccctttcgtgcccttctacttgatgtttctttgctgtttaaagactggaaataataattatattgctgttcgtgcctaatagccagcatactgttttttcagagagattcttggatgtgacttgataaatgagggtcgggatttgtccttgttagataagtcaccagtttccatcagtgaagatgacactgaatctagtttgctacttaacttcctttctcaattgaaagaagaaaaggagatgcaggctgccaagttatcggcagagcttggaagcttacaaacagatatcacagagattgacagaagacactcagcaggaatgagattgagtttagaggatatggatgtactgccaagttctagtttgccaggagcttctgtgagtgccctacagggtgcattgctgtcaggtttgctaccggcatcgtgcaagtcgagcatatatgaggagagggtaatgaggaatttggtgcagcttgaaaatgctta

SEQ ID NO: 199630 - DNA, 472 bp, Zea Mays
tgtaaggccactttggttttccctgaggactcttgcgtagaatccggcaaatttccctgtttcagctcttattttgtcccacctgctgctgagagccctattaagtctcaatggaaactcacctctaagttcattgtaccttttctctattctagcccacaaaccctccttcctctgccctgtgctaatcactgggtcactactaatctctaaccatgttttgcaaagcaacaggcttcatcaggtttgaagttatgttccttcgtcctcctaaatgtccctggtgtatctgacggcttgctagggctgttaacttcctggacgctgtgttctgcttcggattcaaatggtatagggtcagtctggttgggaacatgggtgggcaccggtggacatggaatgggtggtaccatttgtggtggaccgaaacatgtttgtgtaggaggaccccccaggagttgtcataccaaaa

SEQ ID NO: 199631 - DNA, 396 bp, Zea Mays
cggaactaggaggtctcggcctcgccgtttgctataacgcggtacttggtctcaacgctggagcatgagacgacaggctgctgcttcgaggcccaggaacacgacatagccggatgttgaccgacgcgtgtgggggcagccagccaagtcagcgtcgttgtagaccacaagctccgatgtcggtgagagtcgaatgaaaaggccgtagtcgatggagccgcagaggtagagaagaatatgcttgagagcggtgaggtggggctcccggggtgtgtgcatgtgaaggcacacctgctagacgacgtaggcgatgtcgggccatgagaatgttaggtactggagagcgcctgtgaggcttcgataggtgatcctgaggaagtggtggagaggctccag

SEQ ID NO: 199632 - DNA, 535 bp, Zea Mays
cgcgaatccatcctatttccgccgatgccgccttcctcgaaccttcgtcgcccgctgcacctccccgccgcgccccctacaaagccagccagcagctaaaaacctcctcattctcatccacttcctcccgcgcaaccgctcttccccaacttcgccgccgccatgggctcctcctacgacccctacccgtccccggccgccgacgacctcttcctctacctctccgacctcggccccgcctcgccctccgcgtacctcgacctcccgcccaccccgcagcctcagccgtacccgcagtcccagcagcagcagcaggggagcaaaggccccacgcaggacatgttgctcccctacatctccagcatgctcatggaggacgacatcgacgacaccttcttctacgactacccggacaaccccgcgctcctccaggcgcagcagtccttccttgacatcctctccgacgacgcctcgtccccgaccaccaccactggcaccaccaacagcagcgccagcgtcaaccactcctcctccg

SEQ ID NO: 199633 - DNA, 314 bp, Zea Mays
tttcccccaaaccctccgcgcgagcccgaggccccgagcgtcaggcaaggccgcacaccgccgccgcttcccctcatcatccgtctcctccccatccctttcccctcatccgcattcggtaggctgtggcgccagtgtccgcttcaggactggattggtcgtgggaagcaagaaccgcccgcccgcgcattagaaccctagcccccgccaatctaacagcgcaaagaatccggaaaacccccggcttttcggtctcccgagcccgggagatccatccttcgctgcgtcggagatggtgagtgcgttcttgacac

SEQ ID NO: 199634 - DNA, 335 bp, Zea Mays
agtcgacgtatgccgtcgtgcgcttcgtcgcgcgacgcttaacgtctcctcttaactaaggcaaagtgtctcgctgcgtgctcagtcgcgcgacgagtcgttaacttcttaatttgttttagagagccttgtcgcgcgtctcgccgcgcgaccatccttttatttatctccacctgcttataataattagacatgaaacatgacttactttacgctaaacatagtgtctacattaaatttccttccattaagctagtggctaatttataatcatgcaacgtgatcgtttctcgactgtcttttcctctttctctcttaaccgtactcgcgagccc

SEQ ID NO: 199635 - DNA, 1243 bp, Zea Mays
ggtctccaatattcagtctcttacaagaaaggcagtgacaaccgggtagcagacgctctctctcgcaaagcttcacatgagtccagttgcgctgctctgtctacagttacaccttcttgggcagattcagtggctaactcctatttacaagacactcatgctcaggacctgttggctaaattgtcgctggacggtgcatcagtcccacatttttccttacaagatggcatcctccggtacaagaacagagtttgggtaggttctgatgttcctctccaccacaagctggtagcagcatttcatcaaagcccagttggtggccattcgggtgtgcccgttacttacaggaaaatcaaacaagttttcgcatggaagggaatgaagacctttgtgcaaaactgggtagcttcctgccttacatgccaacaagcaaagccagaccgatccaagtaccctggtcttcttcaacctctgcccataccaaagacagcttggcataccatttcaatggacttcattgagggattaccacgttctcagcgctatgattgcattttggtggtggtggatttgtttaccaaatatgcacattttgttaccttatcccaccccttctcagccctcacagttgctcagtccttcttcaaacacatatacaaattacatggtctgccatctgcgattgtgtcagatcgtgataaaatcttcacaagccatttttggaagcagcttttcaaactcgcaggagtcagtcttcgcatgagcagctcataccaccctcaaacagacggccagacggaaagggtaaaccagtgcctggagacttatcttcgatgctttgttcatgcatgtccgtctaagtgggctagttggattgctgcagcagaattctggtataacaccagtcaccactcttccattggtcgatcaccgttcgaagccctttatgggtatcagcccaaacattttggggcacaggcattggattcatcttccacagacctgactgaatttctccaggagaaagaacgcattcatcaactgctgcaccaacatcttctacgtgctaaacagcgtatgaaacaccaaactgataagcaacgctctgaacgtacgttccaggtgggggatttggtatttgtgaagctccagccctatgtgcagtcctccgtttcctcccgtgctaatcagaaattgggttttcgttactttggaccttattgcatcttgtccaggatcggcg

SEQ ID NO: 199636 - DNA, 415 bp, Zea Mays
gtggtctgggatttttacagcaatttattgggatctgagggacagcgtaacttcacttttgatcttcaatcctttcatcgatcagctgttgatcttaccgagttagaccggattattgatgaggaagaaatttggaacaccatcaaatccatgctttcagacaaagctcccgggccagatggctttacaggtagattctacaagatggcttggcaaattatcaaagtagattttatggctgctgtgaataaactgtttcagggtgatgatagtagactttttctcctcaattctgcatatattaccctgctgcccaagaaagttgatgtggaggaggtaaaagattttcgccccttaagtctgatccatagtttcgccaagatcatcactaaactgctggctaatcggttatcag

SEQ ID NO: 199637 - DNA, 313 bp, Zea Mays
gagaaatcaaattggagaagtttggctaaggcgagccagacttgcaccagcctgcagtgcaccggacagtatccggtgcacaggctcgcacgctcagcgaactggccgctctcgggaaaaacactaggcgatgcggctataattcactggactgtctggtgtgccagccacgcgcccagccaacggtcgaccatggtcagcgggcaccacatggctcagtcaacgatcagcaggtggcatcggactgtccggtgtgccactggactgtccggtgtgccacggggccagtggctggcaacgaacgtcttcgccg

SEQ ID NO: 199638 - DNA, 275 bp, Zea Mays
ccacacagtgattgcaagaacaagaatgaattgtgtccttcactgaagtccctaatccataaaaaggtcaatgaattgaataatcttccccacaatattggccgtgggcaatctcaagagggcagtgatgctaagccatctgaccaaaataatctttataacaccatggcagcccaatccaaacaattcaaggatgcattggaaatactgggttcgaacagtgaactttttgtgaagctgcttcagaagccaaatcaacatatagctgatagtat

SEQ ID NO: 199639 - DNA, 373 bp, Zea Mays
ctaagcacaacccttaccaacttcgacaattcattttaattaaatggtgaaacatacacaccagatgaatgtataagaagatcaaacacctcacctctcagcaccacgaaacaagtagttctattgaaaccaaaactcctaatcttcctaaaccttgttcttgccatcatgaaaagataatcatgtaatataacattctttgcacccactaaagggagaagtctacagaactaatggagcaataaagccaacaagaagccaataacattctgcgtggcacaggtcatcgaaggaatgccaaaagctccacaaagagcactgacagcacaacaacacaatacttggttaaccaatgtcactatacttcatccaa

SEQ ID NO: 199640 - DNA, 2317 bp, Zea Mays
gtgcgacgttggagctgaacaacggagagaaaaagtgaggcggaagacgagggacatacttcaagcgcccgcggcccgcagcctgctcgcccaggtcttcgccggcgacgagcacccaccaggtccttctcttccctacctgctgtgcgaaaccgatcacccgaaaccctaacttaagcgatctgtctacttgaacctggatctgatccaattactatttgtctgttgtctctggatctgatctaacgaagcgtatatacgtgcgccctaacagcttcaattctttctttttttggcacaaattaatgtgcgcacacccaggtccgctcagtccatctctccagaaatccccagatgttccacagcaagtcgctccctaggcccaaggacacatcggtggtggtggtcgtccttgagacgacagaagtgtacattgtgatcagcttgtcgacgaggagagacacccaggtcgtatacgtcgatccgaccaccggcgccctgcgctacctggggaagcatggggaggacgtctttgattcggaggcggcggcgctgaaccacatcaccaacggatcaagggttctatccaagagcactacatatgccaaggcagtgctgggatacgcggtgttaggaagccatgctctgctcttggtcgcgacacagttgagcgcgtcggtccccaatctgccgggaggcgggtgcatatacacattggcagagagccagtggataaagatccagctgcagaatcctcagccccaggggactggagaacagaagaacatacgtgagctggccaatctagacattgatggcaagttcttcttttgcgagacaagggatgttaccaggcccttcccgagtcctattacactacgggaaccagatgaggaatttgtttggaacgagtggctgtcaaagccctttaaggacattggtttgccaggacactgtgtcattcttctgcaggggttcgctgagtgccggaactttggaggtgctgggcagcaaggtgggttagtcgcccttattgcacgccgaagtcggttgcatcctggaactcgctatttggcccgtggactgaacgcatgttcaggcacaggcaatgaggtagagtgcgagcaactcgtttgggttccacggaagggcggacagcgcatcccttttagctcgtatatctggcgccgtggaactattccaatatggtggggcgcagaaataaaaaacgcggtgtcagtggaggctgaaatttacgttgccaacgatccttacaacggaagcttacagtactaccaacggttgggtaaaagatatgggaataaatcatctgaagcgaacgtgtccaggcaaaaaagttctggaagggttcccattatttgtgttaacttgctaagatacggcgaaggaaaaacagagtcagttcttgttgatcatttcaaagaatctatacggtacatgaactctactggaaagctgggaagcacgtggattcagttaataaattatgactggcatgccactgtgaagttaaaagggcagcagcagacagttgagggcctatggaggcatcttaaaccacctacaatggtcattggcttcagtgaagggaattactatgatgcaagacagcagcttaatgaatgtaaaggatcagttatctgcaatgacgatgtaaatggtgggttttgcatggaatctattcaaaatggggtgatacgattcaactgtgcagactctcttgatcgaaccaatgctgctagttactttggtgcacttcaagtttttgttgaacagtgtagtcgattgagcatctcgcttgacatagatgcaatgtttgggttgtcaagtagatattctgaatatgatggtagaaacactcgttctttgccccctggatgggaggagcgctttgactctgtaacagggaaatcattttatattgatcataatacacgtactaccacatgggaacatccatgccaggaggctccacagaagccctggaagagatttgatatgacatttgatcagttcaaaggctcaacaatgcttgctccagtgaaccagcttgctgaactttttcttttggcaggcgatatccatgctacgttgtacactggctcaaaagctatgcacagtgatattctgaacatattcaaggaggaaacaggaaagtttagtaaattctcagctgttgagaatgtgaaaattacggtgctaagaaggtaccaaaattttatgaatgatagttcccgtcaaaagcagttagagatgtttcttggtttgaggctatataggcatctcccgtccatcc

SEQ ID NO: 199641 - DNA, 430 bp, Zea Mays
catatggttaccggtagtctgctcaggtgctataaattctgctaaatcaacttgttggagtctagctaccacttgagatgttgcttgcagaaagtgtgcatgtgccttcttgaactgttccatctgagacttagctggaggagttgctaacacaatgtattctttgcacttagtaacatcacttgcaattgacattccaaggtctcacatctatatgatatagtaaggaatgaagggacgaaaagattgagctaagacagattataaagagtagagggaacccaactatctaaggtttaacctagctaactgttgtcattgtggacaaaagtcacacaatacaacaacaatcattacaaagaagcaaatcaaacatagtcacaaatataactaacatgaactcaaacatatcatcacaacataactcgat

SEQ ID NO: 199642 - DNA, 385 bp, Zea Mays
acggaagactacgatttttcgcacttgttgtgctagtccggctgcacccttaggcgacttctgcacggatagtcttcgcggaagacttcgatttttcgcacttgttgtgctaatccggctgcacccttaggcgacttctgcacggatagtcttcgcggaagacttcgatttttcgcacttgttgtgctagtccggctgcacccttaggcgacttctgcacagatagtcttcgcggaagacttcgatttttcgcacttgttgtgctagtccggctgcacccttaggcgacttctgcacggagttgtcgcacgcgagggtggctagcgctgagcctcgcggtgactttgtattggtcgaatgtcgaagaccgtcggcgcggtctttt

SEQ ID NO: 199643 - DNA, 294 bp, Zea Mays
gtcggcagtaacttaagacggtgcaacatgctcacgtttactcaacttagggtgaccactataccctactaacggagcaatcgacttaagttggcagtaacttaagacggtgcaacatgctcacgcttacttaactcagggtgaccactataccctactaacagatcaatcggcttaagtcggcaatgacttaaggcggcgcaacacgctcatgtccacttgacttagtataaacatgcttacgatcactcatcttagggtgatctctatgcctcacaaaataaggagaaattt

SEQ ID NO: 199644 - DNA, 727 bp, Zea Mays
tgaagctgtgaaagcagcaggtgatgctgctgccgagcttgtgaaatctgctgctttggaggtatggaacatctttaaacttgtatggcagatagcctagcatctgtttcatacttcatcagtgacatatcatatatttggagagctacaattctgtaggtttggaaagccgaaaataatagtgatgcggttatagtagcggcagagaaagctgcatctgcagttgtagaggctgcagtgtcgactagtgtctcacggtaatggggagaaatgcttacacaaatgcacattatgtttcacattgttttctgtcactgacccttttatttatctgagagttcactttgatgttacagaagcacaaatcaagttggtgaagaacgtgcagcggaagaagctgtacaaaccagcgaagaccaggatttggaaaattttgttatcagtgacaaatcacagctcttacaacttagagaaaaatatagcatccagtgtctacagattttgggagagtatgttgaagctttgggtcctgttctccatgaaaaaggtgttgatgtttgcctcacattattgcaaatgagcatgaaagaccaggagggatgtgaccactttgctcaactccctgatgttcttaaattaatttgtgcattggctgcccatcgaaaatttgctgcactctttgttgatcgtggtggtatacagaagatcctctctattcctagaatta

SEQ ID NO: 199645 - DNA, 276 bp, Zea Mays
ggcatcacgcatggcgacatcgggtgagtagcaaaaagggatcttgatgatagatgagtggattattaataatttattggggtgtactcttgtgcttatttagttagcttccatatcctatttttgttgtccttatccgatcacatgcatgcaaatctatcttatttttgttgttcttatctgatcacatgcatggaagcttatctgtaacactgtttgttaggagagacgtgagggagaggaactgacctactcacttcacgcgtgacacatgac

SEQ ID NO: 199646 - DNA, 352 bp, Zea Mays
caccctcacaattcggcccgctcacttggcacctgtccagcccagtggtcagtcggctcccatgcagtccaccatgcgtatgatgcctggcaggcgggacccactgtctgcctcaggtcgcgcacgcccgtactggctcgtggggtaggcctgtcaggtttaccttcctcctcgcaacaacccgcacgtcgcgcgcacaacgactgccgaaatccacgcgacttcctcgatccatctcgacctcgtaccccacctcgcggcaagctcggaggagtctgcggactcaatcgtgaacagatgggcgcggaaatcgcggaggctcggccaacggctccgtaacctgaacggtgac

SEQ ID NO: 199647 - DNA, 327 bp, Zea Mays
ctgcagggtcgggatcgacatgcccacgatcgaggtacggttccagaaccttgaggcggaggcggaggtgcgcgtcggcagcagcggcctccccaccgtcctcaactccgtcgtcaacacgatcgaggtacgtacgcgcgccattgctttgcacccgttacttcctgcctatatatccgacagcgaaagacgatcgattctgaaccttggtcggtgcgcctcttgttcgacccaggaagcggcgaacgccctgcacatactgcccagtaggaagcggatcatgcccattcttcacgacgtcagcggaatcatcaagcctcgcaggta

SEQ ID NO: 199648 - DNA, 293 bp, Zea Mays
attcatcgttggtgtgggttaaattaggtgaaaatgtaaattaagtgacatttaattggtgtcggaaggtgagataggttaatttagaaaggtgagttattaaacatgtgtataccggagtgcattatagtggtaattgcgttaagttaattggtagtgtctcgagtgcacgccatgatatggttgtatgcgagacatagtaaaataaggtgtgctcgatggggatgatcagtcgttgtaggtggaaatcgtcttgcttgattagagaggtggtgacatgccgaagtagtcat

SEQ ID NO: 199649 - DNA, 280 bp, Zea Mays
acggcataggagaccggtcggtgcagcttgtcatagaacttcttctggatggcttgagcttgttccagccgcatgcggacgtcagcgaggagttcctcccgagcagccatggtcttggccatcgcagccacccgcatctcgcccggttcataggaccggatagatggagggtccctgccatacactaccttgaagggggtgtcccgaagtgatgattggtacgcagtgttgtagatgtactccgcccatggcagccagcgcagccactgcttgggtcggt

SEQ ID NO: 199650 - DNA, 483 bp, Zea Mays
ccagattagtgatcggacaaactaaaaaaggatattgtagcagcatatgagattcactgtggttgatgaacttgccctcaagaaacctctaggcacgagagggctctgtgaatgcgacttggcaaatcagtcagtgacaagggtagggaagcgtagaggagaggcacaagtgatcaaagcagcaattgtttggctaggatcacatgcaggcaatcagatcaatggtggcatgtgtatagcagtaggcaagagattaggtagggtcgtgtgagtagggcgtagattggccagctatcaccatggtggctcggtgttgggttaacctggcccaaggcaccgccatggagacacatgatgaggcgacgactagtgtacttcacgacgagcgcggatagggtgacgaggtggtctggtgccacaagaagtccctatatgttacttgacgatggcgaggatgacaactggatcaataggattcgttgc

SEQ ID NO: 199651 - DNA, 301 bp, Zea Mays
ggaggattattggataggaatgagcacgttaaccaagttttacattttgggaaacatcaatgtagcaaaagcaaactgacctggaggagttgctggcaaatatccactgaaataaaattattgctgaaaaagacttctgttgtgagggacgaaagcacgcgtaagacctgatcacacggtcttttgtcatcaagtccatgaacaataaattccccaaagtttttgtcttgtttaaagtcaaggttgatcttcaaagaattattcttcattgattggcaggaatggaacagcacaaggatag

SEQ ID NO: 199652 - DNA, 487 bp, Zea Mays
accatggaactccacacttcggataacaaaccagagaatcagtatgcatcaatgcatcatacacagccaaattgtgtataatacttcatctgcatctaccaggatgcaccatggaggggtgcaggtgttgctgtacccatgttttcaatcagatcagatgaggaccttggcgttggagaatttctagatcttaaacttcttgttgactgggcagtcaattcgggcttccatcttgttcagctccttccaatcaacgatacttcagttcatgggatgtggtgggattcttatccgtacaggtatgactaatattcaataccaaaggtttcctgctcgtaatggtggtttttcttgaaatcagtaaggacgttatctaaacagtagcagtgcccctcatgtgtgaattacagctccctgtctgtgtttgctttgcatcccttgtacctgagggtacaagcactttcagatgcaattcctgtggatgtta

SEQ ID NO: 199653 - DNA, 275 bp, Zea Mays
acttcttagggcaattgatgtgcgtctaagttcccttaaacaagatctggccgcagcttgttctcgagcatcctctgctgggttcaatcctatcagtgtatctgagcttattctttttgctaaccattttggtgccagtcggctgaggtaatgattaaaacttgccagtctcaaaattctggtatatagttatagcttaatattgttgctcataagtaatatttgtacccaaatgaaattaataatcatatacgaagccagtcctgtaatacaac

SEQ ID NO: 199654 - DNA, 508 bp, Zea Mays
ccagctccctcagcctcctcgcacttctctccgacggctcgctcctccgcttccgcctccccgatctgcaacccagcccttgctccagtcccgttcccctgctcccgccggcctccggcggcgtcgccgacgctctattctggggcggcggtgtagccatcctcacggaagacaaccgcgtcgtggtggccactgacatcgaggtcgacgatcctcacccccgtcacctcgccgacccaggcatcggtgatgaggaacatgttctgtgtatggccgtggtggaggcacagtttgtcatgtcagggagcccagaagtgctgcttgctgttggcgaccgggtcattgcggttgacgaggatggcgtacaagtgcttggggaagagctggagattggacccgtgcagaagatggcagtttcacccaatggcaagctcctcgcagcatttgcacatgatggtcgccttctcgttattcccaccgatttctctaggatcatattcgagtatga

SEQ ID NO: 199655 - DNA, 277 bp, Zea Mays
acattgttgttgttgctgctagctgccaagagccaagcctggtcacatggtgatgctgcatgtccacaggttatagaaggttgaccataccttgactgtgccctttcttcttgctagatcctaaggtgggagtgggatactaggcttccttccggtcccgaaggaacatactagagtagaggaaggagttggggcagtcagcgtgcgggcaaccagtggaggagtggtgatgaaggttgttagagcatcgacaaggctggtggttgtcatgttaagc

SEQ ID NO: 199656 - DNA, 476 bp, Zea Mays
ctaccctcaaggtaccttgatgtttcttacaattctgcttctcggaccggaaattcaagctattcttcagaggctaggcacaattacactgagactcccaaagagattcaaacacaacatcataccataaacccaagcccatcgtacagttttgtacaggatcgatgtgaaagagggatcgccaattgtgaatcatcgactaagctggattgcagaaagagaaggctaagcttccagcaacctctggcgatccctgttataaaccttgaaccagaaccagcaccagaaccatctccacacgtcgccagcagagtcgctgatcacctatattttgatgatggtttctttgagaaccttgatcttgatgcaattgaagctcaagcaaccgaacagtggagacagaagaccacacaatcgacgcagaaaccagtggaaattaagaatgcatcagacatgagttttgcacctccgtcatt

SEQ ID NO: 199657 - DNA, 375 bp, Zea Mays
catccacgaaggcgtgtcgcgagctagcttccaccgacttgcgggtcccacccgtcagccggtactgtggatcttctcgctggtagccacgcggtggcgcttgccgcggcggacttagcggcggccattgcgcccgcgttgaatcaaccgccagacgaccataaagcgggtctcggggatcttcgccttcccttttaccctccacacaccagagccggccaggagagagctgcgtgggcgaaaccgtggactgcgtagatcgccgccgctaggaaacttcatttagggtgccaatccgggccctaaatcgggtcagtaaccttcaccgatgctcaccgcatgcgtctatcggtcttcggtgctgatgggatggat

SEQ ID NO: 199658 - DNA, 459 bp, Zea Mays
ctataagatagctaggattcgagaaaggaagacgagggagctcaaccaagttaaatgcattaaggatgagatggatcaactcttggtgaaaggacaagacatcaaagagaggtgccagaggtattttgacaatcttttcaatggtgagaatgagactatggacatctaattggatgactcctttgatgatttaaatagatgctttgtacacaagatctaagaatcagaggtcaaaaaagctttaaagaggatgaaaggggggcaaggcggtgggtctggatggtatcccaatagaggtgtgaaaatgcattggggatattgctatcatttggctaaccaagttgttcaaccatatttttcgattaaacaagatgcccgatgagtggaggagtacattagtaccaatcttcaagaacaagggagatattcaaagttgtaccaactatcgagggattaagc

SEQ ID NO: 199659 - DNA, 423 bp, Zea Mays
tcccggagctccaacgtgggaacacttctgtgaccatatgcgctcgcgtttctcgtttatgggacttctgtgatcctcaggatgaagcaaagttgctccattgtgatatggtgctgcttgacgaagaggtacaacatgtgcacgcttatctatttggtaaagggaaggtggtactgttatgagattaattgttattatgatgttgtttcctccatcgctactttgtgcagggaaacggtatccatgctgcaatattcccaccagtcatacaaaagttcaaacctctgataaaagaaggagtcgtctacaacatcacatacttccgggtcagagcctcgaacaatttgtacaagcctgttttcaatgagaacatgattacctttacaaactggacaaaattggaggaggttgttgaggttccgc

SEQ ID NO: 199660 - DNA, 273 bp, Zea Mays
ggctcgcaggccggcgcacacacacgagtacttctagcatccagaagcttagagtagcagccgcggtcttcggtcctccataggcatccttgagcatagacccgcaacctagtcgtaccacccgtcgttggcgaagtcgtactccggctcgtcctctcctgaacctgccgataagcgtgcaggccaccttaacatcccgagcatttagtcagcggtggaatctagtagtttaggtggctgttggttttctagcaggcatgcgacattatctaa

SEQ ID NO: 199661 - DNA, 292 bp, Zea Mays
gacccactctattctattcacttgccctccacttccttcgctggtgtatcctcccccatgctcttactgccaccaccaccctgccatttggcatcgtcgcctcgctcaccctgaacctaacgtgatgtcccagctctctagccgctccgatatatcttgcagtcgggattcatctggacatatctgtcatgcttgccagctcggtcgtcactctcgtcttccttttcctacttccatgttcagggctgctcaggcctttgatctagttcattgtgatctctggacctctccc

SEQ ID NO: 199662 - DNA, 519 bp, Zea Mays
cgccgacgtcgaccggaggtgggacctcaagacggtcatcgcgcgcatcgacgagatccgggagcccgagcccgccgccgccgccgacgacgagtcgtcattatcgtcctaggcgagcacccgcgtgtgtacttgaccaagcaaatcccaccgatcgatgagcaagtcgtcgtgcgtgcgtgcctgaggtacctccgagacgaggatctacatacgcggcggccatgcgcatgaatgaaccgtcatcggttgcttatttggttcctcaatcaatcaacttaagtcggatgcgttggtggtcgactcatcgatctggtgaacaaattaaagcgtttgagacgggatgaatcatggtgattcggtttctgatatgctcatggggaaatttcgaccgtgtaaattggtgtagcttaattaatctgccaaggaaaaagaggtgctagtttagtagtgtgtaaggggctttacattcgtctgtcttgtaactgcgtttgattcgtacgaatccttacctttcat

SEQ ID NO: 199663 - DNA, 310 bp, Zea Mays
ccaaaagtcctcaagtgaccaacttgtggttccttgccatgccaggcctcatatggtgttctcccttgcacactcttagtaggagacctgtttaacaggtaaactgcagttgaatctgcatgaaacaattctagtcccttttgagctctgaattcagacttccttggaaatggtgttctatgttgttttcccaaagtgcatccatcacagacctgttccaccctgtctactaagggcatcccttccaccatcttcaatctacctagttctctaagtgacctgaaattcaagtgcccaaatctggcatgcc

SEQ ID NO: 199664 - DNA, 511 bp, Zea Mays
ctcgtattgaagtagttatttaagttttcattcacctcagctttgttttgctgtgtgaagtaggatagtaacgataaatgtagattaaatacgtacattcattgcattgttcccctccttccccgcgttatcaaatttatatttttcatagtaaattgcactgcaaattcctttaactttatgaggtggggtgcaagcaagtttttgagcttgtaaactagaacatattctcacaagcttgtaagttgttcaaatatgtctaaacgaggtgttgggggcattgaacatacatctactattgttgtcagtgttcacgcgtaagaatgtgagtaaccactgtccactgtgcatgtcgcatactactgcaacagacaaggaaaacttcaccacaaccatgttgattgcaatttcctttttacatgattagctaaacgtgccaagtacatgtccatccagtcccacttatccctcaactgatcatcttccagaaaaaatatcgatagcatacttg

SEQ ID NO: 199665 - DNA, 305 bp, Zea Mays
acagtgagggcacgtcgcagcagtgccgcggcatgggcatcctcacagtcctcctccggacggccataaggttggtacctagcatccatttttgttattcttacctccttcctcgtcttccccgtctctgcctcgcatttttcggatctccttcctccgtcttccttgtcttccagatctgatttcttgccgacgccgctgggattgcctgttgcactgatgccgttcgtgacctagctcgggtggaggcggtcgtggtcgtaggtttgtttggctaactacgcttgcttccgcatcttagtcct

SEQ ID NO: 199666 - DNA, 457 bp, Zea Mays
cttacgacatcttttatctttctacggatagctttaaaacggtttgaagctgttccagctttcttcaggctccttgattctgcaagagaaactgcggagctgtcaacaccagtaggcattcttgtactgatgacctttgcagcttccgggtcagaggtaggtcttgatggtgacctttggatttctggcatgtttttctcactgtcactccgatcaaatatagggttacgtttccctgatgaccctcctggtcttggaaatgattccaatttgttcaatggtacagaaccactggatgaagcttcttgcccttgttgttcaggtgttcctagtaatgaagggtcatgaagaatcttcaaaaatagctccctatgtgcattaaataattcaagaaaatccaagaactccttcgaaggatgtgttgcagcatcacgagttttttgtgtagcgagagcct

SEQ ID NO: 199667 - DNA, 423 bp, Zea Mays
cttcccccttaccttcccttcacatcccctccacgcgcagccaccgttgatcacatgggcgtttcttctatgcgctcgccggaatcacgcctggaacccacgaccgggggattggaccaccggcgtcgacggggaccggtctgggcgcttctccgagtccccaagaagtcgctcgtggcgccgaacgggtagaatctgggccatggtgaccgggacgactcgacatggcgaggctgcggtcgtggtgcatctcgtcgtggtcaggccacttcgctgctccaaccattggtgagacccctctctgcagattcaccatcttcccctctaagtttagtgccgatcaatttcaaggttggggcggttgggcgtcgagttgtgtgagctccggtgatgtcctccgccgcggtatgcccggcgccgccg

SEQ ID NO: 199668 - DNA, 404 bp, Zea Mays
atcgaaccagcctcttttttgttactcactatcttctcatcaagaatactctgtagcattaagttgcagccattagtaccatctaacccaacaacaaagctccttttgccacaagagagtaatccagcagcagatgatagtccattcttatgcagcttcaaatctgcccaagttcggccatgcaaaaggggacatgtagtatgcagtgtagacatggagcatagggatcacagcaggcacaggttcaatagccgtctccaagggtgaaatggcagcagcaccaagcattggtgtatcttccccatcacctaaaccctctgccatagaactagctccaccccccttcccatctattttatgttttttgaaagcatgttctggactcttatcctcttgttcataat

SEQ ID NO: 199669 - DNA, 498 bp, Zea Mays
gcctcggcctctacttcaactgcaatgagtcgtacacccgcggccacaaccgtgtctgtcgccgcatcttctacctccatggcatcgagctcacggcctctgccgaggaactcgcaagggacgacccgtaggacggcgcccctgtcttctcccttaggccagtcactggcatgcccatctgcaattccatgcaggtgcgggccaccctaggcgccaccaccctcctcgcgctcctggtcaccagctccacgcataacttcatcggggaggatgccgcctgccgcaccggcctgtcgatccagccgtggccgcacctcacgaccactatggccaacggtgaacgcgtcacctgcccaggagtcattcgtcgcgcctaggtcatcatcgagggcaagccattcttcatcgtccacttcgtcatgccgctcgcagggtacgacctcgtcctggggactcaatggatggtcacccttggtcgcatggtgtgggacttcgtcg

SEQ ID NO: 199670 - DNA, 509 bp, Zea Mays
ccaatgtaattcctcctagccctttagtaaagggtggtggaggtgggatggccccagatcctttaggagttgatagtggaacttctccatgtcctccaggaagtggaggtggaggtggaggtggaggtaatggaatattcacaattccaccacaaagagtagacaatggagatctcctttgtactttagggggaaggggaggaggaggtgggatttctttagtaacttcaagaagagaagctggcagtgctgattgtccaccctcaagaggttgagacaaaatttcactcattctacgaggaggtggtggtggcaatggaactatattaacctccgttgaatgtgaaggtgaaactattacaatatcctctgaaaaggtaggttggatttctatatcaatagggaaagaaggttgatacaagcatggagatgtgggtgcaatatgatgtaaagttggtggaggaggtataacatgtcttgtaggtgaaagtagagtcgaaggacaaaat

SEQ ID NO: 199671 - DNA, 283 bp, Zea Mays
agctcatcatgatcggacggtagtagcggcactgttgcggctggtcgtctttcttgacgatgagtaaatgcaggagatagtcgccaaagatatccttgccgaagagacggaagcggggctgaacgaacgcccagacttgtcgttcgccttcaacccgcactcacagatgaaatcgatgtacccttgcccctttacgattgtgccgttgctgctctcccacccgcgacagtagcaggtccttgttgccggcgtcgaggttcaccagcttcacacccagcccgct

SEQ ID NO: 199672 - DNA, 301 bp, Zea Mays
gtgacaacaactcgaaaaagatagggactcgaccaattaacgaggatagggacacattgcaaacttgttaattacgatgcacatcaaaagtcgtcagtatacacagccttctagctagtgacgtgtgaacaacgtcagctcaaaatttgtgtgactactgtcgttcgaggtcgaagttaacaccgtgatatcggggctaatttgaattagatctacagttgccaatgcgtgtgtttaattatgtgagattaggagggattatggtagacaaacatactaatctaatggacacgtacacggc

SEQ ID NO: 199673 - DNA, 286 bp, Zea Mays
tgcgctgtatggtgtcaaatcatcgttagatgagattgaggagctttcagtgctgttctcctcaaatccagctgacagaacctctaaccgtgttacaaatgtgtggttacgttcctcgagcaccatatctgtggggagtattctcaaatctttacgctctacaggtcttgtggtcttcttcctttgcaagtttgtgcacttttatcttgtccaaagtcgagaaatgaattgtgcaagtagagaagttcatgaacatgaacatcctggtgataaagacactgaacag

SEQ ID NO: 199674 - DNA, 470 bp, Zea Mays
cgcggccagtgcaattcaagccaactcacgccctctgatccctcaattgagtatcctcaggtacccgtgatgctccccgatccctttaattggcttatactgccatgaatcgcttggaacacgcgactcctttaagtttttccgctgtcactatgggcagagggttgtagagctccaattctgaaattgaatgaggggaaatgcctctctggggtagattttggggtaaaccgaagactagcgccggtcttggtcccctccggccggtctagctcgccggagttaagcttcccgtgcggagcgccgtcgtggacttggccgtgcgaagaaatagaagtcgaagggggctttctgtaaaccgtcagcgacacgtaggaatagtaaaagaacttatttccagttaaccaaaaacccggggtcctctgtgcaaaacggccacggccagcgcgcgcgggcacgtttctgcctgg

SEQ ID NO: 199675 - DNA, 483 bp, Zea Mays
ccagtggaggcgcgtgtgggcaaagtggcttatcgcttgaaattaccaaactccagtcgcatacaccccgtggttcatgtctctcagcttaaattagcagcagtattcaagggtgctgctcactctaccttaccagttttgttgcctgaccacagtgtaccagtgcaggtgcttcaaacgcgtggaattaccaaaggtcatcgccaagttcacccggtactggttgcctggtctggattgccacaggaactggccacctgggaagacagggaagctctgcaacagtgttttctggctgctcctgcttggggtcaagcagttgctcaaggggaagggaatatcactactgagggcgttgaggatgatgtggcgagtgttgcgcctgctgatgggctacgtccaacccgcgcgcgtcgcccgaacactcgtgtgtatggaccggactggaggaagtgacttcgtgggcgcctgcgtgcgcgtgag

SEQ ID NO: 199676 - DNA, 407 bp, Zea Mays
tgatgtgtcatattgatgtgtggtgttttacttgagtggacataaacacaatctaggtatcccttgaatagaggggattattggaaaccaggtatcacaaaaggtcattagctagcccaggtatcacaaaaggtcattagctagcccagtggaaaaaggtgccttacaaccttaacatatgtttggatagttctctctctcaatttggctaaattttccatagtctttattttattttgagaaatgatgtggcaaattgatgtgtggtgttttacttgagtggacataaacaccatctaggtatgccttaaatagagggtagtataggaaacctggtatcacaaaaggtcattagctagcccaataacgtcttcatccactagttaaactctaataccctctagtgt

SEQ ID NO: 199677 - DNA, 630 bp, Zea Mays
gccggaaacttggtcatgaaggagtcgacgtcttcccatgtagctgacgcaggggactgatccttccactggatgagcacttggcgtatgccgcgggcgactcggatcttgacgacgcgttcgggttcaggggtgaccgcaccatggtgcaggaccggcaggggaggtgttgtcgctggtggagtgccatggaacttcttgagaacgcccacgtggaacacgtcgtggatgtgggcacgggcgggcagctctaggcggacatcgacggtgttgacgatctccgtcacccggtatggcccgtagtactggggctttagtttgtcggcgacatcggtggccagcgacgatggggaacggtggcggagttggagcaacacccattcacccacctgatagatgatgtcgcggtgcgtcttatcatagtgcttcttctgtaccgcctgagtctgctccaggcgatgtcgaacgttagccaggaactcctctcgttcttccatcgtgcgtgcaacagctgccacacgtgtttcctccggctcataggaggaaggagggtcacgaccgtagacgaccctgaatggcgtgtcgcggagggagctctggtatgcggtgttgaagacgtactccgctcac

SEQ ID NO: 199678 - DNA, 278 bp, Zea Mays
ttaacaggttcaaaatgcccagccctaaccacgccactgcccaactcgtccacggtactgcccccgctccacgccttcaccatgctgctaccaagcccagctcgtccatggtgccaccctctgctgcacctcgacgtcacgattctgctctctgctccttagtgactagctctacacccctattgaagtagtttttcttgtatataaccctatatttcgatttaaagtaccggtttaagacattgttgaagatgctcttaaacgatgtttgacatgtt

SEQ ID NO: 199679 - DNA, 288 bp, Zea Mays
tcagaaactcaagctactgtgcctggaagtagtgaggtgcaaaatgaccatgcagggaagaggacctctactgtagatgatagctcatcgacttgttcatcagactcagtcccttcagttatcgtgaatggatcatatacaggaggtgcctggacaagcgtcagatccttatccaataggtatatcttcatgagctcctctatcttactataggttggtattgatcatgctgtattgcgattcaggggaaacaaccggaggaataaggatactgaagcacgggcagca

SEQ ID NO: 199680 - DNA, 452 bp, Zea Mays
gaaaaaccagacattgttgagctccttgacaagagtttcagcaaatatggtataagtgactcagagaaaaatcagatacttgcaatttctgatcttatggctggaatcactgatcagagccattcctctccctacaaaaatcttgacgaagcaggaagaaggtaagggaactttgaaatatttacttatgaaaattcattggtattgcattacttgaatctagagactagttaagtgtttgaatgagttttgtactatcatatgtggttaaagtcacactaattgatattttatatcaaggttctgggttgctgtgcagttcgaacaattccatgctcttagaagatctgcagattcatccagtaatgaagggtgccgtgttgattctgcttccatagcctgggccttccaatctgattgtcaggatgatctacttaattctgtgcttcctg

SEQ ID NO: 199681 - DNA, 299 bp, Zea Mays
ggcgaatcaaaatctatatatcgaaacactctccctgctactagtgaccaagctcagctagatagaagaggagacagataacaaaagctgccataaatgctgaatggtgcaagcaacagaacatggttaagaaatatggagagaataggattagcagctaacgaatatggctactgacagtggttggtgccctgacagttgaattaggtacggattaaacataggaggtagaaggagaaggtgggaagcaactacattcaacctcagtgagtggtacatgctacaatgattcaggttaa

SEQ ID NO: 199682 - DNA, 380 bp, Zea Mays
cgggcctattgtgggatgcaggatttgtggctgcgcgagaatgttggctgattgatttggggcaaatgtttagccgagctggtggggaagggtagacatcttggtggaaggtcggcgcttggggaaggccagtgatggtgggatgtaggcggcgcacatagttggccggtgatggcgggatggaggcaccgcgcgtggggttggctgaggcatggtgaaggctgtggacgcccacaataggaacatatagagtagtagggattaacaaagaaagagcaccttcagatttccaagaacattacgagtctatagatcatcatagagcgatgtgacattactaaatattttgcagcttcataatcaaaatgaaaggaaagaac

SEQ ID NO: 199683 - DNA, 340 bp, Zea Mays
tggacatgaattcaacatggtatgatttagtcaaagacgcgaaggatcgtgaatgtttctttaaagctcgcgatgatgatttttttgctagaacaatggatcagtttagacttatgcaaaactcacaggtgacagacaatgtttcacgatggaacattgaatgccagtgtgctccagatgcacaactcacatgtgacaaccatgctacaataccagacaaggctccagatgcacaactcacaggtgacaaccgtgccacaataccagacaaggcacaggttgtagagcctgcacatgcagagcaggtgcctatgcagtcagaaagagctgcagaaaagac

SEQ ID NO: 199684 - DNA, 272 bp, Zea Mays
aggtactcggcgccttctgtaatatggttcggacgaacgccgagtcattggatcccctgtagaagtcctcgatcactgctgcctctgcgacctcggggatatgatttctcatggtctggaatctttttaggtacgaccgaagagtttcgtcccctcggcgcttgatggatttgaggtcccatggttgcgccggtttgtcggagagagactgaaagttggcggtgaagcgccgactgaaatcgctccagtcatcgatgcagtgtcggggtagg

SEQ ID NO: 199685 - DNA, 272 bp, Zea Mays
aagcatacgattccagtttcccgagccccacgccagaataaacggcgactcttcttcttaagctaatgacaaaagacaatggcctgtgtccgtcgtgcctgcctgaccacgccaaatgagacgtttgttacgcaaagagatccttgtagtgttcgatatgcaaagttaattttgatcgccgcgcggaatggagactttcataaagatggtaatgggacgaccaacacgccacatgcatgctgtacgtgtgatatgagtatctgtaattctgt

SEQ ID NO: 199686 - DNA, 416 bp, Zea Mays
aattcaaaagaagagcatctttggagctgtattgtattatcccattctcatcatgatattgttggctttctttggggaccaaaggcaactgttgtgcttgttcatgagaaccatctttcactcttcagttcatggctagtaactggagataatgagtacatgacccagatacattcttgtcctgtagttcatgagatgttgccatgtactaacaattttaacgaagctacttttggtaaactcaagttaccagaaaatttcaacagtggaaacattgatagcaataatgtcctgctaacagaccaacatagccactattctcatggtttatggagcttgctgcacatagctcatagattgagtggaccgttggcatcatatcacccaagagcacttatccagtatctttattcagg

SEQ ID NO: 199687 - DNA, 314 bp, Zea Mays
acgaggcagcggacgctttatcccgccgtgatgaagatgttgcagcacttcacagcatctcggccccgatttttcagctttttgacacacttcgggcagacttggctaatgattcccaaggtatagaactgcgagcagggctgcagaatgggacggctcctcctggttggactgagtctaatgggttattattgtataatgggaaagtgtttgttcctgcttcctcttctatgtggtcttccttgctagctgaagcacatgaaagtggacatgaaggtattcagaagacattgcacagatggcggtcttctttc

SEQ ID NO: 199688 - DNA, 387 bp, Zea Mays
cttcgccccaacaagctcctacaacccctggacaagagcgatctacatgtggcctggtcaacgtccaccgtctacgccacgacctcctcaagctttgctcgccggctcccctggccaatgacgggcagtgggggattcaactggcagcctgcgggccccctttggattacgtcgctccaccaacgccagcagccctgtcttcactcgctccagtctgggatcaacatattcttgctgctaatttccagactgttgccctacatccgccaccacagcatgaatggcacttcaacaccggcgccaccaaccacatgacatctgacgctggtacaatctctcccacacctccttcacagcatcttccatctcatattgttgtcggtaatg

SEQ ID NO: 199689 - DNA, 281 bp, Zea Mays
ccttccctcctccatttgggtgcagcatatcaaggggaatctgtttcttgctggtctagacgaattattgcagctatgggatgtgttagaggactttcaacttcatgataggcccgacatgcatgtgtggaggttctctaattccgagttgttcacctcttaagtctgcatacaacgccttcttcactggtgttgttctctttgagccatggaaaaggatctaaaagagctgggctgcgcctaaacgcaagactttcatctggcttgctactaataataag

SEQ ID NO: 199690 - DNA, 692 bp, Zea Mays
gccaatggttcaagtatagtaccaagcaatgtggcatcaagccttgtaaccacttccttctcccaatcatcatacagtccttcagagttccaacctgccacaggcacaagctgttcatccctagtaagaagtgccacgaacacacaacccaacgaccagatatccgaggtacagccaaccaaaccatcaaaatcacgaccctccgtccgcaacgtgtcacctagcactgccgccacctctggagcgatgaaagctcgaacactgttcgagctagccccagcttggactccccggcacaaggccaacgcctgattcaaatcaagcatgcagtgcccaaaacgatcgaggcagaagcagtccagcccgaggcaccccagcaccagcccctcgctgtgcaaccccatgatcacttcacatgcctccattacaaggaatccggcccgcaccaccgtctcctctctattgataatctcctcctccaacaattgggaaaccgtacgtgggtgccgttcagagaccatccatagtggcggcgcgtgaggggacatccagacaccgtagagcctgctcaccatccgtgctagcctcgcggaagaggcgatcagaccggccagctcctccttggtcgcgtcgctgagcgcgtcgaccgcggcgaggacccgcgtcgcgtggctgggccggtagaattcggc

SEQ ID NO: 199691 - DNA, 644 bp, Zea Mays
tctcatataactatgactatgagtagtatcctgacattacacctctggcctctgcaagtactgaatctttgtgttctccaatagaatgcactgttagaaattactccagagatatttgcaattgaatttagtggatgcatctattatacggaacatataacctggggtaggagaaacttctcgaattataaggcttaagctgtcatactttggggtgtgtttggttttgggatgagagggatgaaatggatccactctatttttttgggataggatgattctatctcggtgtttggttgggaggtcgggggcgtcctttctctgtgtttggttggagggatggaatgaaggggataacatcatgtctgtacacggttagacatctgttaggtggcgttcatctgccatcctctctctgctgctgcttcttccttcaatgcagttcaaatgcaccatggccgagctcacactaggctccgcccgcgccatgtggcttccctcattggggctgcctgtgtaaccgttggggccgctagcgctgccgtcagggctgcccacgccaccgccatggccacctgcgccgccgctggggctgagctcgctcgtgatgctggtgtcgagcttgcccacccttgccggggcca

SEQ ID NO: 199692 - DNA, 484 bp, Zea Mays
gccaggctttggataaagatgtggtaaaagattatgcaaacacaaggaaccgacatgagcttaatgtgttagctgatcagccaaaagaacttaagggcggcatgctcttccctcatcaactagaagcattgaactggctacgtaaatgctggcacaagtccaaaaatgttatccttgctgatgagatgggtcttggaaagacagtgtcagcttgtgcttttctatcatccttatgttgtgaatttaaaattaatttgccatgtcttgtcttggttcctctttctacaatgcccaattggatggctgaatttgcatcttgggctcctcatttaaatgttgtggaatatcatggttctgcaaggtcaagatctatcattcgccagtatgagtggcatgcgggcgattcaagccagattggcaaaacaaagagatcgtacaagttaaatgttttgcttaccacttacgaaatggtgcttgttgatgc

SEQ ID NO: 199693 - DNA, 439 bp, Zea Mays
tgatcgggctgaggaggaactccgtcgtgcactgatcgtcagtgttgtaggcagggaggattctggctgcgccgtggaggtgcgtgacgcgatcgcctcgaggttttgccttgaagcagggtcgctccgcatacgtcgtgctccgcctaattctttccttgtcttcttcccctcggttgccgtggctgatcgggtgattggggaggggcaatctcttcatgtccctccgctcaggttgcatattcgaaggtggtctcgccaggctttcgcttctggaggtggacagccgcttgtgcccgttggcgttgaacttcgtggaattcctgcgcatctctgggggattgaggctgctgaggctgttcttggtgctttctgtttgattcatggttttttgcctggctcggtcatggaggaagacatgtctgttctcagactgaag

SEQ ID NO: 199694 - DNA, 825 bp, Zea Mays
ctgcgtgtttcatctggattcacaggagcagatgacatcaaagaatgcagattactggatattcagcaaatttctgattgtaccataaataaaactattaagtctgcacctcactttgaaatggaagctgctggatcatcacagaattgcactttggacataacacttggaattaaccgttggatcgaggtgatagagactcatctccctcagggattatcccatggttctgctatggtattttaccactctagaacctgtattctgcattttcttatgttatttgcagtaaaacacccattacatttcattgtctatcaaaaatctatgttattgatgcaatgttcctaacttaatgaagcagtatggcaacaaatgcctgccacataacaaagaagccagctaatttataatcatcaaagtgttgcatggacatcttgcatatgctgttgttatactcactacccccaaacgattgcacatcttgtttcccaagaaatcgaccaatttcaagttcgaccaaatctatacaaaaaagattaacattattaatacaaaataagtatcattagattaatcatgaaatattttcatagtaaacctatttgtagacataaatgttgatactctttttataaacttattcaagtttaagattaattgccttcttagaaaacgatatgtgcaccctttctgggatggagggagtagctagaactaggaccaatttgtttgtgttttccctggtttgaataaagtatctgtttatttctaggtcaggacagcatccctcacatgctttgctggcatgacttctgatgtatt

SEQ ID NO: 199695 - DNA, 290 bp, Zea Mays
gctccctgacgaccaaacctgcaagaggaaagggtcaacccgatactattaagccatgttgggtggacaagacgcgacatcaccaaaccatgtctggaccatgtgtacagtaacgagggggaccttagcattggagtctccacagtaacgacccacaaaccacaaaggacaggataacacgccataccttgtgtatgcccacgcatgctggaaggtgacacaacaaccatgacggaagatgaagccgtattgaacacgaccctcaacctcaccgtgagcgtgctctgcgg

SEQ ID NO: 199696 - DNA, 386 bp, Zea Mays
caatgccgatggtcggccacggcggctggcctgctggctcccctggcggcgccggtgtcgggaggccgcccttctcttgacggatcccatagatctatcggcgaagtgcacgcgcgcgaggacgtggactacagactactacgtgtacaacacccaagtagcatctctttctctgccttccgcttcattcccttgcttgttctctcgctcttgtgccattgctgtgatctctgtctctctcatgttttttatgttaacctgtatgggacttgattgtgttaattcttgataagttgagtgtctctgttaatttgaactatgttttgtgaggacatgcattcataaattgatcaaaattcgttttagtttatgtcccggagtcaaat

SEQ ID NO: 199697 - DNA, 365 bp, Zea Mays
acgaaacaaactctgatcgagagggtcgtgttccgcgtggggatgatcggggtggaggatttggtagggaaggtggtatggatcgtggaggagatcgtagagaagagaacattggggaggtggaaaggagttttgatcgagttccttaccgaagtggacatttccaaagtttcaaggaaatgatctaggaatttggtttgatcggtgcacggattatttcactgtctaccaggtgcatgattggatgtgggcaagcactgcatctgtgcacatggagggaaacgcagcaaaatggttgcaggtgtataagttgaagtatggtttgggtgattggggtcagttcacaagggctgtgaaggataaat

SEQ ID NO: 199698 - DNA, 394 bp, Zea Mays
ttttgccccttccattttgtctcatggacaaataggatattaacacgcctcctgctcgctgcatcgactaactcagcttacctgtaagggaccctacgttccaactatctacacggatcctagtcggctcaactagcttccttacccctcgcacccgttgagacaaatgcgaagacccttgcacattgtcactacacccgtgcgccgatgtagcatgccactaaggaagcgacaacccaatccttgctcacatgacactgcatccagatcacgacatggcgcgccaccaagggggtggcggcccggcccttgcccatttaacaccatacctgggttccgatatggcgcgtcgctaagagggttacgccccaacggttttctattgggtttcatc

SEQ ID NO: 199699 - DNA, 1997 bp, Zea Mays
caaagagggcactggaagaacaatatggtggtgaggaggaggtatgtttcaatttctaaggctacagttattgtctttggtatcttataaacactgaacttaccaattccattttgcagctacctcagacaaatcctggcttgaacaacactcccttcaagtttactaaatattcaaatgcatacatgcttgtgtacattcgtgaaagcgacaaggacaaaattatttgtaatgtggatgagaaagatatagcagagcatcttcgggtaagctgtcccctaagatttgagtttcatgtgatcttcttttgtcggttctaatatttaaatctactctcagattagattggaaaaggaccgtgaagagaaggaacgtcggaagaaggaaaaagctgaggcacacctctataccataatcaaggtgtcttagtcaaccttctgtgcgtagaacatccttttgtttttgttttgttatcttatgctctgttatataggttgcaagggatgatgacttaaaaactcagatagggaaagacatatattttgatcttgttgaccatgataaagtcccaagcttccgtatccaaaagcagatggcctttgctcaattcaaggtaattacatgatgtgagggtgtatcttagcatgtcctgtcaaaggaatatgatatatcttcaatctggtgtctgttactcaaggactcaagtatgtttactagtgtcacattttgctgttgaaacttgaaagcacatttgagtttatctcaggcagaccaactgctgttcatagtttactaaaagaatttaagtgccaataagatgtaaatggtggtgcaataatagattacttaagaaatgtgttttgttgtctcttttcacaccttaaggaatcatttgatggttgatctaataatattttttcatttcttataggatatagggtagaatttcgtagttggcatactgattattcatccatgatgtgctttacaggaggaggtagcaaaagagtttggtattcccacacagttccaacgattttggctgtgggccaagcgacaaaaccatacttaccgacctaacaggccattgtgtcctcaagacgaagcgcatactgtaagatgattttgttacacattgagttggacaaaacacaaaaggatgccttggcagtttttaggccattttttaattcttggaaagctgcatgatgcacactagtttttacaaatgtgtatttgaatcatcattttctctaagtttgtcttcatagaagttgcttcttttggatgttaaggtcctgattttcttagtttgttttttacttgttgagcaattgtatcgtgcgtgcagctttatttcttatatcttgtttagtcagttactatggttgaaacacctcactcaagtagtgtgctactatactacagggagggaagcatgcagaactttttttttcagtcagctaatttgcaagctgatttcatagctggttttgtacttgttgatcaatttcatcgtgcatgtagctctgtttcctgtatcttcttgagcagttattatggttgaaacacctcaatcgagtagttttctactatactgctgtggtgggtaaggcatgtagaacttttttgagtcagctaagttgcattatagcttgtccaacttcctaacacccatcagtatatgaattagttcaaccatttaagatccatattgtaaaatctttactaccatgactaacattaataattcacatcacaatgagatactttggtgctgttctagccattgcaaaatccgtatgctttttcttgaactcaattaactgtgggggtttattgttgagctgctacttctatgccttctcttgtctgtaaaggaataggccagttctaaaggagagcattttatataggttggacagctaaaggaattggtgaacaaggcccacaacgctgaattgaaattgttcttggaagttgaacttggactggta

SEQ ID NO: 199700 - DNA, 341 bp, Zea Mays
cggcccaccctcctcccccgatccgatcgccgatcaccggccctcgcttagcctcgccacgcctcgcgacaatatttggaacccctgttaccgatcgcctcatgccgtaccactgaacgatcccaccccaacaccgtacccccgccgcctcctccgccgtgcccacagtcgcctccgcctttcgcctgctaccccgtagaggctctatatcccgatcggactagggtgcggacgatggctagcaacgccgaccagcatgctgccgttgtctcggctgccccgtccgatagcccggttggggcgaagaaggctggggcggcggccgccgtctggaaactccc

SEQ ID NO: 199701 - DNA, 479 bp, Zea Mays
ctggaggtcactccggtgactcaccgtcatctcccccttctgctttgcggctggtgcggatagcttcctcggtgaaccgccgcctctcggccttgtgccgcatggctttgcctttccaccgcgacgccgtgactcgctacggctgtccaatcgtcgccggtgaggtcgccacgacggtggacacgagttcatgcgcgccagtaactccctgcccctccgactgccgcgcgtcgccgttaaaattcccagccgccgctcttgcttcctataaattgagccctccaccagccccacaaggtcatcagccacccagccaccaacaatcgctagcaatcgtgcatcagtgagcttgaatttcggttttcccccaaatcaagcttctgccaccccgaaacccacctcaccgcggccagccccattctggtcagttcatcctcccctctgcctcgtttaagctttctcatatgtctatgatgctt

SEQ ID NO: 199702 - DNA, 291 bp, Zea Mays
ccaccatcacctcatccttgcgcgctcctttggatgatgccgcagcccttctcgtcgccacccgggccaccgtcatggtggctcgccagcgtgcccaggacgccgcccgtgctcttgagcaggagaaggcggttgttgacgccatcgagcgccagtatgccgatacctaccgccgtctcgccagcaagggcattttggatggctctcccacgtctgctcgccgctatgtcgacacctttgagcccacgcccaccccagcctcgactcttcgtgcctatattcatactcagg

SEQ ID NO: 199703 - DNA, 326 bp, Zea Mays
aatagagttgtggggcgtgggggcatctctctatcggcgtgctcacctgtgttccggtcgcctgttgctattggccggatgtggcaggatgttgaggacagtagcatggggtcgtaaggatgaagacaacgcgtgcaccgttgagtctctaaccagcggccacgattagatgagtgggcacatcccgggtcaattgaatcacaaccgtagaatcgtgatccgatggctatttccgcgcgtgggtttaggatatcggcgatctaatctgagccctaggatgttgatcggacggctcagatcaaacgataccccttcgtgtagacagt

SEQ ID NO: 199704 - DNA, 342 bp, Zea Mays
tgcaggttcgtttggatggctcctgagatggtctatcaccgagacgttcgccatcgttgctgtatcctggaccggctgcggcaatggcattgtggcagttggcgcaggtgtttccatgtgggcaagattggagtcctcctggcagctcgcttggaggtctacaccgcaggtgccgcaagcccttgtctccactacctgttccatgcaaggtcctgtcgcgacagtggcagctcttgctccagccgagggcagtgtgcctgttcttgtgtttctgaacgatgccaggagggggctggagcaagctgagcttgtgcatcctcagcctgtttgtatgatccagtg

SEQ ID NO: 199705 - DNA, 325 bp, Zea Mays
ttgaatatgccagttcactgaacaaccttcggtcaacaggagtgcttgctcgtgtgtacttgaacatgcaattcctgacgcattcttctgtaagtatttagtaatacatgagagtagcaaagagtttaacctctaagatgtcttcagatatgaaaaatgagtaaaatggttatctattattatccatctaaagaatacatgtaatacatgtaagtgtatgtactcgtcatactaaggctcatggtattagtagttgttgataggataacactcattttagcttttactaattgtcgtcaaaacactgctgcagttaacgaaacgg

SEQ ID NO: 199706 - DNA, 358 bp, Zea Mays
aaataaagaagtggaactgacatgctatcatagattcatagtatctgaacaatacgttgctgttaagtgtatgaaggctatgtactataggcccgtatggcccatgaggatctctctgtatatagctatctccagtaagggaggtcttctgcttctgtgttttatccaaggttagtaacattggtaccaaagccatagattagggatatgattcgactaatctgtcatactacttgtatgtgtgtgttatgggcgaagaacccagcccattaggggtccggggtaccatatatgtaatacttgcaatactgtagcctatctatcagtttagggtttcactttcaccaacagggtgtca

SEQ ID NO: 199707 - DNA, 336 bp, Zea Mays
gtccagaatctgtcaaggtgttgagtcaccgtcttttgggtcgttgggccatgtaacatgttgatcaactagggggcgcaaattgaggttcttggatgccccttagactatataatcagtagtcgctgcccacattagagttcgggacttcgggttttattttagaacaatttgtcttaaaacggttgtcgttatcagtttgtgaaacccaaaattcgagtgcttaatcatacatccgcaattgccaaagacttgagtgtgttttatcttagtcttacttgtgttcatctattcgcagcagagattagccttctcgacaaggtcaacaagattgtg

SEQ ID NO: 199708 - DNA, 341 bp, Zea Mays
cgcaattatattttagaaattggtgagcaatacttgacacacttgtggatggttcccaatattggtgtcgagcattccgatcatggattaatgccgcagcaacttttgatccgatcgtcctaggtacgaacatcatttctaggatatgattaataaaaaatgaacgagatgcatacaatatatatgaagcactagttataaccattacttatgggtgtcatcggtcgctgctgtagggtctatatggtggactagagggggcgaatagtcttttctaaaacttaacgttggctgaccgaaataattgcggaattaaacttaaaggtctagccacatccgag

SEQ ID NO: 199709 - DNA, 302 bp, Zea Mays
gcgactgtcccctagttacctacaaatacccccgcactgtgccctgatgggacaggcagaaaaactttgttgctctaatccatcgtgttgttaagcatcaaagcattcccattttcccactgcttggacccactcggccatgtgtcagtgagttccaacatttggcgcccaccattcgtgctctgaaaaatcattcccgcgaaggctcctaagaaaccaacttcgaaggctaccacctccatcaactacgcagcgaaggcgggccttgctaagaagaagggcaatgcaacccttgttggcga

SEQ ID NO: 199710 - DNA, 452 bp, Zea Mays
tggtggggcatctccgaagggatcacgaaagagtagtcgccgtcagagccgcttgcgcacgcgatcgggttgatgtcagactggttgggaacgtggagaacgttgatggagcagttggcgaagaagagcaggtaacggacggtgtagtccgacaggttgagccacaaggtcggcgatggcgagacggtgacgttgtggtcgacccgcgggcagctcgcgtcgtcgaggacgtccgggtcggcgaggtagatggtggaggtgggatagtcgatgtccgtcacgttgtaggagtagcctgtgttgctgctgttgccgccgagctgtatggtggggtactcgtcgtccacgcagtcgatggccagcccagggtacccgcagtaggaggaggagttgcccaggacgtccgccgtgtcgtcggaaaggtagaacgggtaggtgatattcacttcgcc

SEQ ID NO: 199711 - DNA, 288 bp, Zea Mays
aattgtaagactaaaattaaaaggacttccttctgaaggttcaaagagaatgacattcgaagagcagtttaccaagaactttaacaaataaagcacccacttcaagcaagccttaaccctacgcttcaccccgggaggactccgacccgaatctcgggacgagattccattaaggggggaaggctgtgacaccccagtatcacctagagtttcctctttaagctaaccattatcacatgtgaaccaaatagaggcataaacatcaaaaattaataacaaaggtttaaa

SEQ ID NO: 199712 - DNA, 291 bp, Zea Mays
aatcctttcttccacagaaagtgtgtggctgccttctgcgccacggcgcgctgtcgttgcaggatatcgtccgccgcctcgaactctcgcccgggcaggtgaagaactccctcctcattctcattcagcacaactgcgttcaggcctacacaagccccagaggcaagcctctctgcgaaccttgcttatagcatctgatttagtgcgctatcagaatttgatgccactattgggcggcttgcaggggctggcgataggacagtgacgctctacctggccatcttcgacaat

SEQ ID NO: 199713 - DNA, 344 bp, Zea Mays
gcggagtgcccgatgtctcgtccgctctgcttgtcgcatatgggcgccccatcggagggtgccaggtggcgtgcgcacactatttggcacaggcgtaaccataccgctatgattaggcgtgactgctgtcttatccaccgttgtgctccgctgccacagcgtggtttggcacatgcattaaatgcgcctgcccctgcctattttcgagcgcccttctcttgtctgtacgaggctggctcgggcgagacggactgggcagaggcgacatctggcgaggcaccctcgagcgaggtagagtgagcagtgttgtcctcaggcgaggcggagtgtcgctcgaggtggga

SEQ ID NO: 199714 - DNA, 333 bp, Zea Mays
gtcaaagcgtcaggaaggcaatgcaaggcgtcggcgagagacaaggagacgtccatcccgccaacccctgaagtcaatgcaactcaaacgtcatgttataggaaatagaatggaacatttaagttagacttggaactacaggacttcatttttatatttctaggtagggttaggactcagagtatggaagcagaagcagtgatatgtagctattggcaatcacactcagattatggaagtagtgatgtgtagctattggcaaccacactcaggttattgaagcagtggccaataggtatgggcaatcggcttaacctacagaacttggccaag

SEQ ID NO: 199715 - DNA, 375 bp, Zea Mays
cgggtagaggcatagacaacggggtagcgcgtggcagaggcgacagacccgcatgcggcgcaaaagagggcaggagaaggggaggaacgccgactcaatcgacatcgagggaatcaaggtcgggaggagctagcaaaggggaaacatcctcatcaaatgcaacatgacgagagatgatgatgcgatgggtgagaagatctaggcaccggtaccccttgtgatcattgtacccgatcgtggtgaaagtttgaggagcgtggcagaggtgttgggatagcaggcacactcgaaggtgctcataggaggggatggtgtcgaagagggcgaagaacggagtgggatggggaccgccttggagggaagacgattgaggag

SEQ ID NO: 199716 - DNA, 401 bp, Zea Mays
ttggtctcggattcatatatacagtctcctaattaagcgaggaggacaagaactttagatacttttcataaaccctcatgctcattcagattgttatgtttgtctgtactgcaccattcttttgtgttgtttgtacaaccctattttacatttttcttaacgggggtatatgtgaatatggcatctgatctttgttgcttgtgtgagtagtgcgtagggatttgttagagatggccagatgggaaacgagtcagagaacgtgctctcaagaagaacgatgaaagttcaaagttgatcctcttgaaggactgaggaaatataagggagggtacaacatcactgacaagcactactagagtgtaaactccctacattatctgaattgttaacatacttttttc

SEQ ID NO: 199717 - DNA, 315 bp, Zea Mays
ctttcatttctcaatttgatgttcagactcttctgcttgattatatcaagaagaataaccttcgtgatcctcaaaggaaaagccagattatttgtgactcgagacttcacttcttgttcaggaaagcacgagttgctcactttgagatgttaaagcttttggaaatgcattttcttacgaatgagacttcaacagtaactaatagtagccaagtgactatcaatctcaattcagctcatgtagataccaatggacacaatgacacggctgcaaaagtttcccctgataagaggaggaggatctatagaaagatgg

SEQ ID NO: 199718 - DNA, 491 bp, Zea Mays
cacaagttcagctaatagcaagtcgacaactgcaaacaaagtggaatgaaatatccaatagtccacaaccacaaacatagcacaaaagcaactaaagtggaatgcaatgtccacaactgcaagcatacaagcgttattcaatctccctctatcatatctcaataaccatcatccaaaacatctataccaacatcatcgttgtctttgtctttctcatcaccatagctccactgttgtttgttgcttcatcaccatccatatcaaggtcgtcaagcacaaaattttcatcatcttcattccgttcacccacttcaagcccatctacatcgtcctcaaatcttgacacttgaatgccatgagctctactgggaaagttgcggccttgaagttatgtagatgcaccgacggcatgatcaacatgctcccatatgaaaagagggtcatccccaacaagagttgaattagctaatgtatcaacccactcattgtcc

SEQ ID NO: 199719 - DNA, 550 bp, Zea Mays
ccaaatgcgctcgcttttatatatctgtgaaggtgagggaggggaacagccctctcggatggaaccacttcctgatggctcaatgaatccaagacgaagtgcaatcaagcaagttgccagtggacggtttggagtttccagctattacctgactaatgcagatgagctgcagataaaaatggctcaggtactatgcactatgcagccattaaaatgaattacatcctgttgaaagaacatgggtcttccatatttcattttggatttactgtatttttcaccttaaatttctatagggtgccaagcctggtgaaggtggtgaacttccaggccacaaggttattggtgacattgctgtcacaagacactccacagctggtgtaggactgatcagtccacctccgcatcatgatatttattcgattgaggatcttgcgcagcttatacatgaccttaaggtataaattgtaaatagagtaatgctgttttctgtacccacaagatccatggctcgctgattgttgctgctgtctcaatttaattttttaca

SEQ ID NO: 199720 - DNA, 800 bp, Zea Mays
gtgtcggcatctctcatatgttgtcatcgggtgaaggtatgctgtttatttggtgttgaaatatattttctagcatttgatttactattttatgtactatgacaatgaggtggcaaaaatggttcatatctatgtgaaacaatcgttttcagacaaattgacacatttccatgttgcatagcaactgtttacatttttcaaaggctcacacaagaagggaaccctcatgttctgcaaactaaaccttccctttttgggcaatttacagattgatagtccaatgcgtccagaagattggcagaaacggggaatgctcagccattttactgttgtgcgcaaacttgaaggtagcatatttcctataggtcttgctaaggaagcttctgataggaaccagaaggctggtagcaacgtgctagcactagaaagcaggtgggtgcttcctttgaccatggaaatttgttgtttaggaccaggtttggtcaaatcttagaaactaaaacaccaataactactatattatttcgtttgaaaacaagttatatgtgaagatttgcattcaaggttttgacaaaatctctaaattcaaaggattttaaaaatatattctagataaatataatggtcaaagatacccattcaagaccacgcaaaatcaaatggcttgactatttttgaccagaggtagtgcccatttattttgatgagttccattgttgaagaatgcattgattaattggtctactcctttttccagtgaacgtgcattattaaatcgcttgatgattgagctgagcaaa

SEQ ID NO: 199721 - DNA, 273 bp, Zea Mays
tccgaatgaattttaaggtggttccagttgggttggcaagcttatctctttatctttacatccatataaatctcaacctaatcggtgtttacatgcatcttgggcatctgttttagtgcagaccggtccttgactccgaggtggagacaaagttgagtcggacttggctttctcatgttgtgaacgtcctagcttctcctccttgacatcttggaacttataaagtacttgatagtcctctctaaggtttctaatcatcaaaacatccatggc

SEQ ID NO: 199722 - DNA, 306 bp, Zea Mays
atcgggggttagcttgagttggttgggttagggtttgtgctagctattgagattcggtgggttttgctttcttgcggcggctgggggcactgctttagccggggtcgacgcgcgaatcgggatgagttacgctactgcatctttgcgatttcactttctgatcgcggtttaggcttcggatggagtgttggatggtttgatcgagctgatatttgtgggttgttggagatcattgactcgccatctttcggttttgctgggggcgccttctggtttttgaatcttttgacctggaatggatcgctg

SEQ ID NO: 199723 - DNA, 677 bp, Zea Mays
gaaaacttaacaatgcaactgaagaagagtcaagatgcaaatatagagcttgtttctattcttcaggaactggaagaaacaatagaggcacaaagaacaacaatctccaatttcactcaaatgagtaatatgattgatcaagatatacccacgaatgcattatcagctcaagaggatgcagagtgggaaagaaagatgtcattgaaagaagatgaaatcatagcattgagggagaaattggatcgtgtactcagcatagaaaatccaggtggtgttggttctgatgctatatatcttgaactggaaaaggagaatgattttttgaaggttaaaatgcaagatcttgagaatgattgttctgaattaacagaggaaaatttggagcttatacacaaattgaaagaagttagtggggtcgaagaacaagattcttgcctttctgatattgaggtaatgttaaatgcgacaggtctttctgggacttcaaaatctagagcaaaatacctagaaagaaaatgtgctgaccttgagcagaagatgttgaattttcaatcggagtctagagaactagaagagaagctcaaaaaaagccacgaggatctaaaaggacaaactcttgaattatctgagcttagagagaacctaagtagattccgtgctatggagctagagagagg

SEQ ID NO: 199724 - DNA, 295 bp, Zea Mays
catgcatgacgctcgagtggaagcaaaacaagctaaggaagctgcaaagcgtgaaaacgtataggtattgtttcgtggcctttagcttcgacatttgtttttatggcttcagactaattaactttttccttcttcagttgaattatctccgccaccggaaccgttcgatcccctggccgatccagaaatgaatgaagcactggagatcattagcatggttgaatctattgttgacgaagtcgtcaataaattgctgaatgaaggtgcggagaagatcctgaaaggagactagcac

SEQ ID NO: 199725 - DNA, 317 bp, Zea Mays
gtttttaagactcagatatttttgagccacaaccgcgagcaggagcagctgacaccaaaagcgttgctgtcttgacacgatcatctgaaaaagcgcgaaagatacatctgagttggagtccagagtgtgacgggccggcccttagagcaccataaggttgaggttgttcattggatcaggagcaggggtatctgcctcctgcgagacggtgttacacggacggccataaaagtctgccaaggggcacaacaagacgatgagctacgctccaacgctgaatccgtcgcaaagatctcagtgtgcaaattgcacagcgc

SEQ ID NO: 199726 - DNA, 277 bp, Zea Mays
tcagagcatgtactaccgctgccaactcccggtcatgtgtgggataattttgctcatgaggtctgagtgctcttgatgcgtaggcaataactcggttgtcttgcatcaaaacacaacctagtccagtgcccgaagcatcacaatacatataaaatgatttggtgttgtcaggctgtgctagcatgggtgctgttgtcagatgccgcctcaaggtgtcaaagacatcttcacatttctgaccccaatcaaacttcactcccttcttcaacaactcatt

SEQ ID NO: 199727 - DNA, 320 bp, Zea Mays
tccttgggcacggaacagggggttcaccggtgtatcgccgtcgtggtcaacacggctgcagccgtggtgtttctgggaagaagatgacgggttcgtggccgtcggatcgtctgatctggtttagacggctgggtctacccaggttgaggatggcgcaggaccgtaggatcttaagggacgactgcaattagatccgggttcccttctcgcgcggtcgatctctgccctccatcggaaatcgatcgtcggagagcgtgtcttcaccgttttcgaatccggaccgtagttggctaatcgtagggctgtagcgtgatcggtgg

SEQ ID NO: 199728 - DNA, 308 bp, Zea Mays
ggaatggcggcctgggaaatagcgcatgagttcagctgaggcggaagccggacggagagggcgaagaaggcgtcgacagtcgacacgagaagcctcggcccgctcacccctgctagcagcatattttcctcgatttttctgtttagtttttctcctcagaaatttaaaatagggccttttgtgtgtggttaggatttgtcgaggaaaattattggatgacacggcacctttctattcccttattttggcacatacggcattgtgttagggcatggctgagcccgtagaacggtttctaaataaaagat

SEQ ID NO: 199729 - DNA, 1240 bp, Zea Mays
gaactacttcaatgacaatcaaacagcatacgtgtttactgcagatcatggaatgagtgacaaaggtaattatacatcaaatggtttcacaaatatattttttgctgctcatgtttatacagtttttttagagctagatttcttgccagggtccaggatgtcagaggcaactggctggttatgtttttccgggagagtgtggcatctcagttgtcaccaccaggaaactgtaaaactgatgagcttgaaacattccattttagtttgaaatttgggaattaaattagatttgaatactaccattgtaccattccccatatatctttccaccttgacaacgatgattgccaatgagggaaatgattgggttgcggtggggtactaggccctatcggtcttcttaccctgggtggacggatgagctagcgctttggtgttccgtcgtaaatcttagtgccatgtaatctctataagtatacgtctgtatgtctgcgcctgattttgtgttctccacctctttggtatttctgaatatctcgcccatgggccaaagcgctgtaaaactcttctctcttaaggaaacacgtgcatgggcatgttcataaataaactcaccttagcaaaaatacagaaatgaaaataaaactattccactgcaaatctatgaatatagatgtgggaactgggaagtatcccctaatcagcagctgcccaaaatgaatggcttattggttgcagtaattcaatctggattgcacaatgaattagttgcattacctacctataaggttactcattttatgttctgtagcgcctacacagccacattctttagttgtattgacaaatccaatcctgacatgtaattctttctagcacactaaatttaattgcacacttgcaatttatggtttatgcaatgctgtcttgggtcaatcacaagggtgagggtcattgacccattaggctattactaattgcaaaggcttcatttttattggttaatttgttagtatgttatgttagtctcaatattactcctttattatgatgccaaaatgataaagcactgctacctacaggaagccatggagacggacacccttcaaacacagatactcctcttgtggcatggggtgctggaattagaagcccaaagttcctggcttatacagagaaacctgatgacggctttcggtttgtagataaccacaaacatgatacacccactccaaaagac

SEQ ID NO: 199730 - DNA, 316 bp, Zea Mays
cagaggcgctgcgctgagagatgatgtcagcgagggcatcggaaagggtgccaagaagccaagtgcggacgacggcattcatgcgaatccaatcaggtgactcgggaaaaacagaatcagagaggacgtggcattccagggaaaatttggtgagggtgagaaggaaagattcggaccagcgggcgtaaaagttggagttggtgtcaaggagtagagggacaagagcccggatgttggttactgcaacagcctgggcgtgaaggtttagcagcgtggctgcctcgtggtggagaagagcagcatgcagagttgcagg

SEQ ID NO: 199731 - DNA, 483 bp, Zea Mays
aaatgtcgaaaaacaaattgctagtactcatccacgcccagcctttgaaccactgtgttgcttatgcaccccaggcatgcacgaaaagagtgatggtctctttgactttgagccaaacagaaaagctctaaggggaacaccacctttcgttgacagggtccggaagttttgttgagttcggtggcttcttgcaatagataccttgagattctctctaagcttcaagatcacccttccaagctccacttgaaggcctcttacatggtccagcccagcttctagctccttagcgactttgttattctcttgtttcatattaagcacctctccttgaaattttgcagcttgaaaagggttgaagtgaacttcatcacatttatctagagttgtaatctttgatatgtcttcttgtatgctgcatagtgatgaaaatctgttctctagctctcctttcaatcgcacgttcctttcaatccaaacttg

SEQ ID NO: 199732 - DNA, 669 bp, Zea Mays
attgaattgaaacttacgtattttcatttgttctgatacttttcaacaggaaaaattgaaagaaaaaaagccgacaatgacagaagcactatctcaaacacttcaagcgatgcacaagtctggctgttttacacttattgatgtgattgaaggtttgtaattttctagcaatctttatggcagatgtttgtctgtagcattattttcattgttgtgtttttttttgtctgaatcatattttgatttcctctaaaagactaaaacatattatcgtgtaaccacatttctttcgaaatgcaccgcaggtccctataagtttgtatagtttgttctctggacatgagaattgtgtcatttaagtttccaaaacgtttttgaggcaagattaagtctgaattaattttgaaatatttgatgacatgacttttagatgccgaccttttgtattttataagtgaaatcaagggaaacctaccaaagtttggctagaaaagaagcatttacaatcctttttgaatctcaagacatgaaccttttagttttgatcaaaatctgaacaagaaaatgctgtcttttgataatgcagatgttcgagtggctgtaaaaaacaaggtgccccttgttcgttcctcaacgctgacctgggttgcattttgcattgaaacaagc

SEQ ID NO: 199733 - DNA, 364 bp, Zea Mays
agaaggtgtgggcattgtagttctatcaagcttcctgccattgtcacactagatggccttaacaaaggcgctgaactaagtggagacataaggaaagaaatatagagagtagggaacatgtacaacttgagtcgcggtggaaaaattcaaagaaaatatgagcaattagcacaaataacgaaattatatttgtaactggaagacacctacaacagatgtccacaagtcacaatgtacatatgagatgttgacacactaaaagaaagatgaacaacacgactgagttgacacgcgtgacatatagctttcatatctttattacaagactggatggcagaatcatgaacaagtttggttagctcct

SEQ ID NO: 199734 - DNA, 529 bp, Zea Mays
gtccatggaattcaccatctgatgttgacgtagtagaatatggtggagatggaacaatagtatctgacatgttttccttattgtcactgtgtggatcatatttaaataaggaatccaggcagaatagcaatcagaaatgcaaactatccaaccctcatgctcttgtagtgcactgctgccttgcactagcgacaatagctgcatgtttgaaatcagagggaggatcttcagcatcacttgtcctaacaagttcccagaaaaaacagcggtcccggctctcagttcttgcacacctctcatcagttgatgatacagtgaagagttgcctgcagccacactgtgcatcagcaatgcttgcgctctcatcacttgtttctcttgaaaatggtggacaaaccagatcgtctctttgtgaaactgcccttgctttgtttcctcgtatggcaacactgcacacactgctgaagctttggttatctgatggaagcgaggcactgtgtcgatataatgctggtcttctgaatctttt

SEQ ID NO: 199735 - DNA, 313 bp, Zea Mays
gccgaatcagctgagcaaagatgtgacacagatagtgagcataaggcagctgtcgacgagcacgtagaccatccagtacggtgtccttgatctcacaaatgagaaaatccacaacatcaaactccgagtgagaaactagggcaccaaaaagccaaagctgaatatgagtggcattctccctgtaacccatccgtggcagaagcgtccgtctcatgagctgatatagaaacctggccactgtggtgaagtctgccggagaacgtcgcgacccatctgagaagggcggtcggaacaaagccgcgacgtgagctgt

SEQ ID NO: 199736 - DNA, 1304 bp, Zea Mays
cgcagacgttttgacttttgagcgttgttgatacggtcactctttccccagttcctctcccgcgacatctcagttcttcatcaccaaaagatggtcggcggcggcaacgagttccgtttcttcttgtcctgcgacatcagccacccgcttgccttccgtgttctccacgcaggtacgtcactactatctctcttctccacctcaatttgcttgccaattcggccctgatgtgctcgccgtgctaccaccggctacaaaaactcatcgttttccaatgcttttcactcaacaaattcgcccccaacagcgatctgaatccaatattcctatattctcatttgcagatttgtaactgctaccatcacaggatttaactgtttgtactgttattacactgcgctgatctcttttcggttctaagtgcttatttggataccaagggctaattgttagagcaactccaaatgaacgtgtaaactaaccccaaaacagatattagtcaagaatagtggtttttcttactccaacagctccctcattcttcccccaaaaaattagcgtcccgcatccatagcctcctctccctcatattttggtgtgttccatccctccccaatccattcctcaacgcatcggatcatccacagcatctcgacgactgtacagattgtgccacatgtcacatttaaaggaactgttggagtacccatcataattcactcttaatattttttagcatgctcttaataatcaatttttggggtaaaatttttaacatccttttggagttgctcttagctagctaaaaattagccaaaattagctctagccatccaaacaggggctaataagtgggttattatttagcctagcctccaactaattgttagctggctaatttggccaaatttttagtctcagctaataactagctctagctgatccaaacatgccttaattcaatgtttatcttcgttcctccacactacctgttttcttctccttaatgcatctcaatcctccacactacctgttttcttctcaatgcaatggtacacagctttcatgcttatttgagaataccggtcagcattttatcccataggagaagcaaaattttttatttctttgttctatactgctgtaaaaaaactttcttgagttcgctagtatgcatcaccataattaaaatgattaatatgttgttcgtctttgtcttacacacacaaatacacatatatatttcacaatcgtcaaaatttcctgtttccagaacatatcttgttgaccgaccaaaaagtccc

SEQ ID NO: 199737 - DNA, 286 bp, Zea Mays
attcgctgcattgtccttttgattcgttgtatgctagtcacgaaaaagaaaacacaaacaccttagaatcggcgattcagtcccccttgagtccccgactccccactcctgtctcgactctttacctaagcttctgctcggccccatccccgtgcgtctcctcccggctttcgtctcgctctgagctcgcctctaccatggcgactagggtttagtagcgccgcagcctccatcactgccatcctcaactccgtaccggatccggaagaggcgtcggttcgtcctc

SEQ ID NO: 199738 - DNA, 675 bp, Zea Mays
cacacatgcctcggcttttcagctttctctcttcagataaccagggtgtggaagcttactttcatggccagttcttggtggtggagagtgtgggtggtaggggtaagaaagcttctttgcacttcacatatgcgttcaagcctcagtgctggtattttgttgggttggagcacacaaacaagcatagtttgctcggaaaggatgacagcgaattgagtctgtatgttgatggaagcctgtatgagagccgtccttttgagtttccacgtatctctaaaccacttgcattttgctgcatcgggacaaatccaccaccaactattgccggcctgcagaggcgccggcggcaatgcccattatttgctgaaatggggcctgtctacatcttcaaagaaccaattgggccagacagaatgagacgtctagcatcccgaggaggagacacactgcccagttttggaaatggcgcaggcttgccatggaaggcaactaatgaccaagttaagagtatggctgaagagagcttttcactcaacaatgggatagggggaagcttgcatcttctttaccatcctagtcttctcactgggcggttttgtccagacgcctcaccttctggttcatcaggttttaactctccacatctcctacctctgtacttagagttgactatat

SEQ ID NO: 199739 - DNA, 296 bp, Zea Mays
cgacgctcagttccggcacttcgtccaaggtgatctacctgtctccgattactgtcgccgtttcaaaaccatggcagatgccctcggtgatcttggtgaaccagtcaccgaccggacgttggtcctcaatgttctgcgcggcctcagcgaccggttctccgacatcgaccgtcatcttcgcctcggtcgcccctttccgacgttccacgacgtccgggccactctcctgttggaggaactcacgatggcccatcgtgcgtcttctccatccgccgccctgcttacctccaccaaac

SEQ ID NO: 199740 - DNA, 492 bp, Zea Mays
taaggtggaagttgtcgctgctattttgcctgcagcgcacagcagcgccctcccacatgccctgactgagaaggatcagcagaatgtagtcatccgggagaatggagaggcacaattgctgggcgatgcaggcaagctgtcattggatggtcagcaagggaacaatgtggtgcaggtagcagtactgggtagttcgagcaccgttggtgctagttatttgcagaacggtgacaaggggggtggattgttggtggctgaggagaagggacgtggtggcagcagtgatgtggggcaggaggttgctgttaatggggatgtctcagagattgcaaacaaaacgggcactggtgagttacagagaaaggaaaatggaactgcaggaagcagaacaaaacggtggtttgtatcctctctgaatcctccacccaagaggagggaagtctcagccgtacgtagatttccacctggctgtgggaggactgctgttaccac

SEQ ID NO: 199741 - DNA, 438 bp, Zea Mays
tctggaagccggggtattcacgatagggtttccaccgtgcccgcgcctcagagctctctcccctcgcaacgaccgccgccgcctcctccgccgcatcgggtcgggggcctcgaccacactcccctctgctcatccgccgcattcctcgtcgtcttctcaggtacgcggttcatttcctccattccgttccgtatccgctcgtcgtcctcccccggctgcctcgtttcgaaaaggtgcctgaccgttgacgtcgccatggttttgcccgcgccgccgcaactccgtcggcaaggttggactcctccgtatcgcaactcgtcgtcaaggttccactcctctcgtatcccaactcctcgtcttcacaggtacattcgtaacttccatttctaccctatctcctcccccatgtgctgttacggatccggtcctcccccatgt

SEQ ID NO: 199742 - DNA, 389 bp, Zea Mays
aggtagagccgtagaacattatctcataagcagatttggccgaatagataccattggaagagaacctccaataatgtttatctggaactcccggttgaagatcaacatcagccacaacatctgccagaataatgaagtcagcaatgacctcccatgttaccactccccttaaatccccaatccatgaagagctacacagagcatcagccattgtccttctcttcaccagccttttaggaaccaaactaaaaacatgaggggccaagtctgcaatcctctgacctaagagccatctgtcatatgccaaaaaagagtggactgtccatcacccactatggaggccattgccaaagagcacaagctatccaagaaccggtttgattggaaaa

SEQ ID NO: 199743 - DNA, 376 bp, Zea Mays
ccctccgccacggcaagttcctgtctacccagtggtagtcgaggaaattcctgtggatctccctcgcattcgagtggagtacatagtcattctggaggatagctcggaggagtttctgcctacgcccacctcattggcagaatcactagccttcgcagctagatcatcaacctcaacaccgcctgcaccagcagttcaagcccctgctcctggaggcgacgacccggatgactcaggggacagtgatgaagatgacgacgaagaagaagatgacgaggaaaacatcaacgaagaagccaacgaagaataacacgaccactacgtggggttatggcctgtcactgaacattacacctcaatgtttgagacatggcac

SEQ ID NO: 199744 - DNA, 310 bp, Zea Mays
gatgtccgtagctttttgggcatggcgggttactatagaaagtttgtgcctaactttagaatcattagtcatttgtggctctgaaaacaacactaattcaagccccggtattggctattccaaacttacgaaaacaatttatcattgaaacagatgccagtgggggaggaattggtgcagttctacaacaggaaggacaccctattgcatatataagccgagctttagggccaaagaacctgggactgtccatttacgagaaggaatgcatggctattctctttgcagtggaacaatggcgctattattt

SEQ ID NO: 199745 - DNA, 2933 bp, Zea Mays
cgacaagcctgactcttctataaactgtgaggttgtggcctttataaccatgaactttgtagtgaagacaagtactgtgaacttgtaaacttgtctgaaacacaccatttaaccatcaagtattaagggataatttagttgaatgccaccctcaagtttgttattcagaaaaataccagttgttgcgacatggctggtaggtcctgagctcgctggtcaatgacacattgaggccccatgtcggtatttggtaccggcagtgcaccacaggatgtatcacaaggtgttttttgtggttgacgaaattgactgtagcttgatggttcgcgtggaaggtgacgtgacacgagaattatacaggttcaggccgccgaaagacgtaatacccatcgccctgtgtgttgtggtgattgtattgcttgagctcgagattgcattggtgtgcagacgattcaaggttctggtatgagatagctatgagatgggatctaccgatgaatcatgggggtccccaacctgccttatataggctgacggatttagggttacaagttagtttctttcctcatcacaagtgtgataagtcccgcgatctcggggatttgttcttgagtcgcccgtgagtcctcgcaccctccttaatggaaaaatccgtcgctctgccttgatctccaagccttcatgtcgtctttgggtttgagttggtcgatcggtccatgaaatcatctgtccgacctacttagacccttcaacagcccatgtacagaacccacgccatgaggacctaggggatatctatcccccacaccccatgcatagtatcatattgttatatctatgactgccatgccacaagaacatttatcgaaacaactctactctatccagtcagaaatattgtggtgttttgggattgtctgaagtgaactattctaaacttctgctactacttttactaaaatattgtccaaaaatgtactcatatcacttgcaaacattcaaactaacacattaattgtaggaaactaagcaaggtccggtattgttgctttcagttactcagtcatttcctaggtttccgaaatgatttactttctgtatatattttgcacaaatctttcatctggtacacaacaatttaagtctatacggtttcctagtattttggatttctcacccaggtgatttcttaaataatatactcacctctctcctctttaattgcttactatgccaccagaaaatcctatgtcgcacatgataaatgtgcttgttactacccaatacccattgggtttttaattaactgaagtgcgagcttttgggtggcatgtatctgtaaatcctatgcaactgttttcttgactatctttgttctctggatgattatatggttgcacctattttttttttgtccatagcagttcttctaatagcctgtttttgttttagtccttactgcaagattacaagtaacacaaaaaaggttaattggaagctcatgatcctatgtcatatactcatttattctctttgcagtatcttgctgtttctgcgcatcctcctggttcttcttaccataaacttggcatgcccttaaccgggagaggtatcattcaagtttggtgtctgttagcaccatttgaagattcacattctcaccagccagtgaatgcattcaataatggtaagcaaagaggaaggcctagaaaaataccttgtagtgataagctggtacctgttccaaaaggaccaagggggaggccaaaaaagagatcttacgatgatcagttagaacctgttccgaaaagaccaaggggcagaccaagaaagtatccattaccagttgcaaaatttgaaggttcatctcaaaacggtgaaagtcaggatattattctttttgatcccctttctacttcaagttttattccagatgacctttcattggcttctgtcatgccaactgaaaagtctgtgcaatcaacacctaaaagaggtagagggcgacctaggaaaaacccaagtgacaaactgacagactcatctggtattgtatcagaagatgtgtgtacagccctacctccaacaactgcaatctctacaaaacctaaaagaccacgggggaggcctcgaaaatatccaattccaatgaatgatggatctgtttcaggcgctgatgttgaattagggaaagagacaacttgtcagactgcttcatttggctgcagtttggaccacactgcttgcacagagtttaatgccaagttatgtattgttgcagttgatgcagcattgccacctattgacaaactgacctgttcacctggtactgtatcaggagatgtgtgtacagccccaactctaacaactgcaatctgtacaaaacctaagagaccacgggggagacctcgaaagtatccagttcaaatcaatggtagatctgtttcaggcactgttgctgaattaggacaagagtcaacttgtcagccagtttcatttggccacactgtttgcacagagtttaatgctaatttaagtattgttccagttgatgcagcattgccaattgtcgacaaactgtgcagttcatctggtactgtagtaaaagaaagtgtgtgtaccgaaccatctccagcaactgcaactcgtaagcaaccaaagagaacacgggggatgcctcgaaagtattcagacactatgattgacctggggaaagatacaactggtcatcctgttttatttggacgcagtatggatcacactgcttgcacagagtctaactctagttttagcattgttgcagttgatgcatcatcactgtttgcatcttcatctactgcaacttgtgatgataagtcaaaaggtcagagcattagagggaaagataagaagaaaacaatttctaatgctctatattgccctgtggtttctgg

SEQ ID NO: 199746 - DNA, 543 bp, Zea Mays
taccctcggtccgtcttctccggtgaggttttacccctcttccgaaggcttgagagtggtagggagaatggaggaaataactgtgttattgcttgtctctcaaaggagccagctacaaggctttatagcctacggtgtaacagaaaggggaaactaatccctctgatttaggatctctactaaaaggaaactgatctctatgatttaggatctctactaatttatttcttcttctagccgcccttccttctatagaggtggcggctgcatgtcctttgattctttccttcttctagccactgatttcttggctttccttttctgctgctgacgtggcactggctgctgctctttctgcagcgcgcctcccgtctcttgcgcgcctccgacggttataggggaggccccacatgacaggttcctcatccatcgccagtgtgctgttcttggaggttgaccaggtaggtctccatgccaaacaaaacagccagtgccgttatatgtgtaagcactgcagctgcaactgttgaagcaagtcacctg

SEQ ID NO: 199747 - DNA, 320 bp, Zea Mays
tacctttagatttttttttgtgaatgtagggttcaccgaaggtcatgaggtccaccaaggtgactttgctttgcgggggtagaccctgtgatatggtagggcaaggctatggataccacctctctatcgaagactgtgaatgccatcaaagggtctccacctatggtgacagtagacaggcaggctccgtcagcggtgttagatatccaaaggctcaaacgaaggccaagggtacacccgaaggcccagtcgactagtgggcaaccctgaaggcgtcaaggcctttgatctcatcgctcgggcaccacgctaggtccctg

SEQ ID NO: 199748 - DNA, 1613 bp, Zea Mays
gtgcttctcatcctgattatgaaattgagttgagaggctcaccagaggttaagattatgcattctttccattggatgggatgttacactgatcttattgtgttaaactgttaactaatacattttattatgtacagattgacctgcgatttggaaatgccgtggcagatgatgtcttctttgtatctggttatgacatttatggcactgtggttgcacaggttggaagctgaatggttcttttattgataatcactaacgctacaaccatatgattgcatgtctgtgtttaaagtttgatctgcattgtttagcaaatccaaatttttatgttgaacatattctatgtattttctttgccagggaaatccaatagtgggagtccacctatatttgtattcaaatgatgtaacgaaggtcccttgcccacaaggtttcagtgatgcacccaaggaaggtgcactttgccatgcaatatctggtgctgatgggaagttcacatttagatcactaccttgtggtaagttgataatttattgaactaataaaatgtcacctcagtgcaatggaattgttatgtcaaatttcttcttcatgaaagttgttcaggatttcgtgatgacaattgagtaattaacacatgtacattggatgtcttaaagtgcatcaatacatgaagtatcatttcgatctataacttgttcatctaaatacctctgttcatctagctgtatctggtgctgatgagcagaggtattttaaataccaaatgcaggacaagctattttaaacaaactaattaccaaccaaatattttctataccacaaaaccgattcgttgtattcatgcagcaccagtgttaaacattttaattgtttggtcctgttcattgggaatcctgttctgctctttctgagtctctaactccctatgtgacattatttgtttactgttttctgttatatgcaggtagctatgagttgttgccatactacaagggagagaacaccgtatttgatatttcaccatcttcactttctgtttctgttgagcatagtcatttgacgattccccaaaaattccaggtactgcctgaaattgattcacatcttatagtttcaggtatagaagtttcagtgaaagaagtttgcctcaggatgatgaaaaaataaatatctattaggcccttgaggaaaatattatttggatttaagcacctgttggataaacatttatgcattcagaataagaggtagtagaaatgacaaatggatatacaaatagaaaagtatacatgattctatgagttaaagctattgcaaggttggctgggcataagtttctgtattatatgacagttctaggctctttttttatttaaccgattgatattcgttcatgtgctctatttttgtttatgatcctcatggattgttcatatggttactaacgttttaagaatttcttgtataaatttaactaggtcactggattttctgttggagggcgtgttatcgatggttatggtgctggtgtggagagtgccaatgttatagttgatgggcagttgagagccataacagatagtcttggatactatagactcgatcagg

SEQ ID NO: 199749 - DNA, 826 bp, Zea Mays
gcaacagtaaatttttctaatctagctggattgaccttattgtaagtatttcattatatgccattctacaaatatctgttgctattgcttttctttcaaaaaaatcaataggagcatcttttcaagtaatatttatgtctcatggcacagggacttgagctttaacaatctcacaggccaaattccacagtccatactgaacttggacaaccttggattcttgtaagggattctttgaagagataatcttcataatacaactgaactcttacgctgacacttgtatgttttgtttgtgatgaacattaacaaattcaggtttctcggaaataacagcctttctggaagcctgcctgatattaaaagcccttcactaaacaatttgtatgtcaggaaattttagtgttgtcgaacataattttatatttttctaattactgaaactgtgtatttattttatctatagtaattttttatttttaccattttgtagagatttttcttacaaccagctctctggtagctttccttcttgggctacccagaataatttgcaattgtaagttgaaagtacaaaaatttccttgaagggcaaaaatatatatatgctcaaggttttatcactcggttgtttgacaagttgattttttttaaaaggaacttggtggccaacaacttcattcttggtagcagcaacaacaggtacttttaaatatatagccttccgagagttgtattttttaattgagagcattaaccttcttattttcttgaaatgagcagcattctgccttcaggcctaaactgtctccaacaagatattcct

SEQ ID NO: 199750 - DNA, 349 bp, Zea Mays
gaaacatgtattgtttgtctggaccagcgagcacgatcaagcatttcaggcattaaagtcagctctttcttctgcgccggttttggctttacccgactttaccaaaccatttgccatggaaacagatgcttccggcactggcataggagctgtgcttacacaggagggccaccccttagcatttgtcagtcgcgcactgggtgtcaagaatcagggactttccacttatgagaaagaatatctcgctatcctcttagccgtcgatcaatggcggccatacctgcaacatgctgagttcatcatttatacggatcagcgcagtttgtcacacttgactgagcagcggctg

SEQ ID NO: 199751 - DNA, 382 bp, Zea Mays
gcgagtcgtgtcgctgcacgtgggcccatgaccgagcttgtcttccacctggggtcgttgcgggcgagcgctagaagtgccgggattgtagcgaagccccatcctcgatgctagctgcgctcacgcgaaacagtgtctcactgccggtgggactcgttcggctctcgacggccaggatccctccgcgctccctcacttgcggatggtcccattcgagcagaaggtctcctagcggagaacctgtggcgcagctgggttgccgtgaagttcgcaacaaactcaccgataccgggggggcttccatcgatccaggtccttgctccactggtataaatatcgggcgcccgttatcccctcgtgcatctaatccatctagccgtgc

SEQ ID NO: 199752 - DNA, 278 bp, Zea Mays
gaaatactacgacgccaaccaccgcaacgtggagtatgctgtgggagactgggtttggctacgcctgctgcaccgaacagcgcagtccttggacccccgtgccaagcgcaagcttgggccacggtatgcgggaccatttcaagtggtggaacgcatcggcagcgtcgcctaccgtctacagcttccggacggggcgcgcatccacgacgttttccacgtagggctgctgaagcctcaccatggcgaacctccagcaactccggcctcccttccgccgg

SEQ ID NO: 199753 - DNA, 347 bp, Zea Mays
aattggaggacaacatgcctacttccaaaggcatgcactttggtgtggatgactcagatgatgtggagatctatggtgatgatgaatttgtagaggggatggatggaaaggagatcgagctttttgattatgcagctttaatcaagcttctaagggctgcaagcagctcacctgaacaaggcaaggctaaggttttcccagttgaatcttccgaacccaggcgtctgcctcctactgtagcaagcaatactaggacgagtgtggcttctgctcctgtgccagaagtaactgctgaccttgagaaagagatgacagatgaggaaaataagatatacagaaaggtggac

SEQ ID NO: 199754 - DNA, 298 bp, Zea Mays
ggttaatgcactcatcaaggcagagattgtgaacacaaggttgatttgtctgattgtgaacacaaggttgatttgtctcttatggttcaggttgatgatgagtgattctcaatgggtagcgtcttgggttgactcatgtggactaatcgacacgtgggtatatgtttgtgcaaccatgtatctcagcttgtggtgtgcacgtgcagtatagggatggtggtcgatggtgaaggtcaaaatcatgcgggttcataccgatgggctaggagcggcaaaggacgagcattgagtcttgatc

SEQ ID NO: 199755 - DNA, 713 bp, Zea Mays
ggcgcggccgcggctgctttgatcccttgccgcctgcctggcctgggctctcgtaccgcaaccgcaatttgggtgagtccacgcttacctgctcctgccattcgggctgtttcttcccgcggtttgggagcgagagctgcgtgggaaccttggctcttggtttctcgctgttcctttttccgtgcttttatgtggagtggaggtaattctcattgttttcgcagcggcgtgcgtgttccttgcctagattggcgtgatccagctctgctccaaccgtagaagtgcgcgcacttgctgctagctaaggtaaaatctatgtttcatcttttgcttgttcatgagttgctactagatcaattttttcccttttttctcaagagtctgaatcgcaaggtcatgccatgcgcatgcaccaagcaggagtaacgactccttttgtgatggaaaacttcctattaggttccacgcctacccatatacacccccaaactttgctaattctagtgaaatctccaggaagcgcccttgtgtctaaacaactcctgatggaacttctgagttctgacccttacctgtattcctgatttaccagttctgcatggtttcttctgtcaggaattcaaacatctccttgtctctgattttgctgttctttgcatccttgacagaagcatctgcagtgatcgttccaggctcgtgaggaaactcatttg

SEQ ID NO: 199756 - DNA, 331 bp, Zea Mays
cacaccgaaaaaaacctaaacacattggccatagcccaagcagcagcagaacaaccaccgtgacattgacgcgaacactctaaccaccgcacgccacgcatgccatcgccatccaactgattctgcacttgtgccggtagtgtacacgcgcgcatgattacatatggtagcactgggcgtctaggcgctagcacaaacaaaggactgctcgccaacatgcactcaactcaggcatggaaacatacctgcatctcatgctgtccaaaaatggattccatttgcggatggctggtagatagatgttcaatgtcgatacatcaatatccaaaaa

SEQ ID NO: 199757 - DNA, 664 bp, Zea Mays
ggcggaccttctccgcgaggtggtctcccaggagcagggcgagctggctcactccgtcgtcgacgtgctgctcggcaccatgggcggtgtggacgaggcaggcgacgccaccggcaccggcgctcctcccaccgtcatgatcagctcgcgtgccgctgtcgccgccgctgagctcctgccttatctccccgaagacgacgagccgtcgccgcgcactcgaacagccttaggtctgcacgccgccctccgcgcctgcactcgcaatagagccatgtgttcttccgcgggcctcctggctgccctcctcgcgtccgcagagaagctgttcgtcgaaatggatcagggtagcagatgggacgggacgccactgcttcaatgcattcagatgttgggtgggcactcgcttagtgtgaaagacctgcattcctggcttgatttggttagaaagtcacttggaacgagctgggccacaccacttatgctagcgcttgagaaggccatgggcagcatggaagcaaaaggtcctgctgtgacatttgagtttgacggggagagctctggtctgcttggcccaggtgacagcaggtggcccttcttaaatggatatgggtttgccacttggatatacatagaatcattctcggatacccttagcacagcaaca

SEQ ID NO: 199758 - DNA, 328 bp, Zea Mays
tggtgatgaagactattgtggttatgactatagccttgtagggcagctttcagaagttagaattgtttacctcaaccgttttgttcaagaggtatggtgtttctagcttatttagtttcttaatcctacaaatgatttaatctttctccctcccttctcttggcgtgtgcagattatcagttattttatgggacttgtgccaaaaagttctgatgccgttgtaaagctgaaagacaataagactaactcagagaagtgggttagcaaaaccgatatggaaggatcacctgctctcaaattggatgtttcattcagcaggcctataatt

SEQ ID NO: 199759 - DNA, 348 bp, Zea Mays
cttttatactaaaaactattttctatatgaaattatcctattttatctagttcaggactgcggccactaatatcacagagttcaggggttgttttatgaatttcagggcacagatataaatactttacacagggcacggacggcgggttttaattttaataaatccagggtctcattagcaaaaggggcgggccgaagagttatctttgatttccagtcgttcgatcacaatctgaccgaccagattagatcgaccctgatataaatcggtacgcgcacgctatccctcggatcaaaatcctacgatcatgatttaacgtatcacagatctaatccgggccgagtgat

SEQ ID NO: 199760 - DNA, 280 bp, Zea Mays
gttctgttttcaaagcaaacgttgctgttagcaatgtaacttctaatggcattcaagtttacccacatgtctatatccgggtaatgtttttgcgttgtatatttcaacatgcaagtctatagtattaacccatactgaaaagaatgaaatccatgttttatataggtaactgatcaaacatggagactaaacattcatgaacctattatttgggcactgtttgacttctacagcaatcttcgttttgtcaccaccatcaacagcacaactgtcacggaag

SEQ ID NO: 199761 - DNA, 364 bp, Zea Mays
ctaaaccacccttgaacagcaagcaagaggatcagaaacatggtaacaccagcactgaggccaaattggcttcgctatatgcatatcgcaaggcacagggtctttgttacaagtgtgggctgcagtattcaagaggacataaatgtgctgacacagtacaactgcatctagtggaagaattgtggaacatggtgcctatagccgaaccagaattgattacctcagatgatgaacaagaggctaagttgtgcatgctgaccctgtctcaagcagcagtcgagaatggcaactctcctcgcaccatgcgattcatgggtcatatagcaggaatggagattttagccttgttggactcagggagttc

SEQ ID NO: 199762 - DNA, 286 bp, Zea Mays
gaaatgttgacatggacattgctgtgggtctaatctctgattcacatgctgttctgaaacaagccagttgtgtgtcaaagaggggcaggaaaaaggatgaaactgggagtggtggctcttccatcaagaggaagaagcgagagaatacctcttctgctgctacaattagcactagtataccaatcactcctgctattcctatcaggcaagtgaaagaagaagatatgagaaccctaatgaaggcgggaagtggtccaaggggcatagaagtagatgttcagaacga

SEQ ID NO: 199763 - DNA, 311 bp, Zea Mays
gtctaggacattattatgcctcagggacttcattctcagaattagctcaatgtccaatcaatatacaatttcttcaacatacacatgcatctgagcattttttaccgtttctcattcagaacatagaagatcgcactttgcagaaaccgacagtaaaaaaccttatggaggatgaattggaaaaattaatgctgctgaagaaatttccaaatgatgaggttcagagaagaaaagccgacctgggaattgatgtctctcttgatacgatttcagagcatacaaataaatcaacagataactcatatcaccag

SEQ ID NO: 199764 - DNA, 445 bp, Zea Mays
tcctacggtccttatgcatcttcttccttagtccgagctgggcgatgccttgtcccaaccgcggtggcggcctgaccgagccccggaccaccgttgccccgatgaccaccgatgtacggaacccaaatgttgtgacggcccgaccactagcctatccacggtcatacaccaggaaacagaaacagtgataacacaggcggaaaagtacttactgacgacgaccctgctacgatgcctaccacagctcaccgaccagatgaaccttggaaccgataggaaaatctgccaagtcttcggtgtcgttcaaagctcctccatggcactggatcggtctcccagatccggcgcccaggatcctggcgacgatgtgcctggtgtcctagttcctgcgttcatctctctctgcccaagcgtctgtgttttcttcgtgatgcccatgatggcg

SEQ ID NO: 199765 - DNA, 508 bp, Zea Mays
atcactctctcgttttgcagacgtaattgcactctgcgttcaggtatattcttgatttgtgacacatgttatgttattgatctgtaatggcgctctcatggtggcctaaaaattaaaggggaaaaaatcattcgtggagaaactgtcttgcagagtagtaaaaaaaatgctaatatttggagtctactactgtgttgggtcatgggtgcttaaccaaacaaaatcattcgctgttaagttttacttgttcatttgggctcctgtttttccttaagtacttggaatacttatatgtcttttgtttctgcagcctgagccagagttccgcccacccatgtcagaggttgtccagcaacttgtgcgcttgatgcagagggctagcatcgtgaggcggcaatcaggagaagagctagggttttcatacagagtcccagaacgagaaggagacctgagagacatttccttctgagcaagtgcgtccacgatagaagcgcaaaacagtttggag

SEQ ID NO: 199766 - DNA, 330 bp, Zea Mays
attaaattagattgtttctaatcaccaaccaaaaaaccgttccatgttaaaaaatggcttgttccaggtataaaaccgaatgttgtaaaaatgaagaattgcatagagaagatgagtgggtggtgtcaagcagtggagcttgaagctttggtaattgaaggatggaggctcaagcaacgtgaggatgaaaaaggagcaggcaggctatcatggctgacattgagtgaattgggctgacgtgatggtcctcggttctgtggatggactgcgtggggaataaaaagaagattgtcacgtggatgacttttagttgccgcagccaaattcacg

SEQ ID NO: 199767 - DNA, 651 bp, Zea Mays
tttgatcatattctgcccgcctaattgcacctaactgaaacccagcactgtttccgtctgcttgattgcaccgtgaggagtttgctataaggaatctgagcatggtgatcattttttggtaatagacttgctcgaagtcgtcgaccggagggccaagatcgtggcaacagaactgtcggatgagcagtctacctctcagccttcaggtagcgtgcctccttggtttacacgtgcccatttagccatttggcaggtagtttaatctctgcttgttgatgcttgtttgtgaaggaccaaacaaccaagaagtgcaagcaaagaagggaaagccgagggagaaggtcactacttaacagccttcttgagcatacttgtttctttacataccacacatgagtcatcgttcaagctttggcattaatttttttgcagggtccattgaagctcactaatgccgatggtggcaacaagatatctgctcagaaggaaaagaggagtaggcaacggccgcgagagcggatgaagatcgagaagatcaggccttcgccacctgcaggttcatcaagtgttgataccagtgctagtgaaccagaagtcactccgatcgatgttaaggaagtgggtaatgagggtacattggagaaaggagag

SEQ ID NO: 199768 - DNA, 307 bp, Zea Mays
gccttaacgatccctctcaaatgcaacatgaatgaagtgtaatttaggagagctagcaaaactaaacttgaaaagaaaatgaaactaattaatacatccaaaatcaaatatgacatcaaagcatccaaaataaatgttggagcggtattggatgactgtattgatgccatataaggagtatccacatagtacatgggagactaatggagggaaatcctagaatacaagattacactaatacctttgactattacaccttatcaatgaccacactattggctacttgtataaaaaatttacaatggac

SEQ ID NO: 199769 - DNA, 460 bp, Zea Mays
gcccctctttcttcatattgatttcttcagctgcctttacctttgaatcagagccctttatttgcccaccaacatcttcacattgcttcttcatattagtcacgaatgcatttgttttccctttgttctcatcacattgcttcaacacattcacacaaaagctatctcttttcccaccgatctgcttggcctttgcatcaaagctctcccttttcctgccaatctcatcagtctgcttccccttggcatcaaggtcacctcttttcctgctgatctcatccgaccccttcgccttcgcatcaaacctcgcccttctaccagtgtcatcactaccagcgccagcactccctctcctagcctcggaggccctggatccaacaacactaatcgacctcctccctttctctacagaagaagccctgatcccaccactgacgctccgccgcaagcctgcctccac

SEQ ID NO: 199770 - DNA, 335 bp, Zea Mays
acagggcgcatcttgatcgctgtaaatccttttgcaaagctccctcatatgtatgatatgcatatgatggaacagtacagaggtgtgcagtttggtgaattgagtccacatgtttttgccattgctgatgcatcttacaggtacggaacatggaaaccagcttgcagtgtgttagcgagaaattagaatatggagttttacatggtatatttctctttcttgaagagcaatggttagcgagaactgcagccagtccatattagtcagtggagaaagtggtgctggaaaaacagagaccaccaaactcattatgcgatatcttacttttgttggcg

SEQ ID NO: 199771 - DNA, 369 bp, Zea Mays
attttggttagttctgctaatggctccattagtagctgttcagtttgtcaggggtgttccgtcattcttgctgatgaggtcttttcggtcaatctggtggtgatttccttaggggcattcgatgttatcttgggtatggattggttatcccagtatcacgcagttatatcctgtttttggaagacagagttattgcaggtgccgtcgggtaaggaggtggtattcttgggaagttccccaaagttcacgttatccttgctggcgcaattgcttccagatcaccggtcatggaaatcagggatctttttctccatggtggtcgagggtgaggctgccttgcgggtgcaggacatccgggtggtgtgtgac

SEQ ID NO: 199772 - DNA, 389 bp, Zea Mays
aaagtcgcctaagggtgcagccggactagcacaacaagtgcgaaaaatcgaagtcttcctcccaagactatccgtgcaaaagtcgcctgagggtgcagctggaccgacataataaacgcgctagacctagtgcacaagtcccctatggacacagccgtatcagcgaaggcacacagcctcatcatacaaattatagttacatacgtacagcgagggcatcacaccttacaatggttcaaccttcgggatgatacccatctccctatagttaaacagcattatccttagctcctcaccctcaaacagacttcgcaactccccctcacctacactcgccccagctggcgaggacaacaattcccgcctaccagccctgtccacacgaagac

SEQ ID NO: 199773 - DNA, 423 bp, Zea Mays
gagactttttcacagccgcattgaaaacgtggcagcaaggcgtcggcttgaggagctgaggtactgatgaatgaacagcagcagcagtagcgtagtagacagtagggttggaaagtcgggaaccaaagttgcagtagaacattgtgtgtgccgtgtcctgtcgaacagacgtggtccaaggaatagaaagaggttcggcttgaccactgacatgccacgcctacatacatacagtcgcgagtctgacggagtgcactgcactgtacaccgaaaggcggagggggtgctgcatgattgatgatgcttttcgttgggtggcgattgaaatgtgattcagcagcggtgggcgcgaaagggcacacagtgatggacggaacgccgaacgcctgctcttgccttgccttagccttcctgtgggctggc

SEQ ID NO: 199774 - DNA, 442 bp, Zea Mays
ggaaaaagggtgcaaatatcaagccaactcaatgttttgaaaatcagcatgcaaataaaccacaagaacctggggactgaggtacaattataaatggactcaacagtgagaagaatcgtaccaaagttagcatatgtatctaataaaaacagtgtcaacactcaacaagcatacacaggaaacttttgttgatcagttgatttcaaagttagtagcatgaaaaaaatcatgagtacatacagaagcaatatgattactgaagaaacttaaacgtctatggggaagccatctgatgatcaacatatttttttcttaatttgaaacagcaacgtcatttgaaagacttcaatagcaattgttacttcaaaatccttacatcaatactcattaacatatcttcacaaccctctgaagtcagagttactaagtttgaaaactttac

SEQ ID NO: 199775 - DNA, 377 bp, Zea Mays
atgaaatgttaataatatatttatgttatatattgtaggtacctcgtggagtagaggaactgttcaggtttgagctaggcttaatcttcaaattattctctatgtcttctgccaatttctcatctgtttgtgtacaaatactataagtttcttcagattctgcagctcgagcgagtatacgattgtaaactcgtgttaagttactgaagcgattcgataactggactttaggatcatcatgcatggtaagtgtgctaggtatatgtaccacttttgcaccaattgtccacctctttagtatgtattcctcaggaactgatttaatactattgatatccagtatctttagtgcatgagagcataggattccagcaaat

SEQ ID NO: 199776 - DNA, 370 bp, Zea Mays
taaaaatgtaacacattttcatgtgatcagatcaaactggccgataaaaagtcttgatactgtgtgcttaataacattttcaaatggcaaattaatcttttagcaattggcttaatacgaacaaaaacttatgaacttttaggagatttcaaggaaattcttttgaaggcccaatcccaaaaagtctgtccaatctaaccaaattgacaaccttgtaagtacttctttcgttgttgtccctgttcctttgatagttgacaaggtcaaacttgtcatgggaactgatttgttagagatcttgatgtgcagacggatcggtgatgttgtgaatgggagctcttcattgtcctttatcagtaacttgacatct

SEQ ID NO: 199777 - DNA, 489 bp, Zea Mays
cttgtacccaaacatttttctggtcctcttgttgttcttcattccattcagcagatatctatgtgactcatccttccttttcaccactgtcggggttggaatcctgccgttggcctcatccactttatcttcattgggattcatcatctaggtaggggaaaaaggcagagtgagacaagatttcacaaggttcatgatatatacaaagggcagatatgaaacaaggacatttagacatttataatagaaaggaagtgacagctagcgtgaaacaaggatggtgttgtattttgacatgaataggttgatggtattgtgtttcaagggaagaatagcaagaaaacaaggttggcacatagattctttgattcgactcgaactctgccaactgggcaagtacaagaggaaaagggtagggagagaaaagaggtaagcatagacagattaaagggagagagcaggaaaagagaacccaactacccaactata

SEQ ID NO: 199778 - DNA, 484 bp, Zea Mays
cctcttcagacaattcttggccgcctaggtgccgaagatcgaagtatttttcgcccgaaggactagcatcaatttccctttctttgcttggtgctacagccatttcttcctctatagccacatctttaaccacatctgatatgagcctatcaatatctgacattgttgtttcggcttcatcagtgtctttggcttcggaagcagcatcagcttcggcatccgcagcagtcactattttagccgctgaggctgaaggcggtgttcgctcgacggcttgcatcacgttaattattcgttgtttcttttgcccttcaatcttctcctctgtagccgaaggttgttctttcttctgtaaaaattatgttagttctgatcccagaggacttagcagcttgaggtgtggggaatcagtcattacctttaaaatttttgctacttcgacagcagagggcgttgaaggagcttcttctcctgtctcatccac

SEQ ID NO: 199779 - DNA, 273 bp, Zea Mays
cccgtgcgcataggtaatccgttttcctggccgttcaaacacccttgcattgcatgtttggcacaccatgctttacaggagtacgtgtgtttgagtgtttcgtgcatgcatccatctatacctgcaacgagcggaaagctaaacgtgttagggcgggtagcagacctgcaactggtctagtcatgtttccacacctaatgcgtcaactaagatacgataattaaaccagctaagacacacacacaggcaggccactttatcccaggaccgaat

SEQ ID NO: 199780 - DNA, 498 bp, Zea Mays
agaaaccatataaacctaatcatcaatctctattattatagcctaactcagtttgcttctacaaaacaaaaggaactatataattccaattaatttttatcactataaagtacaacgttaatcacaataatttagtgcaaaggttgttaagcctacatgctttcgagctatttctaggccaataacatccgtccgtcagttttaatcgtgaaactttatctaatttataaatagtgttaagggtcaaatatacttcttgcagtaatactgatttgatccataagttggttgtttgcttttcaatggtcaaacaaaaaattagacatacagaaaagcaagccactttatctccagaggaagtagaattatgatcaaacaaccaggttctgcacaatagtctgcactgtatagttcacatggggtgctgatcaacaacagtatgatctgaacctatagcctaatttactcgcaatagaatgtagaccagcatcttatgcc

SEQ ID NO: 199781 - DNA, 323 bp, Zea Mays
tccaacgacctccagcagtccctaatgatgcgacaacgtcctgcgcgcgaggcttggcgctacctcgaggacacgttccttggccagaaggaatcccgcgcgctcctcctcgaaacgcagttccgcaacctccggcaggactccatgagcatcactgactactgtcgtcgtcttgagtcgatggccgcttccctcgccgaattgagtgatcccatcggggatcggcagatggtgctcacgcttctccgcggactcagcggcaagttccgtcacatggtgtccatcctcaagctccaccagccgttcccgacgttcgcgcaggc

SEQ ID NO: 199782 - DNA, 557 bp, Zea Mays
cgattgtatcattcttgcaagctgaactgaacatctctgataaaccagcaaatgccactggcatttcttcccgcaattctggatctgcgaatagtaaaaattccaatatttgggatatgaagatatcagcattttcgatgctcgaagatatattgagtaaggttgcatcaaatatgacagaaaatctgtggcagtctgtcatcgaggttagtagttttgaccttatccttttgttgttctgcttggtgatactgctatgacatgggggcattgagtgaccgagcaagtacatcagctaagaaactgcaagaatgttgaatttaatacacaaccgtcaacaatgatttggaggagcttcctctgtgaccgatcatctagatttttgttgattttggcgctgttgcatgctaaaatatcaagcactgactgatccacattgcacatctgttctgtggcttgaattgaggtttttattattaatgtgtgcactggccttctgttttaacccaaactccagtcctactttctaggtcttgaggaaagttatggattttgtc

SEQ ID NO: 199783 - DNA, 1072 bp, Zea Mays
ctcttatttgcaaatcaaaggtttgctttttggtaatttgaatcttgatcgatatgttttgttaattttctgtttgcataaggtttatgatgaagtgttgttatatttaactatatacttgaacttttctgaaattgctaacaatgcaggtggtaaatttactgccgagagcacttcttatcaatagaattggaagaactatttttctatctgaatatcatgatgagactgaagagcccttacaaccatatgaacctccaaaagtatttcaatggcgatcagaatttggaagtgaacttttaaaggttattagtttgaactggccgttcgctgttctttgtgtacttcttaatgttactgcgccacatttttcttaacctttttttgtacttgcagttgaggttggagggataccaatggagtacaccttttagtatcaatgctaatggagttatgtgtgtgctcatgaacagcacaacaggaaatgatcaggcttttgtcagggtaaatgtgagaagtggaacaaaaagttcacggcatgaagttgtatttcagcttgattgctggtccagcccatacaggtactgctcggttgttcttgtctatacagtctacttaaaaactgaacatttaattcagtaaaatcaaaactattctcagggtggagaatcgctccatgttcttgcctatacggtttcggcagtttggtggtgatgatcattcatggcgtaatctgcttccgaattcatcagcttccttctttttggaggacctgagcagaaggcatctattggaagttttggttgatggaactgaccctatgaactccatgacatatgacatcaatgtcgtaatggatcatcagccccttactaattcagatgcccttaagaaggccttacgtgtcactgtcttgaaggaggggaaattgaatgttattcaaattattgattggctgccagataatagaaatcgaggacagataactgaaaggatgttatcaccaatctttcagccatcagaggtcgactatgggcagtcatctcctgatctggatagtgaatttcatgtt

SEQ ID NO: 199784 - DNA, 451 bp, Zea Mays
cgtcgtggtcgaggtggccaagacaacggtgccaagtggaggtaggggtagtggaggcaagggcgtagggttggacaaaatgggcagaggaaggtggggtagggaagcgaatagggtataggggactggaactgtcgtagcgagcaaccacaacacgagtggtatgatcccgtatggtgagtccccaaggatcgaactccatagagcaacagttgttagtggtgaagtgacagatcgagaggaggttctggatgatgttgggggcaacaaggatgttgttgaggtacaacggaccaagaaggaccatgtcacctactgaggtgacaggcagagtcgacctattgtcgatagtgatggaggaaggggaggtggggttatggggatggggtaaatcgacagctccagtgtcgagagtggtgtggaatgaggccctggagttggcaacccaatc

SEQ ID NO: 199785 - DNA, 326 bp, Zea Mays
gggattcgatggcgagctagatcacgccgccggaggtgccactcacggagacggtgtcgacgaggtcgtcggagatggcaccaagaagccatgtgtggatgagacaattcatccgcacccaggaaggagatgctggggcaacggtgttggagagaacgtgtggttctagcgagcacttgtcgaggacatcgaggaaagactctttccaacgggtgtagaaggtggagttgaggtcgaggacgagtgggaccagagaatagatgttctggacagagaccacctacgcgtgtaggttgagaagagttggaggcctcctgctaaagtag

SEQ ID NO: 199786 - DNA, 305 bp, Zea Mays
gatgatggttcaacgataggaatggaaggaagacacatgaagtagattatgtgggataatatgaggagtgagtagattggttgtgaaagaagggacaattttcattgaaactctcatctctagaaattcgaatatgacgagtagatggatcataacaactatatcctgtgttcaggactgtatccaaggaatagacactctacagattgagcaatcaatttagtccgctcacgaggtggtaacaagacataacatatacatccaaacacacgaagatgatcatatcatagagaagtcccaaaaag

SEQ ID NO: 199787 - DNA, 312 bp, Zea Mays
tttattttggtggagcacccctttcacggctccaaaactcttctaaatgaatcaagatatgtagttagagggaaattacccaccaatgccatcagttacataaaaacggttcgttgtctatttatcctcccgtaacccttcaacatctctaggcgcgtcttctctctgtgacaccttcgtaggcgtgtcttctctccacgacggcgcgaggcagcatgccaccatcctccaggctgcggagccacgaccccaaggcctacctccgccatctccgcgacaccgcatgccgccatcctccaggctacgtagcca

SEQ ID NO: 199788 - DNA, 393 bp, Zea Mays
accaaatccaagttgtgattggcaaggagggtttggtactcgtcctcaatagtgtgacgtcggtgaggatcggtaagggcattgtggacagaagacggtattggggagatcggcgtggaggtcacacaacgaacaagacgatcaacatgttgaataacctagcggcccggtgagtcaccacttggtggacatggcgagggtcgtggtgaaggagatgggggtgatacactgttggctcggtccggatgtggggcagtgcactcacctacgcatgtcgctgatagacatgcacaaagttggcgtagcgaggaggggtcagtgccaatgagggcgcttgagataccctcgatggcacgggcgaggtcggagaagacgatggcacgagcgcctaag

SEQ ID NO: 199789 - DNA, 302 bp, Zea Mays
atctcattcacttacaagttacaatgaacttatgctagcttgcaggtagtcaaatttgcacctgatttttttgtctagggtactaattatttgcagaacagttcccatccctcaaatacttgacatataaagtcttatttttctttcccaaaaacaggcttgaggaaactacagttgcaaatgagaatttgctgttgagggagagggagcagaatgacataacaacaaaagcgcacaatgaaagtcaagaaaaatatgaagaattactaagcaaatttgttgatgttgacaggaaaatcgac

SEQ ID NO: 199790 - DNA, 382 bp, Zea Mays
cttcggccttctgcacagactgagctggcggtctactcagatgctgattaggctggttgtcctgatacccgcaggtctacctcaggctttgttgtgtttttgggtgatagtctcatttcttggtcctccaagcgtcagaacattgtccccctctccagcgctgaggctgaataccgagctgttgctgaggtcacatggctgcgtcagttactacaggaacttcatgcccctctgcgccgcaccgccttggtttattgtgacaacatcagtactgtttacatgtcttccaaccccgtccaacatcagcgcaccaaacatatcgagattgaccttcactttgttcgtgagctcgtggctctcggtgacattcgtgttcttcacg

SEQ ID NO: 199791 - DNA, 394 bp, Zea Mays
ggggaatccaaaattcgagctctcaggtgaacgattgacgacggtatctggtggctgggtgcgtgatgaccttgcagagctcatggtggcttcaatttatagggggcgatagcggtggccgggaatttgggttaagcgcggtggcggtcggagggaacatggacacaggagcaagggatgggtggctttcaccgtggcgcttcctccggtgatcaccggacatgcacccagtgagtcacaacgacgaggaccagcgcacaaacacgtggcacgtaacggcgacagcacgacggcggtgagacttatctggtcgaccgacggccgggggggaaaacggcaagcgtagccacaacccgagcgcaagtggatcggacgccgagattcttactgagcc

SEQ ID NO: 199792 - DNA, 563 bp, Zea Mays
ggattgacagcagcggccggctcgacgacactgtcaacggcggcgccgattagggttgagttcgcgcggagacaaatgaaggcgattcacactgccggagtggggaaggagattaggaagttgcattgtaaagcataaaattaaaaaatcaactcgagcaccttggaatccggacgacatagcgaccgcggacgtgagccaatgtgacgcggggcgcgcaagattgacaacggcagcggctcgacgatgatgtcaacggcggcgacgattaatgttgagggcgtgcggcggtggaggacggcgaaacgggctggcggcggcggatgaacaagaatcgcccaggcgaccgctgaagaaacgcggcgagtcggccaggatggttgaccgcgcgggggttagggtatagaagtgtttgaccgcgtgggaagtggggtagtgggcccattcctttatttctggaacgtgggtcggctgaagtagttatgctaaatcactattatgtataaacggaagaatggaataacgtaaacatgtagggctcgcggttgttactctgtttacgc

SEQ ID NO: 199793 - DNA, 720 bp, Zea Mays
ggaacgacctcttaaatattatgggagatcatgttggtgtgtcagcaaaggacgacgttgtccatgtagtttctgccggggttgttgggggaaagcatcgtccactcaatatggtcagcgagggcgtaccgtgtcaaggccaacatcatgagatcatgctagcgagcgtagtaggacgacgatgcgtctagaacggtattcgctagttggcgaacatttgagacagttatcataaactagatatggaggctagcgatgacggtcgcctcgtcggaggcgtttgactgggcatctagggttgaggaagacaactgttaggtggcgacaaccttctgttctaggttggcagcgttggcctgcttctcttcaaggagctagcgggcgacctacacaggtttgcgtgcgccgacaatcttctttgtagtgttgtcggtgatgattaggtcattgagccactacctaaaagcagtgacgtcgaagtccggcaacatgacgaggaggcggtggcctggaggggctacaactaggggacgacgtctgttggtgcggtggctagagaggcgatgacctaagtagggccgatggagcgaaagcgagtgaaaaacggatcgaggctttgattaccatgttagacaaatatatatgcggcaacggaagattatgtcttgcattgagcccttaggtggtttatatagacgtacatgacacaggagataggca

SEQ ID NO: 199794 - DNA, 592 bp, Zea Mays
ctttctcgtagtcatgtgcaggctcttgctgctctttttgggtggtctatcccagataatttgggatatgataatggggctggggatgataccgcagcaaacatattatagctagcggttttgttgttcttgtttgtcgttttacctcccattgttcctctatggatccggaaaaaataattgtttggaatgtaagaggactcaactctttggctcgacggaattatgtccgtgagctcctcaactgttatggtgcggatgtaatctgtcttcaagaaactaagaaggcgtaaccttctcagcgtactctcctctctatgttgggatctgattttaccggttcgttggccctaccttctattggagcgaggagtggaattattattgcttggagacggcatttgggggtcactggagctaccaggacatacattcatagtgtgtctgtgcagttctgttcataggaggggcacctttggtggcttacttgtgtgtacggaccactgatttcaagtcgggcgaccagctagtcgaccgacaggaccgaccaggcgcctaatcgcgattaaggcgacaattaggtcgactaatc

SEQ ID NO: 199795 - DNA, 313 bp, Zea Mays
ctgcatcactagggttcaggggcacctcaaaatggacctgacgttcgtcatcaggaatcgccccaagcgaagcaaccaaagcactgacttcttcagcagagggtcgcactctaaggcccaaaatgccatcagtcacaggtggatttgacacgaaaagggtgaaggctttgggaggaggcaagttccaggccgagtacgccactggagcaccaacattggacaccttgcccctgagaatcatttcaagtcggctcaccaagtctgcagaagggattctcctgttggtaacccgagttgagtcggctagccctcg

SEQ ID NO: 199796 - DNA, 370 bp, Zea Mays
ctttactggccggagttatccacggcgatgatctccaagtgctatccagtggatttggtcacgagtcacggcgatgatggcacgaatctttgcgcagggagggtcaccggcggcgagcaagttacactggcgatctgatccataggacactgtaccatggagagcactcatcagatgaactgacagagcgacttggagcacgattttctctcaattttcaatggtaacatactccatgctctgcagcaaaattgtagagctatagatcaactacaggtttgtcacagcagccatgggcagattcctgctggatcatagttgaattgatgctcaaagtcgtagtgattgcactgtctgtctgaaaattcag

SEQ ID NO: 199797 - DNA, 429 bp, Zea Mays
ggttatcaagggacccatcaaggcagcctgtcccccgacggtgcagaaattcccggaggttcacggcttaaagctagaggctttacgtcagtcctctgctccagaagctgagcgttgtcctgctactcaatacagcagggacgaagaagggtggcagctcgtggaacgcaggcggtctcggtaggttgagcgtgagcctcgtcgtaggtcccctgtggatctccgaggcaagtgctataagtgcctgtcgacctctcacttcgtggcggcgtgccgtagaacccctcgctgttttgggtgcctacatcttggccatcgcgtggcacagtgtcctacacacttcaagaaagagaagaagccgctcaaggagagactgggttcgcgggcgcctcgcacctcggtttggcagcgtattgccatggaagacgg

SEQ ID NO: 199798 - DNA, 298 bp, Zea Mays
ctaaaacgccgacgtggctcgaaatgactcggttgttacctctaaaacgccaacgtcgccaagcaccactcggttgttacttctataacaccaacgtggctcagcaggactcggatgttataatctaaaacgctgatgtcgccaagaaccattcgactgttacctctgaagacactggcagtaactcagccgttctttctctacgtaaatgcaggcataattaaaatgcgacacaacaattacaagtcgttactcgaacgttatctctgagaacaacggctgcgttgggcacaaatac

SEQ ID NO: 199799 - DNA, 574 bp, Zea Mays
cttgctctgtcgccttttcttcaagtacgacaggctctgtctcagtgggcactgaaggcccagcttcggcttcggcttgaacttgtgcagcttcggtttgcctagttttagtttcgacctgcgatttggtttcagttggaacgactttctttgtgagagcaggactcaaggccttcgtcgtttccagcacaacatccaacacgtttgtcatccttctcctcttaggagttgcagcagaagtcttttgtatcttcggcagatttgtctctatcggaaggctcagaatctttggcatttttgttatctcgtcaatctttggctcttcagccttttcagccttatcttcggctgactcagctatatgcgtcttcggcattacagctggttcttcagcgccatgtgcagtcgaagcagtttgtattgctttgaccgctgaagaggaccctgcgccaaactcaggcaccacggtcggtttaatgtaacgcggccggtgggtcagaaccttcacctttttgcctttcggcacaggctcagctagggtggccgaagcagcagtcttcctctttttctgttg

SEQ ID NO: 199800 - DNA, 319 bp, Zea Mays
cacatgtcaattcctccacccctcacgtgggtccatactgatattgttatcatgaaatttgagttatgtaattagcctggcacttagtctaggaccccacttgatgctgaatgaggatcagattactaggaactcggtccaggggaaagaaccatgttctcaggggtggttcagagctaggtagccgcttagcctggttccgtaccgtaagcctacaccctccaccaccctagaacagttgtcctagtacctcaatatgggaccctaaaggtccaaacctcatacaaacataagatctagttcccaaaactaggctcgg

SEQ ID NO: 199801 - DNA, 339 bp, Zea Mays
gcggcagggagccctgggtgatcttcgacttcagcctccgaaacataaaaccagtagtcccaccagttgccccacttgttccgggcacacgggaccagctccacaacttccatcgaagtcttcccagacttcggcgtgaaagtgcacgatccaaattgcgcaatcttctgtcctatttttctcttctgccagtgcagacagtattgcttggcgaagacctccaccgaaggctggccgccatatgacatcgttgcccagatatacttcgccaacgccaccacagcgtttggtgtcaactgatgaacatggacttcgaacttctgcaaaacctccgacaca

SEQ ID NO: 199802 - DNA, 407 bp, Zea Mays
gcaaatgtggtgtggctgcagcttgtcttcgtaacctggtggttgcttcatatatacatcctcctcaagaatgccatgaagaaacgcattctgaacatcaagttatcgtagtgaccacccttgtgaaacagctgagtgggaataacccgaatagtggccgccttcactactggactgaatgtgtcctcatagtcaatctcgtacctttgcttgaagcctttagcgactaatctagccttgtatctatccagagtaccatcttccttctttttgaccttgtacacccatctacaatcaataatatttttaattccttctggtggaaccaagtgccaagtcttgttcttagccaaggcctcaaattcagcatccattgcatgcttccagttttcatcacccaaggcctc

SEQ ID NO: 199803 - DNA, 480 bp, Zea Mays
ctactgggctgggtgctgaaaaccaagttgagaaacaggacaatgtcagcgctcaacaaactaaccacagttcgagtaatggcaacttggaaaatggttcacactctaatggtgtgcatgagatctccagcagcagtgaaaccgtgacgaccattgcggacggactcaaactgatcacaaccatccgcgagggcaggcagcacatcttgccaagttggagtggctctcttgaccacgtttctggtggcagcacgagcacatctcaggttcatgaaattgaagttgagaaggaagtcagtaagggcgacgtcaaagttgaagagtatgatcttgagaagattctggacgagcaagaaacccatgacctctattgccccaactgcaaatcgtgcataactcgaagggtcatccttaaaaagagaaagagaacagtaaggcaagaaacaggcaaggaaccaccaaaaagaccacagcttgtag

SEQ ID NO: 199804 - DNA, 335 bp, Zea Mays
agtaactgcttcgctccatttcttccgccgctagatgcatccacaacttcagcaactaacgctccttcaagccccgtagcaactcccccactacacgcagtccactccgcgcacaccatgctgaccctcctcgtcggagctccggcgtagatgtgcctcaccggaacaccttgcgcatcatgcttgccgatgttgtcttgactggtaaggtccgcgtcccctccctgctgagtctttgtgcgtgtagccttcgcgtcgtcgtctgctgcgcacgcgtgctgtcgctccaccctgcttgctcgccccgaccagcgccatggctgagcccgcgtctg

SEQ ID NO: 199805 - DNA, 383 bp, Zea Mays
gaagtattttgttgatgtggtattgatagttttagttggatatcacgaaaaacatttgcatatcctttgacatgccagtttttgttctttaatcagctattttcaagaggtcaactgttcccacttttaaatcttatggaatcgtgcaagcacgcatatcagactgtgcatcagagacattttcagctattcgtactgtgagtgccatagttttttcctgaaacatgcacatttaatcattaattcaatttcaagcttcattcttttgtattactgatgaaatggtccatctactctcatcttatactcttgttaagtattaactgttgtggtttatgttatccttgattcaaaaaatcatttgcaggttcgatcatttggtg

SEQ ID NO: 199806 - DNA, 299 bp, Zea Mays
tactagggtgtcagtcccagagcggtggagcgtgcaggcttagggtacggaaccaagctaagcgactacacagctccgtaccaccccagggagcgagcgcccattctctagaactggcccccaggctgccggactcccctgcctttgtagaggggtcctaaactgcaaccctggctactcaattcggatgtcatcataccagcaagggtgggaaactgtatgggtgggttagataaaaagtaacagttgtgaactgaagcagaataaaaccatcataaaagctcctctggggggtaaat

SEQ ID NO: 199807 - DNA, 478 bp, Zea Mays
atgatatatgtgcaattgtggtagaggttttttaaagctgcaattgccttttatgaaggggctaatcttgaaccagagaaccaaaaatatctcagcacctagtactatttcttgtccaaagaacatggcttccattagagtggatagggtcatgctttgatgctctactcattaatcctttcttttttccactattaaacaatagggatgctgttgaggagggaatgaagtcgcaagccaaacctaaccagtcttccaccgcagccaggagtcttttcggcccaaatttgatgtgatgatgacgtgacaaatgattgagtgttttgcaccagaatccaaaacagttgcaacacaatttgtattttagggaaagtgttaaactgtaatttgacaaattgtgatgttttgccacgtttgatgatgtaggtctggggcttcacgaccagtaggttaagcgcataggacagatgcactgttt

SEQ ID NO: 199808 - DNA, 473 bp, Zea Mays
gagacgaatttagcgacgggggtatgctggtgtgctaatctcggtcgttcgctgcaagatcaatgacggacaacgcttctcctacctcgcgcacctaaacagacggtagcttcgcctgatccacggcgaacaccaccggtgaccgctcaccgatgaattgaagccccaaacacacatttcgtatatagcacaaggatccgcgaaccaaagtgaatacatgcgagaggtttgtaccagaaatcgtagggcgaaattcactggctctgggaaggtgaggatgcgcgacggccctgctcgacggtgatccaattctccacgacgacgcccgatttctccaccggtgagaatcaaggaggtgccaaactccgacaccaattgttccccaccgccaatcgggacccggagtcgctatggaaggcacccgagatcggcggcggcggacctcgcagtcttggatggcgcaggcggcagcg

SEQ ID NO: 199809 - DNA, 388 bp, Zea Mays
gtaaatatcttggactttcattaacgctacgaaagataaccaaggaacaggcgcagccaattatcgacaaatttgcaaatcagcttcctggatggaaggcagacttgatgacaagggctgggagaacaattcaagtgagatttgtacttactgggatgctcatctacttagcaatggcaattgatctcccaacttatatcacaaaagcaatcgataaaatccgaagaggctttctttggagaggtcgcaaagagataaatggggggcattgccttgtttcttggagcaaagtttgtcggtctcttgatttgggtggtcttggtatttcaagcattaaggagctgagttgggcgctgcggatgcgttggttatggctgcaaaaaacgga

SEQ ID NO: 199810 - DNA, 378 bp, Zea Mays
gacacgtatgcgtgagtgtgtcgaagtgggttacatcaagtgttgcgttaggtggcatggttgcgtagaaaaaattgagggtcgccgagttgtgtttgtctgaggtgtcgacaagaattaaaaatgtctgtcaagtttatacgaatggcgagtctgtggatgattgtgtgtgctgagatgcattgtagtagtgatggcgttaaaattaacggaaatgtctcgagtgcacgccgccccatggctgtatgcgagacaaggtaacataaggtgtgctcgacacgaatgttcggtcgatataagtaggaaattgtgtttgcttaattagagaggtggtgacatgccgaagtagtcatcgctttctcaatatttataagtcga

SEQ ID NO: 199811 - DNA, 914 bp, Zea Mays
ggtggtaggagcattccataacaaattccactagtctgttgactcattgatttatcttctggaaagtggttttctgcaggttgtttcgttgttcccccttctccacccactggttgctgtcttgggatgggatattttgaagggtaaaacaggtctgcggagaaagctaatgcagctgttctggacaagcaaatcccaaggtctacgactacaggaatattcacattaccgtagcccgacagatgaggtaccccttttgttgctgaattttcgtcttctgtggttgtgtgcataaaaaatatatgtggattgtgacagtttcttttggcagacatcctgtgaagagtacttgtgtgatcttctatgcttccatctggaccttgcacgttttgtttcaagtgttaattctggctgtttgtggaatttgaggaattcattgttgtttacccaacaagagcaaggttcagatgttaacaatgcagaaatattagacccttttgtcgagaacttgatacttgagcggttagctgttcagagtcccatgagagtgagtcctactctctctctctcatctagcacagtagcaatagtgggcagaaatgtgcactgcaggtcatgcatgtgtcctcgtcttaggggaacaagtggatctcatacttaagctccacatgtttcacacatatttgcatatatgacaatcactgccattgtgctcaaaaggaacctttcactttctagttgatgtcttgatgttcttttgaaatcactttcaactttcaaacaggtgctatttgacgtagtcccaggaataaaatttcaagatgcgatcgagcttgttggtatgcagccacttccttcaacaactgccgcttggaagaggttcataaccatctctgctgtgacattctatttgc

SEQ ID NO: 199812 - DNA, 404 bp, Zea Mays
cccagtcgagtatggggatgacagatgcatcccattctcttgtccagctcttctggctctgaaagaacttggagctattttgaaggggtaagattctaactccaagttatattattaatacatatcacttgttatttcagattttttatttgtgaagtatcaacaaacttaaatttgcatttgcatttttatctctactacaccttaagggcacaacgagggcgtccacaggcatcaccgtgcccccgcgcgcgtcttccttccccgcgtccgacataccgcacgcgtgccagccatcgccgccgtgaattccgcccgccagcccgcgcccgaactcatgtgcctcagttttggtcaagtgaagacgatgatcttggtgtgtgatacctgcctttgagttttca

SEQ ID NO: 199813 - DNA, 315 bp, Zea Mays
cttctagtgaacatgatcctgcattgtttgttcatgtctctccaaaagggcgcactttacttctattatatgtggatgatatgttgattacaggtgacaactcagaacacatttctcatgtcaagcagcatcttagtaaggaatttcagatgtctgatttgggtccacttagctatttcttgggtattgaagttcagcagacttcaaaaggttcttatctgtctcaatccaagtatatacaagatcttctcgatcgatctggaattactgatactcggacagttgcaacaccaatggatattcatttaaaacttc

SEQ ID NO: 199814 - DNA, 485 bp, Zea Mays
gttgaaaccattgaacacctgttggttggctatgtgtttgcaagacaattttggtttctttggctaaaacaagtggggctgcagtttcttgctccacggattgagggcttgagtttcttgcggtggtggagcaggatcaatggttcggtagaaagagcgataatacatggtttaaatttcttggtcatattgggaccttggatcaattggaaccacaagaaccaaggtgcctgtgataaaattgctccttgtgttgcaacggccatcagaagggcgagggacgaaagggagctctaggagatggcaggggctaggagtattactcttctaacaacccctattccagggctgtaattagctccttggtttatgcatggtcgttgtagttttgtttatcatatggattcattcatgtattttctgttttggccaccgtgaggaggccttttttcttttgtatcggtctatattgggcttcccttttt

SEQ ID NO: 199815 - DNA, 339 bp, Zea Mays
ttgtatgaattccactaccttagctgaagttaaggaagcaatgggtttgaattctatccacttagtgaacttgtcaatagcaaccagtacatgagtgtatcctccttgagcttttttgtaaggtccaatcatatccaatccccagcatgcaaatggccaagttacgggtatgatttgtagttgctgtgccggtagatgctgctgtttcgacaagtattggcaggcttcgcacctctgaactaacttggttgtgtcactttttgctgttggccagtagaaacccgacctgaagactttcccaaccatggtcctggatgctgcatgcactccacattgccc

SEQ ID NO: 199816 - DNA, 392 bp, Zea Mays
gacgaaggcgtctcttcttctttttctccccctcagcaggaaaagaggcttggtcaactcggcgagaacgttttggacgaacattgataggcttctgagcgtccaaggctttgtcagcttcatggatgggcaccaccaccaatgtttcagcaggagcgacatcagaagaatctccagccaacatatccagcatggcacctatctctgcatcactaggatccaaaggcacttcaaagtggacctgccgttcatcatcaggaatttctccaagtaaagcaaccaaagcactaacttctttggcagagggtcgcactctaaggcccaaaccgccatcagcagaagaaggacttgacacgaaataagtaaaggctttggaaggaggcaggttccag

SEQ ID NO: 199817 - DNA, 554 bp, Zea Mays
cctgggccccaatgacgacgacggcgcgagatggttgtggcggcggcgtgatgcgatagcagagaggatgcgagcacgggaggaaaacgcgagcgcagggaagaagaaaaagcggggcggagtagctgtgagggaggtttaaatggtcggataggtgcggtcatggtaggatatgcgcggtcgccatgccgaagttaccggcggactttgagccgagcgcgccgtggaagtagtcgaggggaggaaaggttagagctgacggcgtccggatccggagttgcaggggcgaccggcgaataaccacagcggaaaccgcgtacggcgcgggagttggctagcagcagcgaacggatctccaaccaatacgcccgagctccacggatccctcttccttcgcatacggcggcgttggcgatgaaccaaccggctgacacggaggtcccacacgtcagccgaccctgcgcacggtgagaaggggatgggccgcgcgggagctactggccagatgggccgagatcccagcagccggcccacacgcaaccccttcacttttc

SEQ ID NO: 199818 - DNA, 272 bp, Zea Mays
ctaggttcttctaagaggaaaatcatatgaagagttaaagaaagtcaaacttgctgtacagtatgctttatttgcagcataccacctgtcacttgaaacctcatatcttgctgacgagggtgcaacacttccaaaagtcccttcagaccttcaacttgagaagccgaattcttcctcaagatactatcagcagaatttgattgaatttcaaaccattgaaggggaaacttatggagctggatgcatcacaccttgccttaatggctctgcaa

SEQ ID NO: 199819 - DNA, 644 bp, Zea Mays
ggataaggagttgcttaatgatttctacttcaatctgctgggtcgttcaactgacagagagcattctataaatctggaacacctgcacatccctacgcatgacctttcatcgctggacagccccttttctgaggaggaaatctggaaaaccatcttatccctgccgtccagtaaagctcctggcccggatgggtttacagggaaattttataaatcctgttggcagattattaagggagatattttggctgctgctatggcagtctggaataggaggctgctgaattttgacttgctcaattcagcctatattattcttctgcccaaaaaggaagacgcctcgctcgttaaggatttccggcccatcagcttggttcattcttttgctaagctcattaccaagcttttggctaacaggctggctggtcatctggataaattggtgtcgcatactcaaagtgcctttattaaaggtagatccatccttgacaatttcatgctagttcaacagacagctattcttttccatcagaaaagacttcctcggatccttcttaagttggatatcacaaaagcctttgattcagtctcgtggtctttcctgttagaagtgatgaagcatttgggtttcggtcaaatttggt

SEQ ID NO: 199820 - DNA, 449 bp, Zea Mays
gcaccagcgacgaggttaggagacgttgatggtgcagcaagaattccagtgagaagagcagtgtgagcaagcagactgtgcatcgacgatggttccagtcgggctgggcaccaacagcgagcggtgaaacagagcagaggaacacgctgaggagggcatgagctacccgacgagctactcgccggcgagggagcagagggctctagcgacggtggacggcgctgttaacgccttggcgaaggagaggaagaagacatacaggaaggggaagaacacggacaggtagaggagtagaatgattctattctggtttttcctgcttcccttcggattacacactttactttatattgctgtatagctatggcctaaggcacattactctatccattctgctcctttgacacggagattaggcctgcgaatgcaacgacccaccatttgaacgc

SEQ ID NO: 199821 - DNA, 508 bp, Zea Mays
ctggacgtcgcttctatcctgggcgcgtctcccaccatcttgggtgcctcgtcctagccccttttgtcttttgtgccttcgccgactgttcgtcccaccttcgacattgtggctacccactccacccttgccatagccctcccaattcctgtggtagctgcccgcgaatgggagtgggttgtagtccttgcctgggagcacgaatgcacgcgggtggatgatcttgccccacagcttgtcgaggctaagcgccatctcattggctctccaagcctcgatctccccctacgtacctgatgatcgatcccctcttcggcgtacaaggccgtcatcaccaacctccacgaccaggcgacgggtgttaacatatgatatctggttcccatcctccttaatccgacttcctcctactcctgatggcgcgacctcgcccttctcacgctgcagcgctacaccttggatgaccacatcctcaccgacatgacatccctcaatatcccctcctggc

SEQ ID NO: 199822 - DNA, 590 bp, Zea Mays
cgctcgtctgcctccccaccgtcggtacgcgcgtcgtctacttcccgcagggccacagcgagcaggtgagtcaaactcctcgtgccgcctccctcggcctcgctgctgctgctgggcttgggctaccagcccagccctaccatcatcactccaccacctgcatagtgcatacccatacgcatacgcatacgctggggagttgccttgcgttgcgtacgaggtgttgtttgccttgtctcactctcacctcgcccggtgcggctgctttgatcgctctcgcttgcatttctgcccaagctaatgcgtgtgtgtggacgcgtgtgaaggtggcagcgtcgacgaacaaggaggtggacgggcacatccccaactaccccaacctgccgccgcagctgatctgccagctccatgatgtcacaatgcatgtgcgcgattttctccctcaaaaattcctcacagatgcggcgattcgtcgtccgctccgtttctctacctccatcgggcgctaagccaatctcaaatatacatgcaggcggatgtggagacagacgaagtgtacgcgcagatgacgctgcagccgctcaatccag

SEQ ID NO: 199823 - DNA, 272 bp, Zea Mays
tgcagggagcagcatcgcattgcattgcatcccacatgaatgcatgcatgcagcgccaagtgtaagtaaggtcgtcaccaaggtaaaagcaggccagcaggggctatcaattctgaatcgaatttggattcgggggtcctggcaaaagtatcggcgtactctgctcctgctgagttacagcaggactatacgtgacctgaactgcactgcagtgcacagtaattgcatttgcgacctctagtctctggtaccagccatcactgtagtagact

SEQ ID NO: 199824 - DNA, 340 bp, Zea Mays
gcgaaccagcaacccgacaaacgatgggagaaaaggcctcgcgaggaagtacacgccgccggaccacctgcctctcgcgcccgaggaggacctcgtggaggcggacgcacgctggacgacatcctcgacacccagtgcctgtaccacaaagacatgcgccacactcttcgcaactgccgggacttcaagcactccatcgggcacggccgacccttccaacctctacctcctcctccgccgagaggaggaccagatgaaccacgacaaccccatcagcagaaggaggggggaggaggaggagccttcccacgcgtcgacagggaggtcaacgtcatcttcg

SEQ ID NO: 199825 - DNA, 604 bp, Zea Mays
ctcaagggtcattgtttggggctggtttctctggatgaacttcatttctaaacggcaagttgaggacaagttatatatttctcaggatgagaaggaggagatagtggcagatttctatgagaagttgcttggttcagaagaggagagggaattttgttttgaccttgcagccttccacatgcagcagcagcatgatctgtcccctttggaagccccttttgcagaagaggaagtttgagcagtaattagggacctaccgatggacatggcccctggtccggatggcttcaccggtagattttaaggttggctggagtattattagcagcgatgtgcttgctgcgctgaatgcaatttatgggggccatgtgttcaaatttaggctcttaaactcagcattcataaccctgctccctaagattgaggatgctaccatggtgaaggattatcgacctataagcctgattcacagctttgtaaagttggtcaccaagatcctttctgctcgcttggcaccattgctgcccaagttggtctctaataaccagagtgcattcgttgaaggacggaatattcacgacaatttcctgccagtacaacagct

SEQ ID NO: 199826 - DNA, 331 bp, Zea Mays
cccaggtgcacaacatcgcaaatcaacagattggagtcaccgctcgtcgtcacgattaccctccgcagcaaggtcgcatcggtaatgcaaccagaggcagaggccgaggctagcggcaacgaagattctattgtcttttccacggtgaagactcggcacacccaaccagggactgccccaaaactaacgcaacaaaggatcgaatggctaggaaccaccgattgacaaccagagactcgtcgcccacacctatcatccccatcagtacaaccagcaccaattccacaatgaacatttccatcctcaccagcaaaaccataatatatacccg

SEQ ID NO: 199827 - DNA, 275 bp, Zea Mays
agactgttgtttgttgattgctactcgagtgttgatcataaattgttggtggtatctagaccaggcctcattgctgtttttctatgtgtatgaaattagatttacttagtgaaaataattttaaataaacaagtgtaattctttgtaacttctagacaatccaactgcgtcaatttttgaactgttgacaaattccatgtgttgtaaacacaaataatcatatctttacgcgttcaataataactcagcctaaactctaaagcagatcagttccg

SEQ ID NO: 199828 - DNA, 272 bp, Zea Mays
gacgagctggaggagcagggaggcgaggaccgacgagctgacagagcaggcagtggtagcgccgagcgcgagtaggtcagcagggaggcagcgtcgcgcgaccgttggggagaagggaacttgagcaacaacgcagggaggaggagagggaggcacgagcttaggcaagatgcttactggatgacggtgaagcctagggatgccggaggcgacgagcggacggaggcaccacgagtccgtgacgactagctcaacgctcaacgaggctgtgg

SEQ ID NO: 199829 - DNA, 979 bp, Zea Mays
gggatatagaaatcagcccttagtctggtaagtgttttctgaatcccttcatggcctgcattatggactgtttgcagcagtgccgtctaacaatctgatgatgttggcacgtaaatgcgtcggccatggagaatgagaccgtcctgcacacgccatggaggagataatgtcccctctcgaatctgggtgcacatggtctggcagtctgggtccctagcagtgtcccttcggaggtcatcatagagggtaaaagttggccccgatagagttgcagagaaaagggtgtccgcattgcgacgggagagtgcatctgctactgtgttgaggcgacctggctggtactagacagagaaatcaaacccaaggattttactaatccactggtgctgcgggattgtggagagtcgcttgtcgaggaggaacttgagactatagtggtctgtccgtatgatgaagcggcgtccccacaaatatggccgccagtgtcgtactgcttgtacgagaccaataagctctctttcatatgctgctaatttgtggtgtcttgctgcaaaaggacgactgaaaaatgcaatggctcatgttccttgatgaaggactgccccaaagcctgtgccggatgcatcacaatcaaccatgaagtctttggtgaatgatggtagctggagtacaggtgctttctgttaatgctgttttgagggctgcaaaggcggactcggctgtttcagtccatttgaagccttctttgcgcaaaagctgtgtaaggggtgctgctatgactccgaagttatgtataaatttcctgtagtaccctgcgagacccagaaatccacgcaaccctcgaacggagagtggctgcggccaggtaatgattgcttctaccttatctggatccatggccactccttgtgctgatattacatgtcccaaatatgcaatggagctagccccaaatatgcatttggatcgtttgacaaat

SEQ ID NO: 199830 - DNA, 293 bp, Zea Mays
atctgccataggattaagtcgggagtaggtgatagaattagaagctggatacaacattctgtaacatagtggtccgctatcccctcctgtaaaatgtacatacatacccaaaagcattaaaaactgtaggcagtaacttaccctcacaaaaatatgtttggatctctcatgaaacttctcatcttttgcaagatagaccgcactttgattatcacaaaagacaactcgttcaacttgctcaatgaccaaatcaccaagaaaatcatgcgaccaaatagcttccttcactccct

SEQ ID NO: 199831 - DNA, 643 bp, Zea Mays
gtggtgagaagcatgttgagccaagtttgcaggaaacaacactgatacaacagatgtttggtggccgtcttaaatccaaggtaaattaataaatttctgatttcttgttgggctagtttattatatttagaaactgttactttctttagtgatatactgtacttgtagctatgcatttttgtaataaatatttttttgcttcatttgttttgaaaccaaatattgtcacttgcatgcttcatcttcgattcatgggcaaccctgtagttggtttatcatactctgaatctatggcaccatcttgatatatgatatactaattagttttgtttatgaaacaaggttaagtgcctcagatgttatcacgagtctgaacgatatgagaatataatggatcttactttggagattcacggctgggtagagtccttgcaggatgctttgacacagttcactgcccctgaagatttagatggtgataatatgtataaatgtggaaggtagtgttgcaactggtggctagaatcttgttaccgtcatttcagttggaccgcaataaactgaagctattgaaattttgaatcttttaatgcagttgtgctgcctatgttaaagccaggaagcaactgagcgtgcatgaggt

SEQ ID NO: 199832 - DNA, 374 bp, Zea Mays
ggcgacacggtgtccgtcaagagcttcgagacctgctgcgtgatgccggaggaggcgcacgtcgtcgtcccggtgcatcatcgtctgatgagcgccgcacacgatggcaacgaccagagcagggtccctggtggtgccgatgaagagggagcggcgacgctcatccagtccgcgttcagagggttcatggtgtgaatttctagtttctgtaaaactaagctagctagttccggaccggttactagatagaagaacaaactgaactaatttgctggaccgcagtcgaggaggcagctgcaggaggcgagggcgaggacgaggacgaggacgcgcggccgagagccagaaccggacggcgccaaggaccaagagcc

SEQ ID NO: 199833 - DNA, 274 bp, Zea Mays
gacgtgaggaaggtggtgccgggccggatattgtccttgcgaatcctgccgctgtccgaccggactgtggtggttgccgggaacgtgcacgggcatattgggttctgggatgtggatcgtctcgtggaggatgaggatggtgatggtgtagacggggtattcgagtattttcctcacagggggtctgtagggggcattgtgatgcaccccgctatgttgcataaggtgattgtttcttctttgtcacttctggatatatgtataaattactatc

SEQ ID NO: 199834 - DNA, 670 bp, Zea Mays
cagaaatttaaggacacggtaaatgttgtggtcgttggaggcaaggctgtgaggaagcgattggtgagagacccatcaaccaaagtacagcctcgtactatgagaccactgcatttgctctagggccccaacatccgagcaccccgcagagaacctgcgggtatttcgaagctaaaaagagagcttcccccaagtggcatgggacccttaattagatatattaattaacaacagaaagatcaaaaacagagcaaccaaagaccacagcttcgcattttggttagacttgcattaacactgatagaggcgcgtccatcccgacatctaagcacttgcatgatagagctgtattcgacctgacagctatatatttccaccatcgtacactgatgggttagcatccaaccagagatgtaaactgacatccaacaatcaagacgccacacattcaaacgagtgaggtgagcaaggcatcctacctcagtcagagtcagacactgctggggtacatgggctcacggaccttacggagacgggtcagatcagatgcttgcttacaccggcgggaggcggcgtaggaacgtagcaggcttggtgtaacggccgcatggctaatatttcgctggccctgccgtcccttcgccatactcgccgtcgcccagagtgccgg

SEQ ID NO: 199835 - DNA, 519 bp, Zea Mays
tgatgaactccatggagttgcaggtgagagtgccggttttgtccgtgaggatggtgtcgacctggcccagctcctcgttgaggttggacgtcctggcgtgggctggcgtgtccgtctcctcgtggtacatgtggatgtcgtggttgatgaacagcgcctgcagcagcttcacgatctcgatggagatgtacagggagatggggatgaagtagccgtagagcattatggccgtgaagaagtggagcaccgctgccaccgctggccgtttcgggtcgtagtagatctcagtgtcgtcgggcctaaggtaccatctcctcatggtcctgccgtggtctctggtggcgatgccgaagaagacggagctgacgaccgagatgacgatgagcgagaagaggaggaggtacatgacccggtccatcttcttctccacgttgctccgcttggacgggaccttcatggagttctgcatcaccttggtgtcctgccccgtgaacacgacgacgccgtacacgaagtcgg

SEQ ID NO: 199836 - DNA, 346 bp, Zea Mays
aacaagcccttacttggaactcactttgaagttgctaccacaacttctcgccgtttagagtttgatgaagacttccctaccaaatcaactacttagtggcattaaagtttgctatggtgtattaaaatatatggtaccattagattatgaatgtttaagtactctcatggttaagtacactttatttttctggctacatcatggattgacgaatgctcggcgtttacatcaggaacgtttaagctactctgttcagcagcttcacggtaaaaaagcaagtcgcctgggctccagtcttgagaagcgaatacgaccaaatattgtataggctaagaatgtagcacag

SEQ ID NO: 199837 - DNA, 3473 bp, Zea Mays
gaaggctggtatgatggagcgagcattgcctttgctgttcttctagttgtatttgttacaggtgtgccactatgacttttctctgactttctgtgttctttgtcatataacaagcagtgtgtttctattcacatcaaatcatcaagtaatatatgataaaactaataacaagcatgtgaaaagttacatataatgatgcaaaattagtagtggcctaaagcaacaaagttgaagtcaagtatgcatgcctgaaacttcaaataaaacctcttactcagcgccaacagttccttttacggtttgtgtacagttgctcaaatctagtggctattatttttccatgttaattttcagctatcagcgactacaagcaatcactacaatttcaaaatctgaatgaagaaaaacagaacattcgtttggaggtgaggactagaggcgcatatattgctatcgatttctttactgatcccaaataacattacaaatcattcaggttgttagaggtggaaggcgaatcacagtatcaatatatgatttggttgttggagatgttgtccctctcaaaattggtgaccaggtagagaaggccactgagcatgagcctcatttctgagtcatgtgtctacttctaaattctaaggataccctatttttttttgccaggtccctgctgatggtatccttatcaatggccactctctttccatagatgaatcaagcatgacgggagaaagtaaaattgtaagctactccaatatgctgctttggaagtaacacactttacctgtgaacctaacttggccacatgtgggttatttgaaggtacacaaagatcaaaagtcgccatttctaatgtcaggttgcaaagttgccgatggctatggcacaatgctggtgagtttgacttgaaattttctggacaggaatccagccaagcgtctgaaattttgacttgaaaattatatgtttagatttgtcttgaacaatacttaatactcttctagattattcgacttcatatatgtgtagaagaaaacagtggataaaggtacatgaaaatagtacttctcttggtcaaagtttgagctaaaactttactgttgttactttccagtgtcaaacttactttaatagtttaatatgatatatgcctattacctctttaattactagtagtgattggaacagtgtagagcgtttatcaactgaaccattctgttgtaatgtccaggtaactgctgttggagtcaacactgaatgggggttgctaatggcaagcatatctgaagattcgggtgaagagacaccactccaggtttgattttgttgttgttgccagcctttgcgcgagtttatttcctttacatgcctttgttgttccggtgcaggttcgtttgaatggtgtcgctactttcattggaatggttggactttctgttgcccttgcagttctggttgtacttttggccaggtaaaattggcatattttagtgtgctaaccgtctactttgtttatctacatcaatctgtatcaccttgttttctcgtaggtacttcactgggcatacttataatcctgacggatctgtgcaatatgtgaaagggaagatgggtgtaggccagacgatacgtggagtagttagaatattcacagtggctgtaggtattctgttctctgtttatgcatactgctttagtgcttacagtttttggctcaccatcttgaggtgtaaataggtcactattgtggtcgtggctgttccagaaggactaccattagctgtcacactgacgtaagcatggtttgtgtgttattttctgccagccctttcgtcccttgccactcaacatactttatttttgtcaggcttgctttctcaatgcgcaaaatgatgaaggacaaggctctggtatgttcccaactttctataccttggttttgtcatactacttgatccgacattgaatgctttgcacgctcacttcctatggaatgtaggtcaggaggctttctgcatgtgaaacgatgggttctgccacaacaatctgcagtgacaagactggcaccttaactttaaatcaggtgcaatggtgtttattcactttatacatactgacatacatgtttcagataattctgtttgttgaatctgattggccctgatttttaaattctcttcttcctggttgattttaagatgactgttgttgaggcatattttggtggaaagaagatggactcaccagataatgcacaaatgttatctgctgatgtcacatcactgattgttgaaggaattgcacagaacacttctggaagcatatttgagcccgaggttagtcatctccattcgtggagaaagaaaaagcatatgtggttgcatatgcatttgagatttcaggttttagtaaagatatagcttcgtagtgatccctatgcgccatcactcagtggttagataaaatgtgcacccttacaatttttttattggaatttattgcacatgcatgcctgtgtagtgatcttcagaggaaattttatgtttggttctcaagttcaattgattttttctggcttgacaattatcaggagagcatgaacagacatgtactttcttggggccatgaattctgacttatgttctacagggtggtcaagaaccggaggtgactggatcacctacagaaaaggctatattgtcttgggggctaaaggtgcaaaaagatcctttatagtagtcacagagatccttctataggttaatctcttgctattgctaatcatggtcggcacatttttacagctgggtatgaaattcaatgaaacaagattgaagtcatctattcttcatgtatttcctttcaactcagagaaaaagcgaggtggggttgcagtgcacctggtaatttgaattatctgcaaccctgaagatgttgtgtgatatctcttgaagacctaagtcataacgttgtgctagatcctctcttttttaccctaccacagatgggttgaaagggtgcatgcatgttggcccattggtatctgatatgcctttaacggctttaatttttcaaaatcttcgtactgtttgaaagatagcatttcagtttccacctatttagggttcctttttttaaaacaggttaattatgtttgaattattaactacattacacctaatccttcaaatcttgtattcagcaatcatggatactctcctgctagttctaggaaaaatatgaaaacaaaataatgatcagaagcagatactttcttccttgatcagtgtctcctttggttaagctggcaatttgtattttgaatatttcaatgtctaatcacttccccttttttttttgaaggatggccctgaagtccatatacactggaaaggagcagctgaaatcattttggattcatgcacaagctggcttgacactgatggttcgaagcactcaatgactcctga

SEQ ID NO: 199838 - DNA, 327 bp, Zea Mays
gcgttcacgattaagctccctctcggctggagttaagtttttgtaccgctctctaaagtaggcagcccttcccaaattatggttaggcgtgttaccaacagtttcatgcacaccgcctggaataaggcatgtatacgttaaaccgcctgaaatcagctgttttgcaaaattagttgagtgaacagtcacgtacctggtgtcagtaggtctctagttgtgaaaacatcgtctgccttgaatgtctcattcccatgcaactaatcgctatcatcatcttgattcacatttacattttcgtttccatctaaaaaacaatgcacacgttac

SEQ ID NO: 199839 - DNA, 300 bp, Zea Mays
tggagcatcattttctctgattttcaaatggcaacacactcagtgacctatagcaaagttgtagtgctataatccatctacatctttgctacaatgcgtactcacaaaaggtcactggatccaaatcaaaatcgagctcaaagttcatcccatcacactgttgatttgaatttcaggcttcaggcagtctgacagtccaacttcaggctcatttatctctaaatttttcttaacaactgagctcacactctttagcaaagttgttctcctataattggtcttcaactttgatgtggtgac

SEQ ID NO: 199840 - DNA, 566 bp, Zea Mays
ccagaatggttgtttcaaacacaaccaaggtggcaagttgtaagggattaaaatgacaggccatatagtgtacgcaacattgaccatcccaaatggattgaagccatcagctgcaagacccaaccgaatgttacgaggatcagaagcaaaatctttgtatatgctatctacatgcttccatgccttagagtcagcagggtgcctcattttgttatcttggactaagccctccttgtgccaacgcatatattcagatgtggtcggattcatatacaacctttgcaatcgaggaataactgggaaatatcttaggattttccgtggggcacgcttgttggttgcctcctcttgatgcccagaaaccatatgttgccatctagactcaccacatgttggacatgtatccatggctgcatattcttttcgaaacaacaaacaatcattgccacatgtgtgtatcttttggtagtcaaggcctagatcatgaataaccttctgtactttatccaatgtgtccggaacacagtggccttctgggagaacaagctggaacaactgaagtacgg

SEQ ID NO: 199841 - DNA, 492 bp, Zea Mays
ggtaaagataggtaaagtatagctctcagaatgagatggaagagaggtgattttaaagggcaggtatgagacaaacatcaaataagatatagaggtgtctaaggtgaaggtgattataacaaaaggcatgacaaaggataaagttaaggcaagactcgtgaagtggcgaagtggagaaaacaatcaagggtaagataggtgaggatgcaatagaatggttgaagtaagaattcattatcgatagaagttataaaggaacaacgagatcaccaaggatgggcaacataaaatgatcgctcatggaccgttgagaaataggggtggtcaaggacatgttaactgaaatatcctgaacggttattgggatataaaggtaggcataaaaaagatgagagtatgagagatttcaaggagatgagcataccaataccaagagtaaagaaattgccgaaagatagcgacttaacaacagaaaaggaaaaggtctcaaaa

SEQ ID NO: 199842 - DNA, 632 bp, Zea Mays
aattacgttgtatggtgggagggaatagacgtagtggttgtgatagttatcttgtttatgtatatgcggagcgtgggctgaaacacagagatagcgagggacatttgaataggctagtgcgtattgttgtgaagccatgttttctggtcttggtgtgattgcgtaagtatgaaatagttaccgtgtgaagtctaggttgagatgtagattgtgtgagttattggatggatatatatgcatagtataattaaaaaaagagttcttcgatgggaggatataatgtatagaatgtgcttggatggatatatgggcagacatagtatgcttaaatcgattcttgcttgcatgatgtgagatcaggcttaaaatgatttaaaaagttagcatattgcttctatccttatgttggatctaagtgtctcgtaatgaagaacctaaatttattagtccttcgatgaacgcttaaccttagaagagtatagaacctgaataaatctattgcttgttgtttgggactgcatgactagttttggttatgcagctagttcaatgaattaaaccatattttctgtagaggtgttgtatataaaagttgtagccaacttcttcatcttacttgtgtaaacatttca

SEQ ID NO: 199843 - DNA, 396 bp, Zea Mays
cgacgttagagttgacagtagcgacgaccctccacttgtgtcgtggccttgaccctaagagctcctaaaggaggcggcctaggtgggagtgggcatcgaggaggcaaaggaaggaggtggactctgctgctgtgagtctttcgccaccaggagacaacgacgacgcagggagaccttcctggtcggacgccagagcggtcttgaccccagagctcctaaaggaggcggcctaggtgggagtgggcgttgaggaggcggaggaaagaggtggactccgttgcaatgaggctgaggaaggaggcggcagaaggagatgtgtgtagggtttagcacctgcatctcgcggcaggtcgttgggtgaggacgcgggctgttgcggcggggcatcaattcact

SEQ ID NO: 199844 - DNA, 272 bp, Zea Mays
aaaaattgcaaaggcaaccgaagaactgaaaatgtcggaaccagcttcggttgaagaaattgataccgccgtccccgaagcatcttccaaaacatacgattatattatgcgtcatgcttcagggaaaaaattatcggaagaagaagtttttgaagccaatcactatgccaaggaattgaaatatccgaagggggcattaatattcaatgggacggatgaagaggatttcctatactacctcccagacaataaagaattatccgtctgccggg

SEQ ID NO: 199845 - DNA, 400 bp, Zea Mays
atttcttgtgttctaaaaaatttaaagcttacttctaaagggaattcagattctgaaatggctaggtgcattgaagaaaagtttcaagtgcaaacggaaatattaaaattccttgctgtccaaggtctgttctcagcatctttaggaactgaggttacatcatttgagttgcaagagaagttcaaatggccaaagaatcccatatccacatcgctacgtaaagaatgcatagaacgacttcaattcttgctggaagatgcacaaaaggatgcatctttacatgttcctaatgaggtcaaatccaatgacttaggctactaccttatgtgtttcattaacaccgtatgcaacatcccctcagtctccctcttcaggatcttgagtggccacgatgataacg

SEQ ID NO: 199846 - DNA, 326 bp, Zea Mays
agaattttgtgcgtcctggttttcgtgcgttgtcctcctctccgcatctctaaaacgaactcctgcatgccacacgtagaaaccgcctccacacgccatgcgtcttcctccccccgttgtcacaaccttggagtgcgtcgtgaggataagtcctcgcaaacttcttaccgagctatacgaggataggccccgtgaacattgagtgactcgccacgccacaacctccgatagcgtgcttgccacgaccgtcgccactataaatttctggcctctagctctccgcgccagcgcagcgaaaatggttaccaccactagcggcagggctc

SEQ ID NO: 199847 - DNA, 2670 bp, Zea Mays
gaagctctggggtgttgtaattgaggttaaccagaaagatattgtgttaagtctacctggtggaattagaggctttgttcgctcagaggatgtttgcgacattgctttgcaggaaaatcgtaaggtagatattttcttcttaagtaattcataattgatattgctttgtcagtgtttagccatctggtgaaccaactgatactgttcttttgcaggatagtgggaacaatttatgcgcagaagttgttcatgttggtcagcttgttccttgtatagtcctacgagtcgacgatgatagtagagaaggaaaagtaaacaaacgggtttggctatcattgcgattaagcctattgtacaagggacttgccctggatggcttgcaggaaggaatggtaatttttaaccaccctattctggatgtacttcataagcttttggggcagaaaaatattaacattgtatggttgttccattgtgcacctctgtccttaatatttttatattataattcacaaccattttagtgtttggttcttgcttaaatgatttgattattctactgaaaaaagttgggcaaaaatttacatgcaaaatcagaataactaactggtagagcatgcacactcaagcttgtttttatctgtaggagcatattgcatatacgctcagaaaagatcagacccagtttcacagtgaaaaaaatcctaacatcatcccccttcttgttccttattgctattgggaacattcaccatttttaaagaatctcatttcctcctcaccccatcccatgagacatggtcacatggaccttccttccttccctcccctctctttttgtggagttcaccaggcttttcaataaattatttatctaactatttttttgtttataataaatcagttgtttctttgatagctatactgactattgaatctacatatgttgaggtgttaacagtcttgcaaccttatcgaaaacaaggagctcgatagggcatggttgactatattgtttttttgctacctgattactacttgatctgcagtatgctagatttacttgaccttttctttgtatgcctgttttgcgctccctgcttttctctgacttcctaaaatcttggctgttgaacttcctaaaacttgacaatggatgcatttaaagctattgggatatgctgtgtgacaattattatactagaaatgcgtccacaaaagtgttattttattattatatgttgatgtaaatttatagaaggtagactgctaaggccaaagtcacataatagggaccatgaaacatcaaataaaaagaatggagtcgttcccattggaaacaattagattctgagtcaaatcttgtatgcaatctgttggtctgcgtcttatcttactatgtgttatgagcctagagcccagcccatatgtagcatgttagggttaagggggtatattttgtgaacccaacacaattcaatgtatcagaactatcccttccaatatggtttctagccatccttcctgaccgccgccacccatggcagatgcgccaccctccctccgcagccgacgctggcaggatgtcgagcctggtcgcatctccacctgccactgccctcctttccgcagtcggtgttggtggggcatcgagtctgactgcgttgccgccccctctgcctccagttctcctgctgcctgggcacagggcctggtagcaccgccgcccgcccttgcccccatccttgctatgccgggtggtctaggcttcgctggtttcagtgtcgtggtcctcgctgacttggcctgggtgctggcggcctgacccatcacccatgctgacctgatcaccctagccccgtcatctctgaactgggtctaggcgacctcggcacgtgggaccttccgatctgggcccccaatcatggcccctctactgcccatatttgtggtcccacgatggccaaacctctttcccacgacgtcactgctgtccattctacgcttgctgcagcccttgcgtccgccaaggccgttgtagctgccgcccggaagtgtgagcgagtcatggccctcgtttgggagcaggaaagtattgctgtggatgccctagcttgttaacttgcggtggccgagtgccatcttggctatccttcatgttccaaattccaatccacccctagcttcgccggtggctaagactctctcggcatacgaggctgctatcaatgtcaacctccatgcttagacgacgggtgtccagagcattaggtccctggttctcgttctcctcgacatggctttgtccatgagcgtgtggccttcagggacgtccgtgtcctccacgtcccgatgaccttgtagcttgctaacatcttcagtaagggaattctatcctcagttcttggagtcatcttcagtaagggaattctatcctcagttcttggagtttcggtctaatctcaacgtctttcgtggctagagtttcgacggtctgtgtgcgggtggtagactatgtcttgttgtatgtgttatgggtctatagcccagcgcacatgtagcctattagggttaggtagtatatattgtaagtcctacaccattcaatgtaactgaactgcccatgtttgtgtttcattaggtacttactgcccaagtcaaaagcatcga

SEQ ID NO: 199848 - DNA, 288 bp, Zea Mays
gcgcatgccgtaattctcccccactgtaccttttaccgacgtggtcgacatgccatagtgatgctatccgtggccgcgaggtgatcaccagagttattgccacggcgttagccacgtattcactgcgccgccttcttccttatctccgaccgccacacgttgccgttaaaattcccagccaccgtcgaagctgcctataaattggagcctcggccactgccgctaggtaattgtgcgtccagagaacccacgcgcagctccgattacttcccacagctctccaatttc

SEQ ID NO: 199849 - DNA, 3119 bp, Zea Mays
cttcagtctgccaattggattattcaggagggagattgaatgtagtcttgttgaaggacaaggagaaagacagagagaaacagaatgttcctgtaacagaaagtggtgtgccatgtaatgagcctgttcgggtgactgctgaggttaagacggttgatacaccaaacagatgttcacggaaccacaaaaaggttcctgctagtcttcctcaagtgattgatcagcttcttgagatcatcatgagctatccatctgcaagcaaagaacatgggtttgatggttattccctgttgactccaatggatgttgatgaaccaaatacaaagggcaaatctaaagttggtgatggccaagaactggatggtgatgctttctctgagaggtctgccttgctatcaaagtttgcatttgtccttaagttgatgagtgaaatactccttatgtatgtgcatgcagtagggataattctgagacgggatacagagatatcagtgtcacgaagttgcgctcaaggtgctggacacagtggtttactgcatcatatattctatctgctacttcctctaccttcagtcaaaattgctgatacctcagatgattggattggtaatttgtctgagagagcttcctggttcttggtagctttatgctgcagatctgctgaaggtcgtagaagggttgtttctgaaattgtaaaggcacttaaccaattcattggttcagcaagcaacacctccagaggatctttaatacctgacagaaaagttttggctttctctgagcttgtgaattccatattgtcaaggaatagtcagagcaatttgcctgttcttggctgctcacctgatattgcaaaacctatggtagatggtggaatggtgcaatctctttctgttttgctgaaagtaattgatcttgaccacccagatgctgtaagggttgtcaacctgatattgaaggctttggatagcctcactaggactgcttacaccaccgatcaagtcctcaattcagatcgatttaccaagaacagattaccagggtcacatgaacaaacacatgaagctgatgacattgtaatccctgaacaaactacatacgattcacatcatcatactaatgacatcgaatctgcaagtcagcaagctcaagaactgtctcatgttggtggaaataataacgaaaaccttgaccaacctgctgaacaagaaatgggagttgatctagcagacaatagtacttctaatggcaatcctccaacaagagctgtgcagttcatgcgggaagaacctattgaaggtaatgtaatggctcctagtactgatattggtttggctttctcaatgcaacatcaagttgatggaatgggtgtggaagacgaggatcttggggaggaaagtgaggacgaagaagatgaggaaatagcagctgagggagctggtttgatgtccatagctgacacagatatcgaggaccaggagaacaatgcaattggtgatgattacaatgatgaccttatggatgaagaagatgacgactttcttgagaaccatgttatagaagtaagatggagggagagcttaactcgaatggattatgatcatcatctgagattttccaggggtcgtgcagactccagtggttttattgatatatcttctgagtcatttcatggtgtggggacagttgattcatttaatctgcatcgttcgtttggtcttgaacggcggcgccaaatcggaagtaggtcgcttcttgatcgaccaaggaccgatgtgaatgcctttcttcatccactgcttgtcaggccagcacagtctagggagggaactaattcagcgtggccctctggaggaacttcctcaagagattttcacatgctgtcttttgacatcccctcgtacatgttagatgctggcttttcaccagaaactgctcccccagtgtttggtgaacgtgttgtcagtactgctccaccacctttgatagatttctcacttggtatggattcccttagaattaggcggggccctggagataatttgtggaccgatgatggtcaaccacaggcaggtaatcatgcagctgctattgcccaggcagtggaggatcattttgtgtcacagttaactgtggctaataattcaaatagtgctcctcaggtgcggcctgaacagactggcaacggtgcgaatgcgcactcagagttaccagatacaggaaatgctgaacctgttacaaccgatccactttctcaacctgttggtcggcatcagctagtttgtactgttaaccaaggacctgtccctgctaatgatgtcctctgtcctacagatgtgcacgtaaatcagcaccttgttgattccatttatgatagccgcgttgtagaaccggtgcagcaaacagcagccggtgatcctaacactatacctcagagtgatgaaatgatgtgtattgctggtacacagcttggtggtcatcctgaaagagattccttgtctggtaatggaagttatggtaatattatgcaaaatgagattgaagcacctcaacaagttcacttgggtaatgatcctagggaacccccatctgatctggagtcaagttgccatgcacttgtcacttctgcaagtgctgctcctgagctgagtgatgctcatgtagattcttcagcagtcaatgctgatgttgacatgaacatcgttgatattgctgaaaatgaagttgggaactcagctcctgcttctgatggcaatgatttgtcttctaggagatatgaagatgctcttcaagagcctcagacagtgcaaactaatgctattaatgaggcctccagcgctaatgaaattgatcccacatttcttgaagcattgcctgaggatcttcgggcagaagtccttgcttctcagcagaaccgttctgccccagctgcttcctatactcccccagctgcagaagaaatagatcctgagtttttggctgctcttccaccagacatacaggctgaggttctagcccagcagcgagcacagaggattgcccactctcaaccagctggacagccagtagatatggataatgcttcaattatagcaactttccctcctgatttacgtgaa

SEQ ID NO: 199850 - DNA, 550 bp, Zea Mays
caagtcaagaaaggctggcatcagatgtttcatatcactttcaacaaactcatccatgagtttttctgcaatctctatctctctagcttttgtcattatctcaataatcttatgatatgatgcaacattaggagggatgttccggttcttcatttccttgaacatttctagggatttcattggctcaccagtgcgtgcataaagctccattcggcagatataagcttgggcaggaagctcacaaccactccgaagaagccaatgccatgttgcctcagtttctttaatatctccttccttggagaaggccctcatcagtgacaccagcacatcagtgctctcctcaaacccggctcgcttcatctcatccctaagagctttgatcctgtctctatcaatgacatcttgatagctgtggagccagatgagccctgcataaatatccttgtgcacctcaaggttacttgtgactatattgtggtagacaaactcagcctgcctgagattgtgctttgcagtgcctcctgttttactcacaagtgccctgaac

SEQ ID NO: 199851 - DNA, 289 bp, Zea Mays
aatgcaagtggaaacaaatcttgtattgatatcaggaaaataaaaatggcaaaagtctactacccgtacatgctttagaatttatattgattgatgcaaaataaaaaatggcttacaaacttatccttgcaaaatcagttatcctcttgtcaaaccattaggaaaatgcaagcaaacgttagtctaggaagcaatgtaacttacgccaggtaaacctgctgatatttttaggggcaatagttaaccatggcacagaactcatccccacaagcagaaagcatttcccaac

SEQ ID NO: 199852 - DNA, 360 bp, Zea Mays
cttgaggcagctccaatgttttatagcccccatcaagacagtggatccaacaaatctagtctaggtgcaagttcaggaactcctacaaactatgtggcggaaccaagagctgggaacacagcagtgatgacacaatttaattcgactcttcctgccagaaaacctgcagttcaggcaactgcatctccggatacaggtgtgccggttcaacccaccgtgattcctttaccagtgtccagtgcacctgctccagatggagtatttgtcggtcattctcctcaggctggggctgaagatcctgtcaggtaccagcagcaactattctcttatagcatgcagccagcacaagttctagtgaat

SEQ ID NO: 199853 - DNA, 359 bp, Zea Mays
gagatgtcagtttcatcttcctccctggagccagttaatgtataaaccataaacaggaacatggaaatgatcccccacccctacatccctctgttagatgcaccaggttaattgggctaatgagcattgaaagagtgcatcatttttgtttctgatgggtcctgaccaataatgtcggctccctgccttcaagttcattccagagtatgcatagccaaaccatgtaaggatttcatttctgttccaaaaagaagggaccaagtctaataaaaaagatcactgtatttccattgtttctatgataggtctaatttggttccaccgttaccatgtggcgctagtctatcatgcgtgacaaa

SEQ ID NO: 199854 - DNA, 549 bp, Zea Mays
agagacctcagcttcatgtcttaaatctaacattgatagtttgtttggcaagtatggattgagcataaaacaagttagaggacaaggttacgatggagctagcaatatgaggggtgaattcaatggtttaagagctttaatattgagggaaaatagctctgcatattacatccactgctttgctcaccaactccagttagttattgttgcggtagcaaaaaaaaatgatgatattagtgatttctttgatatggtatccttattaataaatgttgctggagcttcttgcaaaagaaaggatatgattcgagaatgtcagcaagaaagagttagcaaagccatatgtagtggacaacttagaagcggaacggggttaaatcaagaacaatcacttcaaagagccggtgacactcgttggtcgtctcattttaaaacccttcagaggttaagcagtttgttccctgatgtaattgaagttctccaatacgttgaaaaagaaggtccaaatgatgccaagagacgccaagcacgtggtctcatggactattt

SEQ ID NO: 199855 - DNA, 317 bp, Zea Mays
cgaacgtgtatatcgaagtgcattgtagtggtgattgtgttaagttaaacggtaatgtctcgagtgcacgccacaatatggttgtatgcgagacaaggtaaaataaggtgtgctcgatatgaatgttcgatcgttgtaggtggaaattgtctttgcttaaatagagaggtggtgacatgccgaagtagtcatcgcttcctctatgtgtataagtcgagccaatacaccttatgcgtttattgaatttcacatcacacatagtgtacggtggtgttcattacttcgaatagatattttcgagtggacaagtaggtttg

SEQ ID NO: 199856 - DNA, 590 bp, Zea Mays
ggaggaatgagctcataggaggcaacaagtgatgaggggtttaggattcgtgttgctgttggtggcagctgcagcattgatcaggccatcagaagtagtaggggcagaggaggaggactgggagcttttcttgttgcagtggaggcagcataattctcttccatccccacttctcaatggggatctggtaagtcatccagacactattgtttatagcatctgagagcgactgattcatggaatgcctgcttcctttgtgcccgggatctgccagaaatttgcaatgcgaattccttttgtgttctcgaaaatttgaaattagctgctgacctgctacttaaaataaaaaaggtcctgaattcaccaagtacttcacttaccaaactaatgcagggacagcttttcagaatttgtcagtttgtttttccctgtattctgggtacttttggttggagtattgctattgaactcttttcttctgcaagatccaagaaagtgaggcattagcaaaggtagactgatgtaggatggttcttggatggatgcaggtggatagaatatggtcaatttgcttaccagacatggccggt

SEQ ID NO: 199857 - DNA, 365 bp, Zea Mays
ctggtcattgatcaggaatcttaacatctgaaataaaaatacctgatcaataatggttctttattttcacgctgatcaggtgaatcaggttttacattcaacaaaatccaaatgacaaatcagagatgaagaatcgtcaaccgtccctcgtcgtttctggcgaagaaccatcatccttgtagccccggggcgactcatttgtgttgccgccggtgtttgtgctcagcatcctgggggattcactagcaatttcgacgccgctgtttgtgttcagcatccgcggcggttcgtggtcaggggtgccgccgctgtttgtgttcagcatccgcggcgattcgtggtcagaggtgacgccactgttcgtg

SEQ ID NO: 199858 - DNA, 275 bp, Zea Mays
gaaaagcagttttatgtggctaaatactctaaccctgaattctccctgtagtaaatctgggagaccactgatgaagaaaatatctgagcgcaaaagtaatgcacggcctaggcatacaagtagcagtgtgcagtcagactctcctggtatagcgtctcttggtatcaatcagagtgctttatgcaacttgaaacagttccttttgaaccatacccttgaacttgtgctgttcacttttcagtgcaatctgaagatgatcatgaggaacttcttgc

SEQ ID NO: 199859 - DNA, 431 bp, Zea Mays
agatagggcacctcctctagtgtcccaaacatacaacacgtatagaactgccctatcctttgatccaaccgatcggaacattcagcgcacccatctccttccttctgtcggccttcatctccttccttgtgccctcccgatcccctgcgtttcccgagcgatccttccttgtgcgtcggcgcccccatcttcttcgttccctcaaccgatccccctgctgcgcccctggaagcaacgccaccaaccttcttgcgccccaagcagccgcccctgcctgcactagctcctgcggcatctgcacagatcttgctgccccgcatcttcctactccctgcggccatcaatggatccgaggcaagcccctaaggttcgcaggtcctcgctcaaggctgcaattggtgtgattccaggaggccgacctagtttttgcc

SEQ ID NO: 199860 - DNA, 314 bp, Zea Mays
gcattaagaaatcgatttactgaaatttgggttcctgctgttattgatgttgatgaacttaggagcataacttttgggaggttcaccaaaactgacttctcttgccttggagattgcattgttaacttctggaagtggttcaaccaattgcacatcgggagaacattgacgatacgggacctgctgtcatggatttcatttataaacgtgactgaacaaaatcttgggcccgagcaagctttgatacatggcctgtttcttattttgcttgatgggctctcattaggtctaaatgtttctaaaactgaggctac

SEQ ID NO: 199861 - DNA, 353 bp, Zea Mays
attgcaagaggcaaatgatattagtaaggaagtcagggctgaatcaagtcaagaaactgttattaatggtttccataggccagagatagaagagtctgtggtttcaattgaaaatggagattccataaatgatgcccagaaacaagaaattgctcaagcaataatgccaagaggttcttctgcaaatgataaagatgcagaatcgtctgttatgggagacaatggggcacatagtacaagtatcattatcaaagagaaatatgtcgatgatgatcaagctgatgatgcacttgattctcacagcatactgattttgatgtctagccagtgcccggaaaagcaggttatctgtg

SEQ ID NO: 199862 - DNA, 476 bp, Zea Mays
cttattgctagtatggatgatcactttgttgcaaaggttattgagtgtgacagttctcatctgatgtgaacccttcttcgtgatcactacaaacgtactagtcactcatcttgttgtcattcgttagaagcactccttacgacgaggtgattctacagttgatgagttctacagtcatatgtttgccatctggtgttaagcttgatactcttagtccacaaatctctatcactactcctataaagcaccagtttcgatggtcgtcctgcatcacgcacgaagcgcataagtttgttcccctccacccgataagttgattcccctcccacgcttctcgcctaacaaaccagactagtgtaaccaaccatgcaaccaccacgagcgcttcctcctcatcgttcccgtccaccgcttctcgcctaagcctttatctattgcttgattgcatgtgtaaccaaccatgcaaccatcacgag

SEQ ID NO: 199863 - DNA, 283 bp, Zea Mays
aaccttttccctctccggccgccaccgcgccatcatcaattcaagcgccaccgcccctggaatctataaattgagcccaccgttagctccgcaacctcatcacgcaccacaccgtctagtatcgctcccaatcttgcaaccgtgagctccaatttctggttttccccaaatctgttctgaaacgccgcagggtcgagctcaccgtggccagtcctccacaggtttaatcataccatccttgttcttgttttagcatctctgtgtgctggtgatgctcaccaac

SEQ ID NO: 199864 - DNA, 362 bp, Zea Mays
acaaggcctacgcggcccgtctcggcttcgtcgtccgcaagtccaacaagtccaagaactcacggcacaccgtcacccgccgcctcttcgtctgctccaagcagggcttccgccaggagcccaagaagccccaggacgaaaccgcaggctccggagtcgcgtcctcgccctcgctgtcgctggtgcctgcgcctcggtgcccggactcgcgcacaggctgcctagcgtcgctcaccatcaagctcattccttccgcaaacgccttccgtgttactgacttcgtcgccgatcacaaccacccgctcgcctcttcctcgcccgctgtgtcactagccttgctgtcgccgagctcttcacaccac

SEQ ID NO: 199865 - DNA, 515 bp, Zea Mays
aacaagttttgatgaccgcacccccagcatattgggaggtgtcaaagtaggagttgtctcttttggagttgatgtagaggaagcccttgactgtacaaacttggttggaggtgcttgcttgatgcagacaggccactccccaagggtagtttgacgaaactttgcttctgccttgtggtcaacagatttattgaccttcggcttggagaaaccaggaggacctgagctggagaacgcaaccttgtgcaccttgttagggtgttcttgggaggctgatgctcttgacctcgcagccatcctccttgcccttcgctttgcagctttagacacaactggaatgaaaccatcatgaggtttggagttgacctcctgctcaagcccaatcatggctggtgatgcagctgtggtacgcagggagccagcactatcgctagcatggagaggtcccagtggcacatccagccaaagcgaaccgatgcggagcgtgatgaagtcttgaacgcgtccagccatac

SEQ ID NO: 199866 - DNA, 322 bp, Zea Mays
accgtggcaagctccccggcgaccatcggacgggctaacgtgagtcacggcggtgtggttaacgtgccaaggcacatggcgcaaggccgcgaagtggctatctccggcgaacccatccgaagcaactgtgatctgctcgggtacggtagccggagtaaatagtggtcggagtttatccacggcgtgacatttacttacccccggtgttatctaactgatccgagcgtgaatcaccacgacgagcgcgaatccgagcgcacggctcgtcggcggtgaggggatctgaacctgatcctatctgtttactgtaccattggaaacg

SEQ ID NO: 199867 - DNA, 273 bp, Zea Mays
gtttagcacaattggttgggtcgataagttatcataacacacagggatgctagaacaaggacaaggacaacatgatcggacctgatttgtgctggccatggcgaggtgttcttgcggcttgtttgaaccgatttgggggaacagagaaattcgcgggctctggtgagtaattgaaggcacgagtgggtggattggatgcttgaatacctaatgaagctgagggtgtgctcaatttataggctccgggggcggtggcttatgaatcggggatgg

SEQ ID NO: 199868 - DNA, 410 bp, Zea Mays
gtcgttagatgtgaatcgtagggccacgatcgcatagcaggcgtactggttcgacgtaatcggctcagggcgtcgatctgcggttgaacggctctgatttctccgcgttatcgatcgttgtggaccactggttaacaatccgagggcccagaatacgtatagcctcgttgcctttgcagtctaatcttggcacttcgtttgggatcggacggctagatctgtgcggtaacgcttcgccgcagagaaattgctaaagagaccttgacaaacatttgaatcaacccgccgtccctcgcggttgtactttgagtcttgcggatgtttataccggagcccctgcactctttatatattctgcgcgcagtccagactgcaaataaaatcagagaaattcattctaaattcatttt

SEQ ID NO: 199869 - DNA, 284 bp, Zea Mays
gtccgactagtggatacagaatggtgccaacctctggagatagtaaaagaagacactattgttatagcaatgagaaagcagggtggtactcagaaatttgtaaaagctgagatacgtggttatgaggaaggttcaagattcttgattgtattccgtctgggcccagcatatggaccaatcaggtagtatgaaatggtaataagagcatccagacatttgtttcccagttttacgactatgaccattgtatgattgtttgtaggattgagaaccggacgagtcat

SEQ ID NO: 199870 - DNA, 284 bp, Zea Mays
cgcacataatcacggacggtccgggccaatgaccggacagtccgcacacgacctttttgaggaggattgctacctgaatcctcacccgtcccagcaacacttcccatcgcactatacaatgcatcaacctattaattcgagatctagaacccaggaaaactttccggccccacctagaaggccggaaaggaacgatcaaacatacgaaccatataaggcaagtggcaatgcaccacgtagctcaaaccaatgggggaacgacaacataccaacatgcaaccaac

SEQ ID NO: 199871 - DNA, 453 bp, Zea Mays
cttggactccccttccctctcctctccccgtctcccggcgtgcgtgcgtactacttactgcttgtccaatcgccgcgaccagagctcccgcgcacgctactggagaggattccagcgcccgtcgagcaacaggactctagcgcccgacccgacaaacgacagatagtagctactgcctccctacaccgtctcggcatctccgggggcacggcacgggaacggaggagcggagaaatccatccgccgaaccgcttgctttgcttggcaggcaccccgtacaattgggggttccggttcgaggaacgctcgggggggcgtgtgtgcggccgccttcgctcctcatccagaccacttgattacgccgcgctccctacgacaggaggtgcccaggccgaggtccttcgccggcgacgagcaccaaccaggtacgtccctgcacccgttctcttcccc

SEQ ID NO: 199872 - DNA, 386 bp, Zea Mays
ctttcattaactgaattccaggcttccagaactacctcttggaacccttccaattttggccaaaaggattcgaaatgaaatcgacgcttgccagaacacatactgttaagtccaagaatcagtgggcagtgatctgagtcctctgaagcagcactttgaaggagatggttagggaacaacgcttcccaatcagtagtgcagagaactctatccagtctgaccagtgttggtgaagattgatgattggaccaggtatatttgcgaccaataaggggagtatcaatcagaccaacatcattgataaattttctgaagcgacccatcatagatctattaatattatcattattcttgtcttcaaccttgtatatgagattaaaatctcc

SEQ ID NO: 199873 - DNA, 330 bp, Zea Mays
ctaatgaggtagcattggaacttaaacttatctgtatgttatttgtccttgctgtgtgtagcgtcatcaacttccccttggtacttggccccctgggaggtaggctcgacgtgtcgaggctggataccagtataccaaagataaaattggtggtctggcccctaggaggtagtctctacagtttgagactacctactactggactgggacctggacctacacacagcttcggctttgaagtgttaggagcacacccttaggacccatcgtctggtatttgccatcctttgattcatgcaacaggacctgcaggatttagcctgggaagcc

SEQ ID NO: 199874 - DNA, 347 bp, Zea Mays
tgcagccgtttcttcgatggagtaatgtggttcttcaattcagcaatgaagcgcataaatctggctgaacccctctcctcccctctctaaaatgcagcagcctctcccttctcccaccatcacgtccgccttcaatatccgtttctgacgactgctctgcttcctgcgaccagcgcccctcgccctcctccttcggctataaaaactacacccaatagagtcctcctccctcaactgctcgccctcttctcgtgcactcgcccctctgtctgctcctcaatgtacaacctctcaccggaattcctcgcactcgatctccatgccgctgtcgccatgactgaaattgg

SEQ ID NO: 199875 - DNA, 314 bp, Zea Mays
tcttccctctcgtccacggccacaggctagccggccttgagcgcctgtgacggcgcaggttctggggttgcaacacgcccctccgcccttccggcgcatctgctgaattccactctcctcttgcccgccggcgtcgcctcttttctttgctatcgtcggcctcggaccccaaagacgacaacagcaggagggcagcgcacctgtgaaagcggcgcctctcttgccgttaaatttccgcgtcgcctggcttctcttccgcactctgctttcaagcccctctgccatgaccgtgcccaccaaagacgacagccaaa

SEQ ID NO: 199876 - DNA, 289 bp, Zea Mays
caactgcatatcaatcgggctcgcagtgtttacgatcatatacacaacaaattatgatccatatggacacgatgtacaaccaacgttttatatcacgtacttggcgtggttcttgattaatgctttttgtaaaccgtttacgacactttgcgcagttctttatgcttaatatgaacacgacgtaaacaaactgtccaactgatcgtgcactgactagtggaccccacagtcccgcgccgctccccgcgggccgaccgagccaatatggtcaacgtccgagacccacccg

SEQ ID NO: 199877 - DNA, 2096 bp, Zea Mays
tacaggtatggggctgatattgctcgtggagtagcagaactccatgcagcgggtattgtttgtatgagcataaagccgtcaaacattcttttggatgctcatggacatgcagtcgtttcggattatggtctttcagcaattctgaagaataggagagttcctgatgactccggtgctggcattgatgctatgctgcttagtcccaattatacagctcctgaggcatggggaccactgaagaagtcactgaatatgttttgggatagtgcaaacggtatatcaccagagtcggatgcatggagttttggttgcacgctcgtggaaatgtgtactggtgctgttccgtaagtagcatgattattcaattcgttatcattaatgctttgtgaatggtgttcttatatgctcattgaaatgcagatgggctggactgactgcagaggagatctgtaagtctgttgcaaaagagaagaagccaccacctcaatattcaagagtagtaggtgtaggacttcctggggagctgtggaagatgattggtgaatgtttgcagttccgagcttcaagaagaccatccttccaggacatgctgaaaattttccttcgacaccttctggacataccacggagcccacctgctagtcctgagaagtaattccatctgattttgtattacttttacgctaaaacatgatacatggaagcttaaagctttggagaacctttacctgtagaagtattatcgatcaaattatcttcgagctaaccattcctgaagattcctttacttggtggtgtaccagcaaatgttgaaatgtcttcgagctaaccgttcttgaaacatacttgcatattgttttccccgacttaatttttgacctagctacttgcttatgcagtgatttcgcaaatgaaaacttgcccaatggcatggaacctccaacaacctccatcctagagatggttcgttataatccaaatgccttgcatcatcttgtatgcgaaggagatgctgctggtgttaggtttatctctggcaactcttgtatagttgcatgtatatcatatactttttcacactaagccttttgcaaataccagggatctacttgcgaaggttgcatcagagagaaatggtggtttcatccgttctctcttagaagcacaaaatacagatggactcactgccctacatttagcatgtcgccgaggctcggcagagcttgtggaagctattgtggcttaccaagagaatgtagatatattagataaggatgaagacccacctatagtatttgctttggctgctggctctccacgatgtgttcgtgcacttgtaggcaggtctgctagtatcaattctaggcttagagaaggcctgggtcctactcttgcccatgtctgtgctcatcatggtcaaccagagtgcatgcaagtatgtcgtcatgctcacctcatgtcgtttaagcttgctggttcctactttttagattatgtatgtgttatgtaggagctgctgatggctggagctgatcccaacgcagtagatggtgaaggtgaatctgtcctgcatattgccgtggccaggagatatactgattgtgctattgctatacttgaaaatggaggctgcagatcgatgggaatatcaaattctcaacataaaacgtaagaaatattcacctagtgcctagtggaagcgaagccagtgcatcagcttctattatcatgttctacaacttgaaaaagttttggaaatttatttagttgtggctgcattaaatcttcttcctttgcatgttttatctgtctatttatttccttctagtgacatttcgctctcacggtgagtaggccattgcatttatgtgttgagacatggaacacgactgtggtaagaagatgggttgatgttgcatctctagaggatatagcagaagcaattgatgtacccagccctgttggtacagctttatgcatggcagcagctcttaaaaaggagcacgagaaaggtaatgtttggttttgcttctattggattcagcatatataaagacatagatctatggttctatgtttggttataccactacgag

SEQ ID NO: 199878 - DNA, 338 bp, Zea Mays
cacattctccacgaacagtgggcatcattcaacatttcgaacgtcaagtaaggttgcacacagatgccctcaatgaagatgttgaagtcaccaatgagcgcattggtcaattagaaacagcacaaattgttaccaacaacatattgaccactttggaacgaacagttgctgctactaacacctctcttgcagcaattattgagcgcttagataggatggaccaagttgggcgtgaaggtaggcaacaaggtgatgatgatggccatggttccattgctggtaccgcaagagatgatgctacggagtattcagcacacaccgagcatgatgaccgatct

SEQ ID NO: 199879 - DNA, 452 bp, Zea Mays
gcgattagtcgtcgaccagatcgactaatcgaccagatccacatctacatgcatcaagcagatgacatgcatttaatcaaacagagaggctagagggcacacaacaaacaaggaaagcagagaagaaaacccccactcaccatctgacgatgagacttgagggcgagcactacacagggttgggcgcttggaaggttggggggctgtgggcgcttggaagctcttggggcgacactgcgtcttggcccttgggcggcgactacagtcgtgtgcggtgtcggcggctccacgttcgtgtgcgccagtggctcctagtccgtgtgtggtggtagcgactgcgatgtggaggacagaacagagcggttgtgcctgtgcgtgcgggactagacacggggcgttatggtcttatgcctgaggtgaacgctcccaaccctagaagtccataaagcaat

SEQ ID NO: 199880 - DNA, 408 bp, Zea Mays
ttggctttaatgattctcaagttccagaaagtcctgctggggcgttttcttcggagtcaccagaatacatggccacaacttcagaagccattggtgttgagcagagcaatggtccttcaaaagtgcttagatcgattcctacatggtcttcaaaaactcaccgtcttcagagcagtgtcatgccaaaaacacctagatcagctgctgctcttgcaaagagaaaaattaaggagattgggaggagagaagctaccaaattagataattacaatatagtgaggaatcccacttcagtgaaaagatctgaaactaggactctttccttcactgcagggccaagcaatggatcaaacaggttagcatctacctcaaagaagatccggaagcatcgatctctgttgaggaccg

SEQ ID NO: 199881 - DNA, 277 bp, Zea Mays
atccatttgagtaagtcgatacgatcatggccaagtgacttctgctaccatgaatggcccttcccatagtggcgacaatttgtgccgtccttcccccgttagaattcggcgaaggaccaagtctcccactgcgaaggatcgatgtcgtatggccttatcatgatagcgcctcaaggtttgctagtacctagctgactgaattactgtattcaatcgttcttcttccaatatatcaatatcctctagtctggtagcttctgccttagctatgttttcg

SEQ ID NO: 199882 - DNA, 289 bp, Zea Mays
cgcacgtagtgaccgtcgtgccggttgcatggtaggtgggaccgggccttcgtgctggtccaccggaagtgacgaagtcgaaagggtgcataaccgtggggcggttgcatgctcccagcgtggtggctcgccccttcgtccgctggttccggcgaggaggagggaacgcttataaccgtagggcggtttcatgcctttcgtgcggcggtttgcctccttcgcgtcttgggtcagctcacacgacgtgtggggcccaacccctgtgtcgtagggggagaaccctggagca

SEQ ID NO: 199883 - DNA, 860 bp, Zea Mays
tgtttacttgtaaatgctcatttttggagatttataatgagcagattctggatctgctcaacccaaattctgtaaacttgcaggtaattcatgcacggattttgtagttgtacatatatttgcatgccttgttgtagttatacctcgtgttaatttaatggtccctgcttttttctttgttgcatctttttatgtgctgttagcaaatgtctatatttcgagatatacattattcatatcattagctgattagctctagtttgattctttcagataagggaggatgccagaaagggtatacatgttgagaatttgacggaacatgaaatctccaatgctcgagaagcgctgcaacaacttattgaggttgtttgatggaataatttcattttattctgtattttatgctgaggtttgtctctagttgggattgttggaagcttgaatcccttttgcctgttcaaacagaatcgagtttgcacaattgtctggttcctaagtttaagattcagtacatgactgaccttaatatacattcttcatttctttccagggagcagcaaacagaaaggtagcagccaccaatatgaaccgagcaagtagccgctctcatagtgttttcacctgccttatagaaagtaaggtacatgaaagatgaaacacatattctccagagttgttactggtttgtaataagatctcattgtggttctctagtttcaaggtgtcatagtggtattatatattcaaccttattattgttcgttatgacgcacacatattgcccttactttctcttgaaattaattattcagtgggagtcacaaggtatcaagcaccaccgcttttctcgactcaac

SEQ ID NO: 199884 - DNA, 920 bp, Zea Mays
cgaagcaccgtgatgtcgaacgtgtatatcgaagtgcattgtagtggtaattgcgttaagttaatcggtagtgtctcgagtgcacgccacaatatggttgtatgcgagacatagtaaaataaggtgtgctcgatggggatgttcagtcgttgtaggtggaaattgtctttgcttaaatagagaggtggtgacatgccgaagtagtcatcgcttcctctatgtttatatgtcgagtcaaaatgcggggtactagtggtacgctaggcggtgtccaaataaattaaccggtcgatgtggtagtggtcgtgcgtgatttattgttagtgagtagttggaattccgagctatatgaggattatgttaaaaactagtaggcggtgtgtaactgcgttcgtatggtgaataataggtcggtaggtattgttgatgcctatagcaaatgtagtcttatggagttttacgccgtgtgtaaatgcctccacgatataccccaaaaatgtgctatttaggtgacttgtgtgttaactaattgaagttgagcaatggttgagaaacactgatcaatcggctccaacccatgttcttgagttacgatgtctaaaatggttcgctaggtcttctactgtgattagccaactcatgttaaataggagtcgatttcgttaagtgtttgttatatatgtgttgtttcggattgcgatgataagaggcaagccgacgtgtaggatgtatagcggcctatgttgttgcgctagttagccgaattaatagatgacttggttaagctcgtagtcacgatgatttgcttattgtagtctaaatgtgtatgtttatggtcgcggatgaaaagtagtagtgctcatgtgatgtctaatttaaaacgcaaattgttgagtgattgtcgtgaagaatgcgttgtt

SEQ ID NO: 199885 - DNA, 583 bp, Zea Mays
gtcaaagatagtgtcctcatcttggtgatggtcgagctcctcgatgagttgaaggacgcctgtctcccaccaatattgacctccggagaggtctaaggactaatatccagaagagcagtgtgttcccaatctgctgtggggaagaagatttgaattgtttacaagacttgctgccatgtaatatttcagattttccatgtaagtaccttggtctgcctttgtctcccaagaaactcacaagggaccaggttcaggccatcgttgattgagttgctagccttctgccaggatggaaagctgaacttatgaccagggctggtagagctattcatgtgcagtttgtcatgacggcaaagatgatttatgcagctttggcacttgaccttcttgtttgggccatcaaagcaattgttaagttgaggaagggcttcctttggaggggcaggaaagagttccgtggtggtcattgcctcttggcttggcctaaggttacccgtcccaaggagctgggtggtcttgggattagtgagctaaagaacctatgttgggctctgagagctcgttggccatggctgcagaaaac

SEQ ID NO: 199886 - DNA, 400 bp, Zea Mays
gcgtgatgccctcctcgcccatggttcgtcctacctcttgcatgacaggctccactcctgctcggattaccacatcgcagatgtgtgctccttctgtgggagcctgctgactgcgacaatgatcaaatccgatacccagaagaaagtcaagcacgagatgcttgggctccccactgtgagaccagcgaagaactttgcatgccaggcctgcaaaacaagcaaggggatggagaccgtggcaatgccgtatgtgttcaggtacctggctgctgagttggctgccatgaacataaagctggagctccggttgagcaacaaatcaggattgcctctcagctaagaatcataacaccagaattagcgcttgttcatcgcgggggctgcttcgcaggagaagctt

SEQ ID NO: 199887 - DNA, 276 bp, Zea Mays
tcctcatgcagctggtaaaagtggcattgcataatggtccacagccaggcccgttcacatatgttgtccagtgtatgtatattgtacctctgctggggaaaacttattctgaagggttcagccatatgttgacatcctctttaaagcacttgaaatctgtggaatcagcacagaaagatttcttggaggcaaagcaccttgccgcacaacttgttcttgatatccttgattctattgtaccccatgagaaccgcatattggtcaagcttcttgaga

SEQ ID NO: 199888 - DNA, 326 bp, Zea Mays
tccttttttggcccatctacagtaagcaatataaaccgcttgcctcccctgctgaaaccttatcgctgctgtaacccaaaccctgcctacgcccctgcccattgtctgccctctaccgtcgtcatttgtccagtgcattcaccggcggctgctccagtacaccggcgctggctctccaggactccaccatcattgtctccagaccagcaccagtgagcagtgacgaagaggaactaatgactggtgctggtcccttccttctcccccttttctatcttattatcagtatgtctacactctgcggtcagttgttcttgacttcttgg

SEQ ID NO: 199889 - DNA, 273 bp, Zea Mays
ccaccactcattttcaggagcaggagccttaataaccattttattacatgcaccttttgtgtacttggtctgtcttttatttattttttgtagtactagtggtagcagaagcagacgatgtttaggataaactaattagcagcttttgtgtactggtaccttccaccgatcttgctatctgctagcacgatctggcacggataagagactacgacgtgtcaagtggtagctagggttgcctagctcctcagcacggcgagctgatgaactgtg

SEQ ID NO: 199890 - DNA, 886 bp, Zea Mays
gtggtcagcctgcgtgtgggacagtggtactccctccctgcttcttgattcgtctctgtggttgtgtttttagagccactgctttccccccttatcttcatctggtagagtgggtttgatgtggcttcctgcgagaaagatctcactttgatagtttgatgtcttcatgatctgtctgaggtttttcggcttgatttcggcagctgattaagcacccgcagataccactttttttttcttcgagtatccgctcttgttggactggatttctgaagtgctcgcagattgtctgtttatttatatcgtgttgcctccttgtttctgattattccaatcttctggacaattttttcccttccgtagagcgcgaaagatctcattttgatctgctaaacagctgcaattgtatcccaatttgcttcagtctccaccactggatatctcattggggtttctccaagatttgcatctgcatagcgtttgtctcgatgctgttgtctgttctgcatttgctcctagtgtccggcatttgtctgtctcttcatgctgctcccatgatctaggccaaaatttgacaactggcccatccaattgacgtctttttatttattcttatacattgtctggctttattttcagttcaactctttgaggatttggcaactgtattttaagcattaagcttcaacgcagaatttgaaattggcggggctgttgttcaaagaattggagatggacaggaagaattgtcctccatcgccatcgccaagatcgaccgagaagtctggaagagaattgagatctggggaggccaatgtcagcacaaataccaatagcaacctcatcgcaaaaggtgacaaggagaaaggagtcaatgtgcaagtca

SEQ ID NO: 199891 - DNA, 674 bp, Zea Mays
attccccaaaccggttgcctgcagtcatcaactttatattcggctgcttaaactcaggcacttgtccagtaaggcgattatttgagacatcaagatatttgagggtttccagtgtcgtcaaagcatctggtatcaccccggtgagttgattgttagacagatccaaccgttgaagcctattcaggcttgcaaaagccggtgaaataattcccgacaagttctggcgaggcaatttgatttgagtcacatccattttgatgcaggaaataccaggccatggatcgcacgggttgtttcctgcccacttcgcaagctgcaatgggtatccaaaacctaaagccacctcaagcagagtggtcaccagcggatcgcatggcccagagtcttctcgacagaacccgttccctgatttcaaatccacagtcttagctgtaaagtttggtttgggcccttgaagaaaattattggacagcgacacatcctgaaggcttgcgatccctgaaagagagggtggcaccggtccggtgagcttgttgtccctgacattgaagatctccagctgtgagtttgggtcaaactctgggatcgggccggtgaacaagttggactgaagccacagtgtcttcaagctcggcaacttcgccacgacgtcaattggccctgacagcttgcca

SEQ ID NO: 199892 - DNA, 1337 bp, Zea Mays
tgcttagagccttgaggtcaaatgcttataccgtgaaaattctcaaggtgagtactggagtttaactgcaatggcaaattcattcagcttacaagcgtcgatcttttttttactctgtacccctggtacttctagttgtttatctccacatgttgattgcttagtgtttaagactagaacagttccttcataacttgcacaactagccctcaaagaacaaaaggcgaacaacttgagcagattcagtaattagtgacccattacaggatcagattccatgtagtttggtacacaaatttagcttcaatgcacatttttcctttttaaaaaagggatgtgtatgtggagtggacatcagcaatgaagaattttgttgcctagtcatggtgccaccactaggacatccacaaaagaatataggcccagctcgaacatatctgtccttcagaaattgcctgtcgctctctaatgatttccatgcgaccatgcctcgaaggtccacgcttttggtttattgtttgctactttattctttcctgggtgcccttctgccaaccaaatcacacatcaaacacatacgtgtaatcactttttttaacatctaagggattttcctcaggttaaggttgtctctagaaaatcgtgcatatggtcgtgtaaaatattattttgcactgtagattacgtttttcatataataaagtttgaaatagagataagatgagaaatatgataggtaagctgctggagacagcctaaggctatcccacaagcctcactatcccatcttctatttcaaactttactatagtgccaaacatttttttgtatggccatatacatcctctgttgagcacggactaagcagtttgataggcgtgtttctgttttttttcaccatacaattgcacctgaacagaataatcgtctaagtattaggtgctacagtaaccataacgaacggtcaaaacgagaaaacaggatgtgcatacagaaattgtacatttaacatgatgttttttgttttgacgaaatgatagaacctttttgccaaaattaaatcaatggatggatattttcttacgtaaatttcattactgcaggtgtgtcttctacctggaaatgtgttgaccataacgatgtcaaagccctatggatttcgttacagaagtggacagtacatatttcttcaatgtccaataatttctccatttgaatggtctgtatgagactctcgatttgcatctcctcaatctgctctatagttttctggccaatttagtattcacctgctgcggctctgtgtttgcaggcatcctttctccatcacttcagca

SEQ ID NO: 199893 - DNA, 319 bp, Zea Mays
aacatcaataacacgggcgatggttaagcagatctgcatcgaggtctagtcggtgagtgaggccaatacacaatagctccatcatgactttagcaccttgttatggaaggaggcagagaatacggaagatttcacaaaccacatcatccagcgacgcaaacatcaagaagcacaatggtcgcgagcgaggccgtcgagagcgttggctccgcatcacgcgaaggctacaagggctagtatggtgatggataggctcccaaccatgaccatgcaagagccgtaaaaaatggccattgtgctagggattgtcttagaaagc

SEQ ID NO: 199894 - DNA, 487 bp, Zea Mays
tttcttgcatatcagctgtagaaggtggaagactagaggatgactggctcatcctttggtcatctgatagttcatcagggttctccaaaacaggttgagatgatgatccacgggcagaattactcgttgtagctctcactgaaggtccaaagttaatattctctgaactcctgggggcaccaccaggcccacccatctgagaagcaaaactcatcattttctgtacgtcatcaggaggcatactagcaatcatgtcagatgccatcttaagcatatcaggagacatttctggcatattgggtcccagatttggaccagcggagctagtgctattcaatgaagaagcaacttcgaacattttctgaagctcctctggtttcattgagccaatcatatcagtggcagttttgacaagttcaggcgacattccttcaattccgaagtttgataagccttcaggatcgctcttggacacataattttggga

SEQ ID NO: 199895 - DNA, 363 bp, Zea Mays
ccagaatgaagagggaaattgccaagtatatatcagagtgtgacacttgctagagaataaaagctagccacttgaaggcagcaggccctttgcaaccccttcccataccatcttggaaatgggaggacatttgcatggactttatggtgggattgcccaatacatccaggcaccatgattctatttgggttattgtggacagatagactaagactgctcatttcttaccagtacacaccacccaccggacagagaagtatgcagagatctacattgaccagatagttcgtctgcatgggataccaaggactatagtctcagaccgaggagcaccttttgtggcacgattttgggagcaattgc

SEQ ID NO: 199896 - DNA, 454 bp, Zea Mays
gctgtccatgctcagcctctaccgctcctggaaacgcgccgccgcctgtttcgccgcgaattcctagtcgccggcggcatgagctgatgccgccgtttggatttgtgcggtgacacataattcactgtaaattactcaaactactagcaatagctagctagtgcagtacagtatacttatatgattccatttgatgcgtacggtctacaacgtgtaagtactagtatttagcgttgccaataattagcgacagggcacgctccggcagcgagtggtgctgttgttgttggcggtgtgctttagtgagcattcatcattaagtattgggtttacgttcaaagtaacttcgctgggaactttaagcttgtggttgaattcagctgggtgaccactaccgctgacatcaaaagtccaagcctgtaatcgtgaaaagctgatgacgacgaaaagatga

SEQ ID NO: 199897 - DNA, 388 bp, Zea Mays
ttcattatacctatgtaatgatagatccatgaaggccaaggcaggatcaaactcactaggctctggtgtaccagttgctcattggatgcaaagacgaaggttgtagttaatgaacataagctcatgcaatttcaagtagccgagtttgttgcggagctttgtgtggatgaatgcaaaagtactctagttgcactcacacccactcgatgaggcacactatgatagcaaccgcttagcaacatgttgtagtgtcggcgtatctgatccaaacacgaaccaccaactcgtaggagaagtccctcggtcaatagccattctccttgcaagctcactcgagaagtctccaatcttttgtaataccccaaatcatacattggatgaattaaga

SEQ ID NO: 199898 - DNA, 375 bp, Zea Mays
tttggtcccgcttcggtctccgaaagccgaaggttgaaatcgatgaagccgacgaagcatgccagaaggcctttggcactgtatgcttcttcattggtacaagagacttgattcaagaacatatagcattcagagtatggccgcttgtggagagctgggagatgccaaaggagactgtcaccaagtctggtgaaggtgagctggttcaactgaaatacaccttctgatacggagataaatttgatgaaccgaatgatgactggctgaaatgtatctaagctacaagtgatgaactgcttgggccatattcaaaagcggaagataatgccttatccacatccttcggggcccggggaaaaaagagattaaacagag

SEQ ID NO: 199899 - DNA, 401 bp, Zea Mays
accagttagtaccacctcggtagctcagatgagtagaagataccttaaaagttcagctcaggcaacttgcagcacgaccttacttgaacaggatctgttctataggatcgtactgttgcatccttgattaataaggaggcaagtacttaaacctggttgatgagtaaatgacctgtgggccagagcgtgattaacggccaggattcagtctctgtgctttgtctggtgctgtagatgatcgttcctggtcaggagcccctggctaagggtggcccacaggttgtctgacaggtcttcaaatctttttgccctgcttcagttgaacaatggacacctcgacattttttttgccaccaataatgatggaatcatggaactgtgttgcgtttgaagggaatttt

SEQ ID NO: 199900 - DNA, 282 bp, Zea Mays
gtgattagtggctacatgcatgcaatcgtgggcagtgcgtgtgtgcatataagctgaagcctgtatgcaaagcgacagtggtagtattgtgcttgtgtctagagttagtgtgcagtgtcgagagaaaagtagagtttgtgttggttctggtgtgcagtgccgtcatgaaacaagtgtgtgcctgtgttgtgagcatcctgtattcctgtgtccaccgagagaagctagcaacgcctacttgcttgtgttgtgcccaccctcttctgatctccttgagtcaag

SEQ ID NO: 199901 - DNA, 318 bp, Zea Mays
cgtcgtcgaggacgtggtcggcgagagcgaacaaccagagtgtgaggatcacctgagcgcgccaacgagggtagtgagaggacgcctggtccaacacaacaaacatgaggtactgaatgttgtgaaccccgacggcctgagcgtggagggcggtgatggtgtcggtgtcgagttcggaggtgtggggagcctcaggagcgagtgagcgaccgaggggttggggtctgaccgcgactgaggaggcgctacgcagcggccatttgagttgtcaaggtggcgccaatggcgctctgttgctccagagcaagggtcgcagca

SEQ ID NO: 199902 - DNA, 447 bp, Zea Mays
gatcaaacaagaataagcaaatgcatcagtattttcatggtgcatggatggaatacatctgaatgttggaaggtgatctcaggctaatcccgtgatctacttgagacacaagtaatggcacaactgtcaggtcccgatccaacaaataagatctcgccatgatcaaccagtttttatatgagcatcattaggagtggttgattactgaccatccatccaagatcaaacgctgaaaacagcaaagcattaggtgttagactcatgtttagggtttggcttgtgcctcttgtatttaactgactaccccagtgtaatgggcttgacccacctaactgatctatataacactcacccaaccctggattagggttggggtttcctcacattccaatttggtaacagagcagccagttttctctctcccttcctcccaccccacaaccgtcg

SEQ ID NO: 199903 - DNA, 344 bp, Zea Mays
tagacgcttcagccacatcatctcacatatgcttaatgccattgccctatattcagcttctgcagttgacctagccaccactgcttgcttcttgcttcgccatgagacaagattacctccaacaaacacacaatatccagatgtagatcttcggtcatctctactacttgcccaatcggcatcacaaaacccttccaagttcatgtgtttgttccttttaaaccacaatcctctcccaggtgttcccttcaagtatctcaagatgcgataaacaacatccatatgtcttgtcctaggatcatgcatatacctgctcaccacacttactgcatagcatatatcag

SEQ ID NO: 199904 - DNA, 373 bp, Zea Mays
agaaatgctctatggcagtctacctgggagaaagccgaaactacccaaatcaccctcctttccaagtcaccttcactggacaccgcttcccagacacttgccaaaatgttgcccgaaaagccctccgccagctatgccaaaactacagcagggaagtctttgagacaccccttcgttactttccacccagcaacaaaaatacccctacgacctggaggaaaagacttcaggccctgtcaggaagagatcctactgaagatgaccccaccatagtctacatggccggatatctccacacccttgacaaccactatgacaacctttcctcccactgcacccacctaaactcccgggaggagagccttgagcaaca

SEQ ID NO: 199905 - DNA, 361 bp, Zea Mays
cgcaaagatgtggcataagtagtgagcatatggcaactgtcgacaagcacgaatcccatccaaaacggtgtcctcgatctcacaaataaggaagtccacgacgtcaaactcagagtgagagaccagggcaccaaggagccagagctggatatgagtggtagcctccctgtatcccatcctcggcagaagagttcgtctgataaactcaaataaatacttggctgctgtagtaaagtctgccggtgaacgtcgcgacccatctgaaaagggcgggcggaacagagccgcgacgtgagctgtacccggagccacaccaccatgagggcgacgaggagggtcagaagtgccatagcagaggctg

SEQ ID NO: 199906 - DNA, 550 bp, Zea Mays
gagaaagagaaggatgtaattgaaggaaagaaccctgaagcacatgttaggcgatcaacgaggaaatcagttgtgcaggttaaagataccaaaagtattgttgaagagactcaatatgctaacagtgaagatgtggcgaagcaaccagcaactaaaggacctgctagggggctgagacgtaaatctgttatcacagaattgcatgagaaagagaagagtctcattgccgaaaagaacatggaaacagatgaagcgatattaacgcggaagcctgtaatcccagttaaaaatattaaagctgttggtgaaggaattcaaattggtaagggcaaagatgtggataaacaatttgttgtgaagcaacctactaggcgatcatcgcgcaaatctgtgctgcctgatatgcttgagaataatagtggacttctagcacccaaaatgaatgctgagatgaatgttaggagatcaacacggaagtctgttcttcctgacatgcataatgagaagcaagatcaccataaaatggctagaaatgagaacttgcaaagtg

SEQ ID NO: 199907 - DNA, 421 bp, Zea Mays
gtggtcttcttcttgatgcttacatttgggatcggaggctatgccatatagactcggttcttaatacacatggccatatttcaaaaaccaatccagataatcttgatattctcctatgcaccagactgaaggagtggaaagctgatttgctttgtggggatactgagattgaaaaatctttagggagtccaaagaaatctttgttatccagagagggccatttgaatgataatgagtacagtgttgctgatacaaatttagagatttgtttggagggtcatcctgtggatgatgcagatgatcttgacaaagtctacaacaaattcagtggagtaaagaagcggcctactgctgaacctactgatggcttggaacctgttgagaggttaccctcacttgcatccattttctctgatactat

SEQ ID NO: 199908 - DNA, 312 bp, Zea Mays
aggctagccgacgaccctaggcgtagccatggagctgtgctcggccatgggaagggagatggcagggggcgccatggccagccggcgctgtggccaagcacggaggctccatgagcacctagcagaggtccggccatggatggatgatggagctcgggaggtgggcgtggaggtgagggagaaggctgctgctgcattttggaacagagaggaggagaagtggcgtgtgggggaagggaaggagaggggtgggctgccatttattgagctggagctctggacatgtcaggtggcagtgagcagtggcaggtg

SEQ ID NO: 199909 - DNA, 311 bp, Zea Mays
gcatcaatgggtgcgcaggacagtgaaccaatcgccagtcaaactttggccccacctgcaggctcgcatcctcccttgaggcgggcccgggggccattgtcggtaccctgaatcaggggtaccccctactacattatgaagatgtggtgcccgtatgacgtctcctagccacacggtgaacagcacccgaccccaccacgtggggcggctcaaggggcaccacgtggcgagaaaagatgatacatcccaggatgtatcagctagaccggacctccacgagggaacgccggacccctgtacgcacaacccgg

SEQ ID NO: 199910 - DNA, 820 bp, Zea Mays
cccgccgtgttttgctatcccagactcagccccgttagagtaaaaactccccgcttcaatacctgtacccgtgggcgggtacaattccacactcatacccagactcgccgggtattccatacctgatgggtacccatacctgcctagagtggtggagttgcgcctgtctgcccaaattagtttatggtgaaaggtgagcgccgagcggcaacatcaggccttccgtcttccatcttctaggtgtgggcgtgtcgtgtgtctgcgtgcggtttggtctcttcgattgcacattaacgaagagttgcattgcagaagcttggagccttggacgtgatttactgttttggctggttatctgcatactactgccatgtgtcccaaggcctatgtacatattatgcggcgacgactggttatctgcatactactgccatgtttccactatatgtttcccagagagggcgacgggggtggtaagtgcagtggaccgcacggtcacgtacctattgggtgagtgcttatgcggcgacgactgggaaagcgcttgagcggcgacggcggcggtgtgtagcctcctttcctggcttcagcagcgcacgagcgtgctccctctctcagctcaggcagcgacgctcgtggcgacgtgcgggcgtgatccctctctcagctcaggcgacacgcgggcatggagcagttgggtgtatgtgtgctccctctgccctctctgtctcagcacagatggcactcactctctctcaggcatggccgtgcaaccccttccctccctctcagacacgaccgcactatctctatagactac

SEQ ID NO: 199911 - DNA, 448 bp, Zea Mays
ggataaaagtgatgatgatgaaaagcataatccatggacaaagttaaggcaagactcgcaaagtatcgaagtggggataacaatcaaggataaaataagtgaggttatgacagatgagttgaggtaaaaaaatcattaccgaatgaagttacaaggaattaacgagatcaccaaggatgtgcaaaataaaatgactgctcatggatcatcgagacacaagggtggtcaagggcatgtaaaatgaaatatcttaaacggaccttgagatataaaggtaggcataaaaaaagatgagagtatgaaagatttcaaggagatgagcataccaataccaagagacaagaaattgtcgaaagatagcgacttaacaacatacgaggaaagggtatcaaaagacaagaaggtcatggacatataactgaaatgtttaagtaggcggtagaaattt

SEQ ID NO: 199912 - DNA, 407 bp, Zea Mays
caatttttttggacagcagcctgaagaactgctgcttgctaggagattcttcccctggtggttcaacctggctaatggaatcatgctgtcttcttctactgtagactttaactgctgtcctgtcaggattaggatgcaatctgcagctctggactgtgggcgaggttaagttgactgatcccagcggctcagctccagattgctgaggcgagatcagcccacttagccccagcgacctggaagaagtgggcgggagggtggagatttctttgggtacgagatccgctgtttgacaatggggcgagacaggcctatcaaattccagcggcccagcagttgtgttcctatgccatcagttgtgttctgttgttttaaattactctagtttcttcctcgtatggtttttc

SEQ ID NO: 199913 - DNA, 329 bp, Zea Mays
ggctgctgccttgcaaaaagtggggcgagtgaagaaagcaggcagccatgcttttcgggagaaggggaagggaaaagcagccagccagccagccaccacactaccacagcaaagcaaagctcgcacctcgctgcgcactcccactgcgcttctcttcctcgcaccagcagtccagaccaaggagggacgcggcgggggcagcacctttcctcttcctcctcccccagaaatcaattcctcttcccacacgatccatccggaggcgatccagctcttcgcgccctctcttccccaaacaggatacatgagtgtctgtgtctctctgcctc

SEQ ID NO: 199914 - DNA, 460 bp, Zea Mays
cgccaggcaaccttgccagtagttgcttgcgcgggataaatacgctccgcgcccgcctcctccctgttttctccatagcctcggatcgcgtcgcgccgcccgcacatactcccccttcgtccggtgcgcaccttgatctgcttcctcgccggcgttagcttctcgggacagcaccagagggtcgcgtgggcaggaggagtctggtgcggacgtcgggcggcggtggcatccactagaccgtcagcgattgcttgccgccgctgtcgctcaaccgcgagtcggctccacgtcgggggtcgggatcttcggtaccttcaccctcggtaaattacccacagctagtttcacccggtgtgtcgcattgtgttaaggtagtcgcgataggagcagaccgttgtagcatggggcattcggtgttgggtatggcgccgccgtcgggcaactacggcgaagtcacggc

SEQ ID NO: 199915 - DNA, 271 bp, Zea Mays
tctggtgtggaggtagttcattcctgcgggaatggagcatgagtcccatttgtaatggtacttgcgtgagagcaagatgtaatagcttcaagtactaagacatctgccgcaggtcgggaaaaccgccgagggcgctgccgacgtctaagtctaggtaccatagttaccctaagtatgtgtgtttgttctttgtggctgctgaggcctgaacatttgggtataaagtcgtgcttctttcctcttgtttcgagcattaggacttgttcgtcgg

SEQ ID NO: 199916 - DNA, 311 bp, Zea Mays
ccaacatttggtgcgcatgcatgggctaacgcaagaccgtaccctatcagccaaagttagcgaaaaagcccagtccaactaaatgatactccatttcatatttttctggcctgaaacaccttcaaattccgcagcgcgaggacgaaaccctcgcaccgtttcagttttccctcccaaacttgccccaaatatctaaatccatcctccttcgcaggcgctccaactttccccttcccggcaaccaccctgtgccttcctcgctgcctcgattccgcttctgtgctcggctagggagagcggcagagtatcag

SEQ ID NO: 199917 - DNA, 467 bp, Zea Mays
aagattcttgtccaatccaggtgtgtacctgaagaacagagcaacattgtgtggatcaagtttttcaggcaaaagatgaacagcttgtaggtactcaaaacccttctttttgtccctattaaaatgttcaacgccaatcattagctttgtcttgatgcttttttgctggtgaacaaatttaacccactggtcaggatcattactgctctcacatttcaactgccagaaaggaaaatattcacttatttctggaactgtttgatcatgatgttgaggtgcattatcagtccgctgtgccattgcctgaatgacagcaaccaaaccatccaaagcaagcacatttaaagctgacaaaggactattcacaggaaatgcgctcttagacagaaggttagctaactcttcaaaaatatttgagcactgtagatcacagtccatatttgcatacatctcagccataaactctt

SEQ ID NO: 199918 - DNA, 326 bp, Zea Mays
tcaatcagagcctgattgcgattgattgtaatcccctagattggctagctgccttgtatagcctaggattactttctatctatagcctaggtctgtttccttgtacagggaatagccttccatacatgtaccttccatgcatgcctattggctatatataacaggctccccaccctcaatgggtgtgtggtgattcagtccattcttcctctctacatggtatcagctctctagatcctgcgcttccctccctgctgccgcaccatccccaccctgctgtgccgcagcgccaccacctccctgctgcgccgcctcttctccctcct

SEQ ID NO: 199919 - DNA, 612 bp, Zea Mays
ctgttccacgccatgccattattaaaaagcttgcaggagaggatattgcacatttagatgaccttattgcagttctttcaaaattgtctaggggaacacgagtgcctctagaatacgtcaaataccctgaccgtcacaggaacaaagtaagatttgagtagctatttatcacaataatcaatgccttatctcctgcacatcccagttcaaaatttgagttcagtttcataaataaactaaccatttttatttacgtgactagtctgtactggtgacaatagatcaacatgaatggtatgcgtcacctcagttatatactcgaaatgatgcaactggcttgtggactggaaaaccagctataccaccagaatctccgtttttagctctagctcatcatgctagtcatgtggacacaaactcaaacgctgtttcatctttatccgaatctagtcctatggatctcaagtgccagtatgattctgagaacctggcagacggatgcatcaaaatgcaaactgatgatgagattgttgtggatggatctcattctaacgaagattctgttattgagaaaaaaaggcgacgtgtggtcgaggagatagctgccgacgg

SEQ ID NO: 199920 - DNA, 327 bp, Zea Mays
ggcatcatcagcaacacaaccagcaaaggcaataagaacatcaccattatcagaattattttcggatgcaacagagacagtacctccagtcttacccttctccttgttcctcttctccttgttctgcagtttgtaacagttctcaattacatggtttgtcttcttgcagtatttgcaaaataattcatcggatggcccccttgacttggagtgacccctctggttcttcccctttcctttgccacctgagttggactttttctgatcagtgcggccacggacatacaaagcttctccactcgagccagcagcatcttccgagttaac

SEQ ID NO: 199921 - DNA, 963 bp, Zea Mays
actggcaaggcagagttataacatggaaaatctgactctctgatcagaaaagcatttggaattttgttagaatctgaggctggttcactgtgagaacagttagtgacagatgaaaaatctatctcatgatattcttggcagaaggatctgaaatcatcttcagtcataatttctgatggtaatggcgcatcatcaggtggagttgcaggttcccaaagggcatcagcagttactcccatattgtcatgttgtattacaagctctgaaaggaaatcctcttcttcagggaaacatggttggctactcatactggaagatgaataaatttgagtgtggctcatcaagtaggcaggatccaggaacgggtttgtactactagaatcttgagcgtgcatcccccacgccaaatcttgaccagcattcactggttgtttctcaactgcattacttttcaaggttactgcaccatccttgttcaaatcgcagagagatcgatcttcagcattatgactgccctcttttagtaattcctcttgataatcagattttactagaaattgtgtatcaccatccctgtcactacatttttcacttgtagtctctacaataagaggactattgtctgtctgcaacatactcttcttagagatatcttctcttgattcatctactgccccaaaatttctgtgaatagcttccgttgtttccaaaacttccctggaaggagactgtagttgtaaatccagcctagtggcttcttcagtcaaacttgtagccagaacctctaccttttcaggatgtatgttagcatcaatgaactctttgggaggtaccacatcaactgcaaatacgctagtagttgattcttttgcaaccacaaattcaccaacctctgcaatttcttctgtttcagtcaattcatgtttttctaccaaggaactactggtgttaggtagaaaggaa

SEQ ID NO: 199922 - DNA, 277 bp, Zea Mays
agcccggaggagttggagttgttaattttgagtccatgggtttgtttggaagcaaggagattggaggagaattgcagggattaaaatcttctcgatattcaaattaaatagcgagtggattttagcccttacagggctagtttggtgaatagcaagggatttcttatccatggatcctctctaattctcttgttaccaaattggctctcggtctcctttaatcctctcgctcccaaacaagcactaatggttcctagaagcatctacaatacaacca

SEQ ID NO: 199923 - DNA, 320 bp, Zea Mays
cctgtggacgggacatcgtcacttgctcaaaggttcaactcagcagcagcatcgagtccaactggagtcgacagagggctaaaagagtcagatgggcttgttcttccaagtaatggctcacagcaagggagtagcatcattccgaggtctgttggcaacgctcttgcagacaggatgctcatggcgctatctttgttcaggaagtcattgagtgatggtgttcttgcccaagtctggatgcctgttgagcacaatggtcgtgtcgtgttgagtacatctgagcagccctatttacttgaccaggatcttgcaggttacag

SEQ ID NO: 199924 - DNA, 820 bp, Zea Mays
ttggccaagaggttgttaaagctcagttgtttgagcctcagtttgaacatgtgattgacacaatcacattaactgttgctgaatccatgtcactagagccatcatcaccagttctcgtgactgttggtgttttggtgaagtttaaactcaaggtattccgacagaaagttgctcaaggtaccttctctaacagatcaagttctgtcattatttgacattgaattctctgaacaatgaaactaacctaactgtgttcactgatgaaactgcattatggtctcctgttatatgctatatatcagagaagaaacacaatagatgaataattaacacaaaacacattgtattcatattcagggaaaaatgaatcttttttatgtcatcagagctaaaatatccagttttagattctgttttatggtatgacatattattttatctcattgctatatcttttctacctgtgttttctttagtgcatctggtgctgaaagctaaccgatcctctccatttctaccttttcactagtggttaaattaccatcacaatatcatcgctggtatgcgacaaactcttctgtggcccaagtggattccttgggtatcttgcatgcattgagtctagggtttactaaggtggttgttgaagacacaagagtttctggtcatgaacaagtatcatctctacatgttgttattccacggacacttttcctttatctggtccctattatggatgattctgcccatcttcatgggattacaaacattccatcctcaaaagtatggtatgtttatcctggaagaaaatacatggtcc

SEQ ID NO: 199925 - DNA, 443 bp, Zea Mays
tttctttgtaccgaaccacagaccccaattcttggtccttttcacatacctcaggatgtgctttacaaccatcatgtgatctttgtgtggttcttctagaaaccggctggcataacccactgcaaaaagcaaggtcaggtcgagtgttgaccaagtaccttaaactttctactatgctccggtatacagtggcatccaccaggggttcagtgctcattttgctcagcttcaaccgtgtctccatgggagtctgacacgggttgcattctttcataccattcctctctagaatttgtgctgcataagatcctcggctaagagatattccctccttgctttgccttacttcaatgcctagaaagtaccgcagtaaccccaggtctgtcatcttgaaaatagccaccatctcttgcttgaatagcttgatatcctcacaattggtt

SEQ ID NO: 199926 - DNA, 509 bp, Zea Mays
gtcagttatcaaaagatatttatgtaggatccctttcatagaagactatatcctgtagatcaagtagaaagaatcaggatgactcgacactaatgtgtcccacattgcagattcacatccagtcacagatcaagaagcaactttcaataagcaaactgtgaatggcgaaacaagcgagagatctgctcctttaaaattgtgagaagcgttgacagtagtttacaggctgcattgtcccttcaattgcagaacgagcaacgttgaaaaacacatgcagtacaggaaaaaagagcctgtcagacaacctgtaggccaccccagccaggcaagcctgagcaaggaacgatcctctacagcaaccagagcaagcagtagagctgaactcatagccgttaatcacgctctggcccacaggtcatgtctcatcaaccaggcttaagtgcttgcctccttattaatcaaggatgcaacggtacgatcctatagaacagatcctgttcaagtaaggt

SEQ ID NO: 199927 - DNA, 403 bp, Zea Mays
gagataggagattggagaagacaccacactctgcagtgaggtggtgacgttcatatatatagccaatgtggctgagtgtacatggcaggtgccaatcacaatacatggcaggtgccaatcacaatacatggcaggtgccaatcacagtacatggcaggtgccaatcatagtacatgacaggtgccaatcatagtacatggcaggtgctaatcgcactgattgtggacttgcctaatatgaacttgcctaatacacacttgctatatatatatctatcagcctcccgcagtcgaagcgtcaggaatccggatgcaaagactggattggaaatcctcaaatagctgaactggcaggcctttagtcatgatatcagcgaattgatacttggacgacacatggagaa

SEQ ID NO: 199928 - DNA, 422 bp, Zea Mays
agctggacagtgtgcagttccagatttacaacacttcttatgcaatagagacaatatgctacagcaagtgcgcatgcacctacaaagagctcagtcacgaatgaaaaggcaagcggataaaggcaggactgaacgtacatttgcagtgggggatcgagtgttccttaaactccagccatactgtcagtcatcagtaacggcacggtcaaaccagaaacttgcatttcgtttctttgggccctatacaatcatcaagcaggttaatccggttgcgtacgaactggatttaccagctggaagtgcggtacacccggtttttcacgtctcacaactcaaagctataattggttcccatattggagtgagtcctagtgtacctaacttgcatcaagatcttcaggtactggaggctatactagcta

SEQ ID NO: 199929 - DNA, 301 bp, Zea Mays
ctctgcccaaaacgaagaaaccagctctctcacaacattttgccaagaggacgagttgagccctctcacattcccacaaataatttttgatggatccattaaacaaacatcatcaacgcatccacaaggggaggagggggaaaagcctgactagcagatcccatctggggtactccacccaaaaagggctgacaaagcctccacatgacaaggggacagaggttgcttgaaaaggctgacatactcatgcagtgcttcctggctgattccttcattatctgagatgatatgtagggacctc

SEQ ID NO: 199930 - DNA, 458 bp, Zea Mays
gctcatctgctcccattgcctctccaagagacttagtgattaacaaactcaaaagtgctccaattccttccacatctggaggagcttactgtcaatgagaggattctacaagccatacattgcaaatttggtgctccatctccataaagtctctaccaagatgctaacattcaaaatgaagtgaacacgattagtgaaaatgaagtgaagaagcaaaatatctgctgaaatgaagagaatagtaccaggcctgaattcaaatctttcacaacttcttgccatcttctttccatatgaaccttgcttcgtccgataattgtcaaaatcttcattgacagccaagaactctttttcttcactgcctttaaaaaaggtttcacaacaaagcatggacttttccacaacatttggatcatcgaagatggcatcatctgatctctatagtagtactatggatt

SEQ ID NO: 199931 - DNA, 461 bp, Zea Mays
ggttgctaaggcgtagtgtctttggaaggctgtagtcgggccgtgaacgtcgtctcctccccaatcgagttattccacaccctctcatcgaaagatgggcattcacccaacgggtgcacatcacataagccagataaataaagattgggattgctcaactgattctatggacaagtattgcacagccgtccgaaaattagaagacatgtttgaagggttagaattccatcacgtggaaagagaccgcaatgtagcagcagatgcattgtcgaagctgggatctagtcgggcacaggccccacccgaaatcttcgtccaggaagtatcacgcccaagtataccctcagatcaggcggaagaatgcaacaccttgagccaaccaaaatcggaccctaatgactggagagagcctatcattaggtacataaaaatgaaaaagaaccgaatgataaggctgcagc

SEQ ID NO: 199932 - DNA, 304 bp, Zea Mays
tgatggctgatgttgtgacagtggcaatgcttacaaggcggatccttggtgaagaaaatgacaaggtccttttactttacttttgtttctgaccactgttgttgccatatcactttaacagcaacaatttcttgttctatttgaatatacgatcactgcagagtatagagagccgaactgttcactgtttgcacatttagaatttctaattttgggcactcctttgcttttgtgcatcaggtagcggagtctcctgacagagatcagattgaccgatacatcacttcttcagtcaaaaatactt

SEQ ID NO: 199933 - DNA, 512 bp, Zea Mays
gtcggccttgagactctcaggtgtctaacctaagttctggtaccaaatgttagaggtaaacagagtggttttgccggaggtgctaacctcagccatcattgcttgattatatagaaagatgagatgagtcacattgattacataacagctcattagagcttagctaatcagataggagccttggcagccgcacacacctgttgagctgctcaaggtctttaatgactataattaactagcacaagtaactaggagagtgcttaggaaacaggacttaataacaacagtcttaaatgggctagagccgggttggcacgcccttggtgacatgccatgtctggtcacgacgtcaagtgagcaaggatcgaataactgcttccttattagtgtgctacatcgacactcaggtgtagtgaaaaatgtgcatgggtcttcgcattatcaacgtgtgcgaagggtaaggaagttagttgaaccaactaggattagtttatgtagttggaatgtagggt

SEQ ID NO: 199934 - DNA, 592 bp, Zea Mays
aaaaaaatctgcagttgtacctacatgccattacgttctcctatgaatagcttctcactaatcgatatatctaaccatgccttttaagttttcctagaaaagtcttttagcactctcatcgtggcctacttgggggcgtacatgctaattacgttaatagaccaaatcacccacaacaagcttgactaagataatcctatctccttgcctcacatccaccacaccgttcttgaaactcttattagtcaaagctcctactctatatttgcagctatcattgtgtgaaagcttgaagctggtattgccacctcctttgccttttgaccttccatttagtcttttagacactttaagatatttttacatgtctcctagtcgttgcctcaactaactttcttaacttatttgtaaacgaccctacatcctaactacctaaacggatcctagtttggttcgactagcttccttaccctcgcacttgtcgatgatgtagcgtgccactaagtagcaacccaatccttgctcacttgacactgtgcccagatcgcgctacgacacgtgttgacctagtcccttgcacatttaacaccat

SEQ ID NO: 199935 - DNA, 396 bp, Zea Mays
attttattgtgaaaggacagcaacagctcaaggcagacaaagaccatggcacaaatctcacacttgtccaaacctacaagtatcatcaggaagatagcttgaaaaaatcgtgaatgagacttgtatgtggctgtgaatgaacaattgtgtgattaggatttgtttattgtgagcttttccgattacaattaccgtttcccgatcaattccgagctattttgctcggatttatccgttttcgatataccggaatttaccggtcgttatccgtttccgactttcccgtttaccgattccggccgaacaaaaaattatgcgggtgaaaacggtgagaggttttttccgaccgttaccgaccattttcacccttagatattgggctgtgttaaaattttc

SEQ ID NO: 199936 - DNA, 289 bp, Zea Mays
gcgcggcggattttggggatttggtggcgcaggatgaatgccgcgggatatctgccgcgccatcaacgcctccgcggagctttgcctggcgcgggctgccgcaatccatcagcggcgatcagactgcgggctccccgaccttccatcgacgggtgaggcgaccttgcattgacgccttacggactgcgggcgaggatttgggggactgcgggcgaggcgggattacgggtgaggcgcggattgcgtgagcggcggatcgacgggcggggaggaattgcgggatcggggc

SEQ ID NO: 199937 - DNA, 407 bp, Zea Mays
ggttgacttgttactgtgtagaatttggagaaaaaggagtgacaaaatgctctgtcaggctcagtgtgatgccgtttcagatttctgaaactgaattttcagtgacattggctgtactttggggcactgtaacttttgatcctttcatttttggtcttcgactgctgcaacaaactaatagagctatagttggagaatgcttttggttgaaagggatgggtttgttgccatggtgatttgtgcaataacaaggcttcaatagggaggtgcagatggtgcagcagggctgtttcagtcacgttcagagtttggtttggaaactgaacaagatcatcccctgctgctcgcctttgtttgtgtttataggttgagatgtgtatggaatggatgcctgatgtctagaagcc

SEQ ID NO: 199938 - DNA, 360 bp, Zea Mays
agaactcaacctagtcgagccctgcatggaaacactcctttcttcatggtctatggttcagaggcagtgctacctgctgatctcaagtttggggcgccgaggctgatctttgaaagcatagcagaggccgaggcaactaggctggaagatgtcgatgtactcgaagaagagcggctgaacgcagtaattcgatcggcacggtaccagcagactctgagacgctatcacgacaaggccgtgcgactacgatccttctcagtaggagacctcgtcctccaccgaattctaacgggggagggacggcacaagttatctcccttatgggagggaccattcatagtagcagaagtcactcggccg

SEQ ID NO: 199939 - DNA, 345 bp, Zea Mays
cacgatcaaaatccaatggccatgatcaagtctaccgaaccggtacgcgtccgactcaatcgcatccgtacgttttcaatcggaaggctagagttttattcttacgtgatctaatcaccgccacccaactaccatcggacggacgacagccatcttcaccacccggtgcctggccggcggtgcctgtgctccatacacggcggcggatcactggagccgcacgcccccccgctcctaccatgccctaaaatgaacctcgacagatgctatgtgaaaccacggtcaaaacgaacggtagggaggggtttttaccctattggtcgcagtggggaaggctaatctgcg

SEQ ID NO: 199940 - DNA, 366 bp, Zea Mays
ctgctttgaaattggctccattgtcagtgatcacctggaccacatgttctttccccaccttaattatttgcttctccaatggatctgccaacatattggcatttgctatctcacttgatgcatcgacagaacctaagaagtaggtccccgctggactgttggcaaggaagtttatcaaatgccgttgtcgtatgtcagtccgcccatctgacataattgagcaaccatattccttccaagcctcttcatgcttagctctcaatgttgatgttctcttcactgccctttcaagccaaggtacccttgcctcatagtatgatgggccacgatatccaggaccatactgaccaatggactccatcataa

SEQ ID NO: 199941 - DNA, 308 bp, Zea Mays
tcctttacacgcatcaggacggcgggttgatttgataaaaggacaggggctcttttgaaagatgaccaggccaaaggggtacgcgctaatctatgccatccgatcaagtgtgggtggcccagattagatccccatataagtgaatcggtgcgcgacacagaccgttggatcaaaaggctacggtcacgacttaaaacactagcgatggaatctcatacgcccgatccaaatccaacggcatagccacgatggaacgaaagggtaaactaagatctaatgctagccacccatcttgaaatcgacggcca

SEQ ID NO: 199942 - DNA, 379 bp, Zea Mays
gttttatttgattatgggtatctaaacgaaaatttgttgtatcgctgatatggttgtaagctgacgataaatattgtgccgatgtggagtaggacgttatgatagatatagaatgacgattgtcgatagtcgatagtaagaccaaccggcctgacagacattcagttaattggctgctggagctgcgggaaacatgccaaacaagagagccaggtggcgagtgagcagtgacgacacctgtccttatccagctgcgcttggtggacctgctctgcaattgcttggttgcccccactcatgccgcaacgcgtcaaaagcaaccatcatcgccaaagcaatggagggcctgcaggccaatggaagaccaagccaagaagcc

SEQ ID NO: 199943 - DNA, 419 bp, Zea Mays
gaggctactagtgatgacgaaggaggaaaggatgatgatgttaatctccctcctgctaatgcccccattatccaaggattagtgcttcacaaagcgtaggctcgtcgttccgccaacgaacatgttattgatttcagtgccagcggagggtctgcccttcttcaagatatgcgattccagaatcctaccttccgtgttcgtgatgtcagtattgatggtaatcgcttctggactctccttcatgtcgatttctataattcagttatccttccaaagaagcaccagcccatcctccatcagcgttttatcaactggaggatgcgaagctattggggaacctgagatgacacaggtattgagggcctgtgagcaaaagaggatgaagactatcatgacattccaatatgattggaatgatg

SEQ ID NO: 199944 - DNA, 549 bp, Zea Mays
atagccaggatggcaccatcatggcccttaatcacttggccttgataaactgctgacagttctttcgaccgcttcctgtagctgcggaccttgaccctttcataccttccacccctgttttgctcactctctgaggagctggtgctagcctcatcgcctccatgatcgaggataccagacctcaagcccagcctccgaagccatccgtttctcctcctctcgaccgccttgggaacaccagagagcttaccactgcggctcatgagcctctggatgaaggacaacgaactgaaactcctgctcaccttgctgctagcatcatcccggctggatccactgacagaattgtcatccgagacaccatcctctaagctcttcgtctcctccgtggaccaactcgacatggagcagtcgttctcatccgactgcgaccacgatctcccaaattccggcacagcctcttcctccttgtcgacatcgcccacggtggccacggcatcggcctgcaggggagccgggcagcactctaggcccatgcttctcatgaac

SEQ ID NO: 199945 - DNA, 701 bp, Zea Mays
tttcctgccttcctttaatgcattaataactgtttttgtgccccctttcaacaggaagtgtctaattggtggtgcgcataggactggctggatttcaatcgtgataatactgatatacggagactcattgctgatccagtgagcctattcgcgccaacttgattacagcctttctcacacaagtatggcgccctctgctgccgtcccgggtggctctgaggttgaggggtcaccacgcatggccaagttcctctgcagctttggaggcagtatccttccccgaccactcgatggctgtcttaggtatgttggcggcgagacaaggattgtcatgttgccgcgtgacatatcatatgccgacctggctgcacggatgagagagctctataaggatgctgatatcatcaaataccagcaacctgatgaggatttagatgcgctggtctcggttgtgaacgacgacgatgtggtgaacatgatggaggagtatgacaaggtcattgcgacaggggaggcgttcactcggctcaggatcttcttattttctcagcatttggatgatgatgctgcatcagtggatgtgcattacaatgtagacgagcgggaaacagagagaaggtatgtagatgcgcttaacagccttggtgatgttaagtcaccttcctcccctgtgtctgtggagcagctttttggcattggag

SEQ ID NO: 199946 - DNA, 787 bp, Zea Mays
ctggtacatagaactacaactttgatgcagagacttagacttgttgccacatgaaattggaagaaaaaccccctgcaaatcgctctgtcagactgtctgaacaagctcctcgatggtacagtgcactgataaggacgccagcttggacagctcgacgccggtaacctctccgccgtgattcacgtcgccggcgtcacgattcacgctcaggtaagtggataacttcgcggcgtcaaaagatagtcgtcaccgccgagctggaagccaccccgatcgcccacggcacccctcccctttgctcaccgccgtagataaagccgctcgtcgccgtcgtgccatctctatgcccgccgcgtgtccgagcctttccacggcaccgccgtaattccctactgccgtcccatcatcgccgatgagcccgccacggctagggacacgtaaccgcgcgcgccaggcttcttccccgtctccggccgccaacacatcgcggtcaaattgagagccaccgcccccggagtctataaatccagtgcaccgtcagcttcgttatgtattcgagcatctagcgcacccttctgcacctcaaatcctccaccagaaagcttcaattcgagatttcccccaaaacgctcaggaacaccgcacaacttgacctcgccgtggtcagcccgattcaggtccaatctcaccctcggtttccttgtttcaacatccttgcttgctcttgatgctcaccgacccgttaaatcgaactagaccactcccaatccgcgggaacgtgtactcc

SEQ ID NO: 199947 - DNA, 281 bp, Zea Mays
cagattttcactttccaattcctatttatctcttcttttgttctttaatttggttcgtacgtacaagacttctcggatcactcgtcttctttgattgcatcatcgagacctgcattttcccttccaaattcgtcactcactctggttggccgccttctgtcttctgatccaatccggttgaaatcctccgtctccttccagcaagatctggcacataaggagaatcggcaagaaccattctgcaaatgaggccggatacgcggcttgaatcggcggtgttc

SEQ ID NO: 199948 - DNA, 471 bp, Zea Mays
ggccaccaccgccggcaagccacccagaaggtcgtacagggcgccatgaagatggtggccgcgcgctttcggcgcgaccttgctggtgtcgagtagttcatacctgtagaaatggtgctaggacttcgttggaaggtagatgtaataatttttgtttttgtaaggtacttttgagtactacttatcgagcagtattagcacttatctgcatactatttgtccctgttgtgtgtggcgttgccgactcctccctggtacctggcccccctgggatgtaggctcgacgtgtcgaggctggatactagcatacctaaaagagttggtaacggcccctaggaggcagcctcgactgggacctagacctgaacacagcttcggctagggagcgttagtagcacacccataggacccatcgcctgatactagccatcctttgatacaggcacgggacctgcagggtttagtctggga

SEQ ID NO: 199949 - DNA, 413 bp, Zea Mays
atgcaccagatgaaggtggaggagtccaagaagtaccaagaactacggaattcagaagaggaagctcttgcgctagttgaaatggagaaagcgaagtgtagagctgcacttgaggcagcagaagctgcgcagaaaattgcagagctcgaggcgcagaagagattgagagcagagtggaaggcaaagagggaggctgaggataggaagaaagcaactgatgcactgaacaaaaatgatatccggtacaggagatactccatcgatgacatagaggctgctactcataagtttgataaggcgctcaagataggagaaggcggatatggaccagtatacaaagcagtactggatcataccaatgttgctatcaaaatcttgagaccagatgcatcacaggggcggaaacaatttca

SEQ ID NO: 199950 - DNA, 415 bp, Zea Mays
gacaaatgtcacatctatgctaacaagaacctgcaaatgaattctaaatccaacacaagtctgaaactctcttgaaaatataaaatgcgaaggtacactacttcatgtcactcctctattacctaagtgcatccaaggaaccttttcatgatagtgtgttcagatctttcttaatcaaaatttctttcctttatatcctttttggatatttatgacaaaagggaagaaattgtgcgttaaagattacttttcaatcttatgtaactaagtgtaagaagaattatgaaaaggggagaatcataagtcaaaagtaaaatgtaaaaagtaaaatgtggaaacttatgagtgcataatatgtaatgagaatcatgtttactttatgacactttgcaccccacgaattgtatgatataag

SEQ ID NO: 199951 - DNA, 786 bp, Zea Mays
actggagccacgcatggttgtgcgggagacgatgaagccatgcatggttgcaggagacgacagagccatgcatggcagtgcgggagactccagagccacacttggtagcacgagagactctagtactcatcgcagcgcaggggatgctggatctacatgagggggcacgtgcgacgctagagccgtgcatggttgtgcgggagacgacaaagccatgcatggtggcgtgggaatgacattatcgtatggtagcgcatgagactctagggtcggtgggggtagcatagggggcatcagggatgtgtgtagcgtggtgggggaccaaccatgggtgcaatagggggcaccatagagtcagcctcgagaatggtgttcaacttaagagggagaggcagtggaaggagaggtagagaaagggaagtcggactcgtcgaagatgacgtgacaggagataaggactctatgtgtggagaggtcgaggcacttgtatcccttgtgatcagggagtacaaaaaagacacaaacaagtggagtggggtggaagctttgtgggggcactggtagagataatatgatagcaggcgcacttgaacacacgaagatggttgtaagaaggagaggtaccaaagattgcaaagaagggggtagggtgatgaaccgccttggtaatgaagcgattgagtagataggtggcatttgtcagcccctcagtttagtactaagtaacaagggaggcctgaaacaaccgagagtgtatgacattattcgtggtgtgaatcatacgct

SEQ ID NO: 199952 - DNA, 409 bp, Zea Mays
cgggaagtggtaagacatcagaggcacaaagcattcgaccctcaacaggtaaagcagagactgtttctcgtagagctctggaggttctagaagctgttccaaaggtgctggggagagatagctgcgcagctgaatctttctgcacagccagaagagatgacatggctgtagcggatgaatctgacattacaagagcaccagcagaatagaatgcagactcaactttcaatgctagatcttcaggaagagccctgccagccacagaaacagcaccaaatgtaagcccaccaccaacccccagaggtggggacggcctagtagcaacaatttttaaacaggttggcctctgcagaccactgttcaatccaactgaagaaccacttccaccagatgtagtgaggaataatct

SEQ ID NO: 199953 - DNA, 425 bp, Zea Mays
ggcgggagcatcacagaccctcagaatggagaagagccaaaggctaacattcccctgcactcgtagtgatgccacaatgcagatgatgagactagagtagaaaccaacaaggagctcatgtggatgatagcccggtgtgtcgatgttgaggtagttgagtgtaagggtgcacaagccatgcggaagatagccgaggttgatgcagttgtggttgggttgccgtgttattagggttgtaggcgcacaagaggtgccatggcgatgacggagacacgtcgaggtagtcgtcgtggaagggggcaatgcctaaagtcgacacaatcaaggccgtcgtgggtatagaagaatggcggtgatgtaatcgagggtgggaataggagggtcgatgccaaaattgatgcagtcaagtcgcatgagtcgaggca

SEQ ID NO: 199954 - DNA, 1021 bp, Zea Mays
tttacatatagtgatctttgtgttcaaattcctgaacccaaacttcgcctctgcttgttgagaaccctagagtttttattttcattgatgtgctcatactatactattatgagcttttcttcaggagataaggtacatctactttttttctgtccactttattgttgaatcttcatacctcactgatcaacaatcatgatttttttttggtaaaaaagctgcctaggctcagtgcgttagtgcaaacaaatatgagaaactacaaatttcatttttctgctttgttgaacatataaactacatagttgcattggaaaaccaaaaggtgacaagaataatcaaacctaccagaagcctagagctgaataagcttcttacactcccggttcaaagtataagatgtttaggacatccacatggtctaaaaggcgacacctttactagaaatttaaatgaaaatatggcatttcatagaaagtagaaattatgaaggtacttttcatggtgaatagaaacacctatcttagtcaaactatgtaattctgcaaatattgatggttaaagttttaaaagcttgaccagcaggaattctaaagcgacatattttgaattggagtggaaaagatgtcaaatgctatcagttctaaactctttgtttggtggaacggggcaaatctgttttcagtatgaaataaatctgagttaatactacctatcctcctatccaataacctatatatacatatatatgtggacctgatgttatctatacttagtctaattttcaatataaggttttgttcttattcatgaaattggttttctctccagaatattgactccaagggccaagatgaagcatataaggatggcacatctcagaatagcagcgaaactttagttaatttaggaagaggtcattcaagtgcagcagtcactcaggatggttctgcagctgaaaaaattgacagagcatcatcatctgaggtcagcaaccctgatactagtacatcagaaacag

SEQ ID NO: 199955 - DNA, 324 bp, Zea Mays
atgaatttggtgctctctactaagtctttctcgttgtggtggttcgctccttggcttcgaccttcgttatggtggttcgctcctgggtctcggcgtggccgtcatgttgcgggccctgtagacggcaagtgcacttaggcctagggttaataggtcatgagtgggccgcatgcctaaagcatgtaggtcatgagtagaaggagggctgactctctcactgcggctcggtgccaagcgtagttaatgcggtcagtcacttacggtgggtcagttctgggtcaggcgcagaactcactcgagtggcttgctctcgatccgtccgac

SEQ ID NO: 199956 - DNA, 278 bp, Zea Mays
cgcgcatggtgatcctctcatccttcccttgaacccaaatcctcgccaccgacgctaagcacgaactaggcgctagcgcgtggaaggaacgatccccgccagccatcctcgcctcgcttcgatcttgtgctcggtgaatgtgtgcgggacgtcgacgactgatcgacgaagcaagtgtgtgacctatccgtgcccgtcgtgggctggtgttgggagaattactcaccggagctccttcatcgccgctgtgccgctccatcgcgtggcccacactactt

SEQ ID NO: 199957 - DNA, 375 bp, Zea Mays
cggagaactggggttcagagtaccaacctacaaacgatgctggtgttcctgatccaaatggatcgatatactgggatttcaagtaggactttctctgctcttgaaacttaccttttgaaaccttccaattagtggcatgatagtgtgaattattcatatttatttatctataatccatgaacacctactcacagttttcctattttattttcagtgcattgctaggactctttttcccggcagtcaccggaatcatggctggttcaaaccggtctgcatcactaagagacacacagagttccataccagttggaacgttaagtgctaccctttcgactactgtgatgtacctgctatctgtgtttatttttggag

SEQ ID NO: 199958 - DNA, 358 bp, Zea Mays
gtcgctgcagggccagggcagtgaagtctcttctcgttcttgagttctagcgagagtgcatcgtgtgagtgttgtggttcatgttcacgtcggtgtttactctccccggccatcaggttcgatctgctcttgttcatcgcatgtcaatctccttttttggtgactgagctcatcagtttctcatctcactgtggtcgggtcgtctcgaggagttgctcacctgtgtcacttgtgttcggtaatctccttaagccagtgaagctcatgacgctgcccttttcatctctactgcagtgtctcattgggaacgccgcggtgccgccggtgaacgccgctgggaatgatctcgacatggcag

SEQ ID NO: 199959 - DNA, 564 bp, Zea Mays
ccgtactacagtggagcaggcattgggtgtggagatgcaacaccagtacaccatggtgtcacagaagtctttgggtgttgatcagcctcgtggccaggacgcgaggaggggcaacactgggggtccagcccacaagaggggcaagtctcagcaccagcacgaccacccctaccgtggcaaatcctctgaatcgggtacttcaggaggaagtacttagaggtatcgggatgttcctaagcccgagctggggctggtgtgtttccgttgtggtgatgcgcatcgccgtgctaagtgtcagtggagtggcaggtgttctatctatagtcaggaccacaaggatgtggtgtgtaggaggaatcccaatgggaagctcagatgggagccagtgacttcctcctcttcgcagggcactatcaacatgatgtcaagtgttgagcagcaatttccagttccactcccttcgcagcagttctatgtgcctggggcttctcagttcgtgccgatgcagggttttcctcagtatctggctgcgcctactcctgcaccgactacccctatgtcgtc

SEQ ID NO: 199960 - DNA, 334 bp, Zea Mays
attgaatccatcccaagcctttcccccaacataatttcggtaatgatcaagtgttttgctctggccacagtgaccgtgagcataacggctataccgtcgtgttcccggcgaccagaggacttctagtgcaattgcgtgggtcggtgaacatcacagagttatgagaaggctcaaacgagggagagaggaggatgaactgaccggaaagggggctggtcgcggtgaggtcggtttcgggtggcggaaacccgaattgggggaaaaccggaattagggctcgctggtgatcggctgggggcaatactggttggggtggtgcgtgataatgtggtgg

SEQ ID NO: 199961 - DNA, 421 bp, Zea Mays
attccggccgtcaccatggaacctcgctggcgtctgcaattggagcgtgtgatctggttgggaagattcgttgggtcatgcaggggctaatcgtgctgtcttcaaaagagtagggcgccgctgagacccggaatttctcaccggcgcaaaacctcaccctcaaatccgccgtacgtcgtggctgggtacccctgcatccttattcctggtatgatctcttgcatcttgaccgtgtgcatctcccctgtgattattggggttggatttggcgtgtgggggtcagaatcgcccggaatctctcgagggcatggcggactcgcggctgatccactgcggtccatggcgtgcctctgcgtaggctcactgtaggaattgatttcccaacgggctggtggggcgtgtagcatggtatagctcaggt

SEQ ID NO: 199962 - DNA, 353 bp, Zea Mays
gttgtccgagggtaccttcagtgatttggctgcagtggagctacacccgggccacacggtggaattcggcgtttcgaggatctcctcggttcgcgtgcaagacatgcaatagttggggtattttgggaatggagttggacgagttccgggggcggaagagattcctgagccggagggtgagatagttgtgttcgaggcattttttactgtcggccttcagttacctgcgcatcgttttgtggtggaggtgttgcagaggtatgacgtgcagatccatcaattgacacctaatgccgtggtggccctggcgaagtatgtctgggcagtgacttcgtatggcggtcagccctccg

SEQ ID NO: 199963 - DNA, 323 bp, Zea Mays
gcgatcgctgaggccgcggaggatgttgaggacgaggacgcggtcctccacggggcagcccagatcaccaagtgagtctgccatggtcttcatcttgcagcagtacgcactgacactgaggtccccctggacgaaggtgcggaaggtcgcgtcgaggcggagagcacgggcctcggcgttgcccaggaactggccctcgatggccagccaaacagcccgagcgtgaggaaggttccggaggaggctgtggaggtcgacggagatcgtccccacgatccaggtgagcacgatactgtcgaggcgcacccacgcagcagtcggcg

SEQ ID NO: 199964 - DNA, 392 bp, Zea Mays
atgctcattactgggctgagggtctccgcactgccacctacgtcctgaaccgcctcccttccaaggtggttagccattccactcctttcttcgtcctctttggcaccgccccttcctatacacaccacaacgtctttgattgtgcctactatcctaacacctctgccaccactccacaaacttgcaccccaatccacttgctgccttttcctcgattactctgatcacaaggggtaccgttgcctcaatcttctcacccaccaaatcatctctcgacatgttgtcttctatgaggatgcttttccccttgttggctcctccccacctcccaacctccactctctcctccatgctgattttgtcgatgtccatcctctctcaccaccggtcca

SEQ ID NO: 199965 - DNA, 302 bp, Zea Mays
ttcatcgctcgcgcaaatatgaatttggaaattcagcccagttctccgatttcatctcaaacaaaataattagaactcaacaacaacgatttttggtccgaaataaacccgaccgagtgcgctgtcctcagcaaagaaatcgatggtgttcggaggacagatacattttcgtctgatttcaactaaatcaacccccatctccatatccaaagccgatgttctttggtttggtttaattgttttacaccctgatccaactgcccggatagtgagcggatttttgtttggtttcagattaattt

SEQ ID NO: 199966 - DNA, 294 bp, Zea Mays
ctagtttgcaaatggctgagaacccttaatcaaacttgtagagtattgcgtgggaaatatctttgctacagtgacccatgtccgaatccaagcagaaaacgccaaaaatgaccgcccaatgtcgctactgtagcactcaccacgtgttcgatgaattgctgcaatggagaaacgtggcagccgtgctctggagcttctcctccataaatggcagcccacctctctccctttttcccccacaagccacttctcctctcctccccttctctggttaagcgcaggagcagggagctc

SEQ ID NO: 199967 - DNA, 288 bp, Zea Mays
gacaagaggaaagacgtccttattgaagaccatgtgatgggagatgatgatacggcaagtgaggagatcgaggcaccgatacccccctgtgattaggggagtaccagatgaaaagatgagtggatcagggcgcaagtttgtgggaagcgatagtagggatgttgggatagaaggcacactcgaagacgcgaagatgctcataggagggggtggtatcgaagagggcaaaaaacagagtgggatggttgatcgcctgggagggaagacaattaatgaggtatgtggcag

SEQ ID NO: 199968 - DNA, 428 bp, Zea Mays
agagttcaaacccattgcttctctaacttcagctaaggcagtggaattcacacaaggtataatattcaggttcgggatatcgaatatcatcataactgacctaggatccaacttcaccagttcagaattcttcgatttctacgagcaaaagagcattcagatcaaatatgcctcggtggcgcacccaagagccaacgggcaagtagaaagagccaacgggatgatattagaagcactcagaaagaaagtcttcgacaagaatgagaagttcacaggaaagtggatcagagagttgttgtacgtagtttggagcctgagaactcaacctagccgagctctgcatggaaatacccccttctttatggtttatggttcagaggcagtgctacctaccgatctcaagttcggagcaccgaggctaatctttg

SEQ ID NO: 199969 - DNA, 417 bp, Zea Mays
ccagtctgaaagctgtcactcatttccaattccacccctttgtgcccaactaaaattcctatccaattctgtgaatccatgtggtgtgaaatgttgctctgtgcccattgtgtatccctgcaggtttctagctccttagggagggtttcacagcctcaaatagccatttctccaaaaccctaaatccttgcacaccacatgctcggtgaaatgcctaaaccagccaaaaatgctccaattgaacccaaatttttcaggcactttcacaacacctccagtaacatattcacaaaatttcacgcccatccgatattccaggctttaatttcaccaaatttcccgtttcgagcgattgtttccgagccgtgtgcccaaatctcattttcttcgcctaaattcaaaccaagcacacacttc

SEQ ID NO: 199970 - DNA, 735 bp, Zea Mays
gacaaacgcagggaacacccagaggtgtgcttatctcatctttaccttgaaacacactgtttgttttttctagttctagttactactggaaggctcttcagtgtttttttaaaaaactacccactgatgtgctaactgcgagacttcaagatttttgtttacagaaatcttttgctatttaagtagctgtcagaaatcttgggagcactactatatagacattttaatataaattgtgagtgctggtagccttatcttgtctttctgtttagggggaatacccttccaaatggtgacatctatgttggcaactttgctggtttagttcctcatggatttggaaagtatatgtggacagatggaactctttattatggcgagtgggatacaagcaagatgagtggtagaggagcaattcagtggccttcaggtgcttcatatgatggagatctttgtggaggtttcattgacggaacaggcagtttcaaaggagttgatggatctgtatataaaggttcttggaggatgaatagaaagcatggaatgggcacaatggtttacgccaacgatgatacttacgaaggtttatggaatgagggcttgccagatggatttggtaaatatacatgggttgatggcaacatctacattggactttggaaatctggtaaaatgaatggcagaggagtgatgcaatggacaaatggcgatactcttgactgtaattggcttaat

SEQ ID NO: 199971 - DNA, 916 bp, Zea Mays
gttccaaggatgcatcgggattgtgcatttgtcgcgtgtatgagcagcgacagactcacccttgtgtgggcagccgcagggtatgtctgccggcatgcagggcgaggtgcgcgcatggtggagcatgcccctatgtgggcaaccactgacggcatcgcgtacggcttcgttgtagtcgttacggttccctcggaggcatcaccatgaggagcgatggagccgtagtcgttggagtcctcgtcgaaggagcgatggagtgcgcctgagcggtgaatggggaacaccaaggacaagggcgaggttgagggcttgtattctcctctcgtctcttcgtttggtatcgaatcccacacatcgaggtcgggggcgaggaagtggcggagctggcggaatcaggcgaggtcgaggtcgtgcgtgcggaagtggcggagctggcggagcggttgaggtcgtggggggggagattgaagtcgtggtgcggcgcgccgtcatggaggcagattgaggacgtgggcacatctctgcgtgcggcgcgccgtcgtggaggcagagggtttagggctgccgaagaggatgacagacgttgtaggctgggctgcacaatgggccgcaccaacggttgggccacatgaaccactgggctgcataaaccgctcggacgtaggcactgttatgggatttgtttgattagtaccataccggccactgagacagaccaaacgtggcttataaacgttggtgtggatcgtttgttgctcagactaactcctctggtgccgcactaagatgtattttttggcgcggggatgtacgtcaacggtcgggaggcagaacgggtcgggtcgccctggatgaagcgaacggtccagattcacggatggcagaacgagaaaaggcaggctacccttagagcctt

SEQ ID NO: 199972 - DNA, 419 bp, Zea Mays
ggtttatacaggttcaggctttcgctttagtccagtgtagtgttgaacttagtattctctaggaacatgatacaatgggtgcaagtgtgagtatgaggaagtggagaactcaggctgaaagcccctcccattagttgtttgaccctcctctcttatagttcaaaatggggttcttacatagggatttgtcgtccgaaggagggcgcgacctatttgtctacggtggtcttgctgacgtagctctcctgacgttgtcttctggttcgtgcgtggtcctatgtctggtatggaggatcgctccatctacccggtatgcaggtcactgtagcgattttggtgctatgtttccctgtagtgacgcctggtgggacccatgggtcgaagtcggaggaaactgagggtcatacgtggcgacatct

SEQ ID NO: 199973 - DNA, 597 bp, Zea Mays
ttttttcttttcttttttcatccgattgctcctcgcactcgcacagtcgcgcatcttttccgcccccacctcaatctctctggattctctcgaagtttcttccttttcgagaggtgggagagaagagacgcccgcagcggcacgagcttctgaattcctgtttttttgttcctggttttttgcttttgtttctgttcttgttcttgtgtgcgggtttggtttggtttccgtgcgccttttctctttattctagtgcgccgatgacgtgaggcgccgggttttcaatacttgcatccttttcgctgcatttgtttagcgggagttcttcgaacaagcagcgctgccgctgcttgcgcgaatctttggagtgaagctccccgtcacatcagtcctcttcttccccggtcgtcgtcctatgcttgtccctgtctcggcaattctgggatactaaagaggaatcggtgaaggtccggtcttcgattccccgagatttgcatctgaatcttcttcttcttcttctcttttgcctccatggagtctcttgctgcgtgccactccatcgagcgagtctagcgcgcgcgacacagtagcagcagc

SEQ ID NO: 199974 - DNA, 369 bp, Zea Mays
gaccgtccgcgacaggcagataagacgggcagaggcagtcaacttgtcatttctactcattgcctctcctctcacgctctccactcgccaaaaggtcactttcatcgattgtgcgcggacagggaagagaagttgcgcacggacagtccgaaagcttgtggaaagttcaacaaacatgtcttcatcccggtatttcataatctcatggattttatcaaatttcttcaaatttggggattattcggattttctctctgatctagaattgagcaatagattcacaaatctgattggtgggattattagtgctactcagtgtggatgctgtgcaaaaatttgaacgagtttggatggatattttctatggaa

SEQ ID NO: 199975 - DNA, 288 bp, Zea Mays
gtcactgccgacttaaaacgattgctccgttagtagggtatagtggtaaccctaagtcgagtaagcatgcagattgataataaatagttcgagtgcccttgagaatgaagtctttttattgatgatgtattttctgattacagaacacaatgctgccccgatagcttttgaaatctagctaggggtaaaacttcctgagatgctctatattccatgaattccctatttccgtgccatccatttgagtaagtcgatatgatcctggtcgagtgacttctgctaccatga

SEQ ID NO: 199976 - DNA, 516 bp, Zea Mays
tacgtctgacccgtaccgcctctacttccgcacgccgcagggcagcttagatggcgacagtgaaaacccttgtgagagcgcaacaacgtcctcttagaggttcgcgagcgtcttctccagacccaacagtatgccatgcgctactacgacaactcccatgatgagcttgtgtttgtgatggtggtctagttgtggctttgtatcctccaccgactgacgcacttgttgcagtcccgaggaaaggacaagctcgggccatgttgtgttggcaccttccaagtgctagatcgtgtcaagcaggtggcatatcctcttcaacttccaaagggagctcctctccatgatgtgtcccacgtggagctgctcaagccgttccgcgggaccccctccccccccccccccgcaacgactccaccacccatacaggatagccacctgcgcggtagagcatgtgttgctcgcccaactatgttgggacgcctaacatgtcctgtttagtggtgtggcctatccaac

SEQ ID NO: 199977 - DNA, 279 bp, Zea Mays
agtagcagccttgctgcacttcatggattccacaggggcacaataaccagggaccgcccgattaccagagggttagggcgtactatccaccatgggtcatctcgtcgtgtcctcgtcactcctcaaccacaccagcaagtgcactgtgaggttgaatccgactggaatggcgttctggcttcacagtcagaatgaattatccggccaactaagtgtataggtataattccaacatgactggagggaccacaacgatacggtccttaatcaacacaggcg

SEQ ID NO: 199978 - DNA, 399 bp, Zea Mays
ctgaacttatctacaataagttactagttcatatcccctttatagtacgatcaaaggaaaaatgaagtcctaaactactataagtgtctctcaactgatcaactccaattgacatttaaatcaagtacatccttaaccttgccttccatccttttgaaaaccacaatgaaatccataattaggggtataggaaccatactttgcccaaacaattctcaaccattatgacctatctcaaatttgtttctacaaaatatatgttagtcataaaacaggaggaatgaacatacattaagggaggagaaaggttacacaaacctcgtacgctaccagctaaacccaactaccccaatcatatcttattcttggagttgtatgggggacatcccctagttgtgg

SEQ ID NO: 199979 - DNA, 321 bp, Zea Mays
cttggtgatgtctttcgggctgaccaatgccccgacctatttcatgtatttgatgaactcagtatttatgccagagctggataagtttgtagtggtcttcattaacgatatattggtatactcaaggaatgaagacgatcatatcaagcacttgcatacagtacttcagagactgcgcgatcatcgtttatatgctaagttgtccaaatgtgatttctggctgaaggaaataaaatttttgggtcataccatttctcaggatggggtatcggttgatcctgagaaagtgcaataagtgatggattggaagccccctaccac

SEQ ID NO: 199980 - DNA, 2934 bp, Zea Mays
cacaaacccaacacaactccgccgtgtcgcctacacgcactggccacgaccaaaccctaggcgccgccgcccccggggcccccaggtacgcctctcgcctatccgccgccgtgattccgcctccgcgccgccgtcgtggcgctcagcgactgagagatacgcactagggttcgctgcgatttcgttggtaagggtgatttttatgttttatttttgttccggtgtgtgattggatcagggctgtcgtagggaggagaaggaggaggagatcggtgaggagagaaggggatttatgtcccagcgaggggacaggggcgaggggcacgccaggagacccggccggtccagcagcttcggcggccaccgcggaggcggagtcggtggcgcgggcaagggcggcgcgggctcctcaggccagcctcctctctcatccaaccgcaggtaaattactgccatatttgattgattgccctctgcctctgcttcgcacgattggttgatctcgccagggatgatagggttttgatgagaactttggatcttgattgcagctttagaaagcctggcaatggccacggcgggcaccagagggtggtgaaccagcccgacaccactggcttccagcctgcaccagcgcctggcacccaccaaactcctgcgcgcccgccacctgcgcctcagaatgcagccgtgcatgttcctgtctccgcatcacggccacaacaccagggtgagtgaggtgtcctgttccgctatcttgtactgtgtttggaatggtgccgtttggattgataaacatgatgtgttccttcgtttgattgcacatgtttttttttgattcaccagatccacatgtgtcatcttcattgtctgccagcgagaaaccggctaatccgccgttaccactaccgaaagctacacatgctgctccaagggctctaccaaaaaactctaacacagcgcttcctcagggaggatcgcaaggtttgccttatatacgctgttacatgttcttgcatgtgcatttttaccatctatggtggcattgtacaccttcactctggctattcaaaccatattttagataggtatatactgcatcattaaccaccttcttcttgttgtttatttctttacaggagaaccatcaaaggggtttaactttcagtttggtagtataaatatgaatgggctaccggtatgattttgttatctcttttttttttctccagcttgggtcatgaagctctctgtattagcaattaccttttgctttctacttacattacatctataaaattttgtacagcaatttcctgccaggacaagctcagctcctccaaatttggatgaacaaaaacgtaatcaggtatcttgtcttctcttgtttatacaatattctgatgtatgtattcttatttgttggttcagtgcttgtttattggactgctagaacctacaaaaatattgatgtcccatgactaatttgccttccggagcacagccagttccttttgcatgtgttattggtattgatttgatacgcgttctaaatctgctagtgctctaaaaatattctattttgcttgtataccttattcaggcacttgtggaggaacttaaggttacacctgcccctgtgcaaccagctctgaaacagcagcagttgcagcagcagccacagctgccgccacagctgccgccgcagcaggttccccagcagccacagcagcagtcagcaagaaaggaagctgttggttccagccaacataactccatcaatccccatattacatcgcaattgaaaagagatgtgcacccatctccatctgtccctaatgttacatctcttagacctaccgttcaaattcctggtgttcagatgccgatccccttccatcaccagccggcacaagtttccttgcagtttggtggtcatggggcacaactgcagcctcaagtcgtgcctagctcatatcaaatgtcaatgggattgacaggcagtagtacacaagtcccacagcagctgtatgcccctactctgcagcatcatcaattgcaacagcaagcaatgatgcatcctggccagggtatgggttatgttccttccgttgctcaccaattcccacagttgggaaacattcctatgaacatcgcatcacaatatgctcagcaacagccaaacacgcatgctgctgcacgtaagactactgtaaaaattactcatccagacactcatgaagagttgaagctcgataagaggatggactcttctgggcagagagctgcaccgagcttgacacaacaatcccagcccgttggtaattatgctcctcatattggcttctttcatcagccacagagttcctacaatcagtcaggaatgtattaccctactacagctggtgtgaaccaggttgctactggatcttcaggtcctagatataattatcctgtcactcagtctgggcaagcgatgacatatatcagtccatctgcagtgcctccggtatctgctcagtcccaatatacagttaaaccgcaccctattgggttggtgactgaaaaatctagtactcatgtcacaataagtgctccaccagctaaatctgagcctcctaagttacgtgctgctgaggattctgcgtcaagtcggcaaaaggataatgaaattgtttctgggatcgctgtttctagtaaatcaatccttgagaaggaggagagtaacgatcctttagtcacagtgaagcattcgactgtaataagcccgtccttgccaattcatggtgcaaaatcacaaacttcagtgacatcatctcctgttgtgaattcagtctcacctgtggcaggagttgatggaaaaagcatagaatctattcaaaggactggatcatttaatgataacaagaaaattgtcactaaaaaggatgtcag

SEQ ID NO: 199981 - DNA, 291 bp, Zea Mays
gcactactactttttacccgcgaccgtaaccatacacatttagaccacaacaagcaattcaccgtgattacgagcttaaccaagtcatctaacaattcggctaactagagcaacaatataggccgctatacatcacacacgtcggctagtctattattatcgaaatccgagacacaacattgtatataacaatcacttaacgcaatcgactcctgcttaacacgagttggctaatgacgtgactatttcccaattaccaacatacaccacctttcgccatttttggataac

SEQ ID NO: 199982 - DNA, 290 bp, Zea Mays
tctgaacagggcagcgacgtgagctatggctggtgcaactccacgtgagggcaacgaggaggatctgaggtaccataacacaaattgtggagccgagtcgacgactctggaaatccaaagagctggcgtatctggctggcatgcagagtgacatcctctctctcaaagcggaacctcatccactgatgatctgggtcaatccacactgtagcataaaacactctgacccactcctcaatgtatctgccactcgtagtcagtagtgaaagaagtcctcgtagataggagag

SEQ ID NO: 199983 - DNA, 277 bp, Zea Mays
ggagagacacgagcattggaacttctgggtgagatctatgctagaggtgctggagtggaaaggaactatactgaagcatacaagtggttggcacttgctgcaaagcagcaacattactcagcttacaatggattgggttatctatatgttaaaggctatggggtggagaagaaaaacctgacaaaagtaagtatgttgtataagaacttccgatacaattgcatatctctagcagaatgtaatagctgaacattagaaagcttaaaacgctgttgga

SEQ ID NO: 199984 - DNA, 343 bp, Zea Mays
aaccttcgggatgatacccatctccctatagttgaacaacattatcctcaattcctcacccacaaacagacttcgcagctccccttcacccacacttgccccggccggcgaggacaacaattcccgcttgccagcctcgttcacacgaaggcgaccacctcccacctcaccacgatgacgcctatcaccttgcggcaactcacttaccctccgttttgccaccgcccttcgccgcctatgcccaacactcgcacccggaagatcctcatcacccattacacgcggtgaagcctccgccgcagccacatccaatgccgcaatgtaatccaaatcctcatctgaa

SEQ ID NO: 199985 - DNA, 274 bp, Zea Mays
tggctagtcgccaagtatttgaagtgccaccaactagtgttggtggatctccttacagtattggtgtgtgttctagaggtggagacacgcataaggtaagtgattgggtcctatttgcactttatggtgatatttaaggtcactgctggaaattctgaaatcgaaagttcataagttgattctttatttatttgtggagcaatgtttccaatctaaagcccacttggagagctgattaggcatggaaactagatgtgtgtataatatacctaaa

SEQ ID NO: 199986 - DNA, 289 bp, Zea Mays
ctagcgtctccaaccacaccaacaacaatgatggtaatatctcccttttccacccctctcattcaactacatctatcattgttggtaatggctccatcctccccgtcaccatagcaggtgactcagttcttcccaggccattctaactaaacaatattctcctcacctcggatatcattcatactcttctttctatttgccactttactactgataatattattccgtgatcaccagattcgatagcttcagccctctacacactacgcctcccaaggtctcttgcctc

SEQ ID NO: 199987 - DNA, 354 bp, Zea Mays
atgacatcaaccacaacatcaccctcgatagttgacttagaaaagctgttacatgcacaagctcttgtaatacagaatgtatcgcaactcacctcctcataccagcaagtgttggcaagtcgaaacgtcactagaaatgaaacaactgataaaaaaaggatgcacaccaacagacaaacgaccttggaacatgttgttgttgtgagtactatggaattccttgtcgccagatcaatacaaacgaaagtgaaactacaaaacagaagaaccggattttattttctggtataaaaagtcaatggtcttcccaagaacaactaatatcagatgcattgtcagacgatgaattgccag

SEQ ID NO: 199988 - DNA, 376 bp, Zea Mays
caggatggcctgcatttcatcagtcaaatgttcattcaagtcctcttctgtatgacattgacaaggatggtgtacgggaaatagctttggctacttacaacggtgttgtaaatttctttaggtaaggaactctatgactatgatgtacaggtttatccctgtcaaatgtagcaatatttatttatttattatgtagggtgtcaggttatatgatgatggacaagcttgaggtacctcgtagaaaagtacgtaaagattggtatgttgggctaaatccagatccagttgaccgctcccatccagatgttaatgacagttcaattgccaaagtggctacttctaatgaaactcccctaatagatcagaataaatcagg

SEQ ID NO: 199989 - DNA, 656 bp, Zea Mays
ttatgagcattatatgcagaagagggatgcaaaactgaaggaaggctggaagctgcagagagaggagaaggaagcaatgttaaaggctatgcatgacagcctagaacggagcaaggctgagttgcttacaaaattctctcggtctgcagatgtccctgactcaacttatgtttcccattgttctcagaagattcctccttcgcgatcagcaagaaaaaataaagatcaggtattgaatatttgaattatatttaattagtacacataaaaagcgactaaagtttttttgtaacaaaaaatgcttaacatgcacattatgtgcaatacgcaaacctagtcttatagttacatacaatgtcgtggggaaaaaaggatagaccttgtgccggaaggcggaggttccctcgtgagtagggtttggtgaagggataaactgaggtaagccttcctccgcaaatgcaaagaggctgtttcacactcacgatctggtgactcagtgagacggctctcaccactgcagcagacttacccttcacatgcaatattacaatgttgtggatcactggaataatgcagaatatggagtttactttcttgcatttaattttctttgccatttgcagggggttggctcattcttggtggaagaggaaatg

SEQ ID NO: 199990 - DNA, 334 bp, Zea Mays
agtcagaaaattcggcatgagccccctctctgagctggtgtggtctccggatgaaggcttgagcattaaaattgcggcgtctagtcttagcacaagaaaggcttctcttcgttggaatgcagatacattgagcatattgatatcttcacctcaacgaagtggttctggtccaggtgaaaagaacggtgataccataaatgataacctagaggtatcagaaaagatgccatcacaactgcggattcgcagtgacagctcagtgagagtaaccgtggatagccccaatagtacaaatgttgacgccctacaatttacgtctatgagatcgcaggag

SEQ ID NO: 199991 - DNA, 783 bp, Zea Mays
ttgaagcgtcagttaccggcgcaccatcggctgaagcaaccttcagatttgtatcaaccggagtgagacaaggcttgcactctgacattcctgcacgatcaagtagttccaccatgtattgcttctgagagagaagaccatcacttgagggctgaacatgcataccaaggaagtgatgtagcacaccgagatccttcatggagaactcttgttgtaggaccgaaatgatccgacgcagaagggcaggtgaggaagcggtgaggacgatgtcatcaacatatagcagcaaataggcagtatcggatccacgccggaagacaaagagtgatgtgtcagacttggcctcaacaaatccaagggatagcaagtatgtggcaaaccgattgaaccatgcacgaggagcctgcttcaatccgtagagggacttgttcagatgacaaacgaggtcggggtgtgcagggtcttcaaatccggacggctgaacgcagtacactgtctcagacagagttccatgcagaagacattcttcacatcaagctggtgtacaggccatttctggtatagagccagggagagaactgtgtgaaccatagctggctttaccactggactgaatgtctcagaaaaatccacacctgggcgttgggtgaatcctcgaagaacccaacgcgccttgtaccgctccagtgtcccgtcggcattgaacttgtgtttgaagacccatttgcctgtcaccacgttggcatgaggtggtcgaggcacgagatcccaagtgtgattcta

SEQ ID NO: 199992 - DNA, 626 bp, Zea Mays
tctcattgtctcaaccgcagtttctagataacaaggacagtgcaacaatggaatatccagacaccccgtctttgacacctacattttcacaaagcgttacacgggtgcaaacactgcatgttccacctccaccacctcctccatctcgaacaccgcctgttccacctccacctcctcgaacaccacctgttccgcctccaccaccaccttcatctcgaacaccgcctgttccatctccacctcctggaacaccacacgttccacctccaccaccacattcttctcaaacaccacctactccacctccaccacctccctcttcacaaagtttcccatccttaagtagaagaaatcgtgtggcagcccctcatccacctccgcctccagcaccactgtcatcccgtgttacttctgcaccatcagtaccaccttcacccccattacctcctcctaagctagccgtggccaataacacttcacagaagtcaccaacaatccgaccacctccacctccacccggcccccttcataagcttacgaagggaagtgttgccaattctaaccctcccccacatccagcattttcatttggtgcaaaggatcgtagcacagcccgctcaaaaagt

SEQ ID NO: 199993 - DNA, 332 bp, Zea Mays
ctccttcttctccgtggcgaccctccgcacggctcggtccaccgcgtcctccaggactggtggcagggagggcttgtaaaaccccaacccctggagacgaacggaaatcccgacagtaagaatcaaaggcaactcggcgcaagataggagaaggagcggacactcaccagagacacgtacccacgctcgagacgcatcacgggctgggtaagggcgccgacatccagcctccctaccgtgcccgctacccgcttgcggaggtcgtcggcggagagggtggccgaggacgtctgcgaaccctccaagtcaacccccggcttcatctccgaaag

SEQ ID NO: 199994 - DNA, 429 bp, Zea Mays
tggctgccagctcctccgacgagagtcgcttcatgcgaggtcgtggtgcaccccccagcttagacgtggtcgccggagggagggcctttgaggacgatcggccggctggtggtgcagcgtgggtaagtcgacgctcgtgagcccgggccaagctcatggctgtttggaggttcggtggtcgcttcagctcgacctccgttcgcaagggttcccccaggcctgcagtaaagagctcgacctgctggtgcggcgtgacgtcttgcgcgcgacacaggagctgggagaactgtcgctggtagtcctccacggtgccgatgcgatacaagtccttcagctccgccaggctattgtgtcgcagcggaggcccgaaccgcatgttgatgtacttggcaaagcggcgccacggcaccagaccgtagtcgagctcga

SEQ ID NO: 199995 - DNA, 401 bp, Zea Mays
ttacaagggtgtgttagccctgaggattcaaacaaaaaatttgcggagattatcgatattccaggaatgctctaggtcctcgccggatggcgttgttagcctgcatgcgctgggggacgccttcgtcttgacgatgcaaggaccctcccactttggctccagcttgccctgtgactctgtccgagttgtccggacgagtacgaggtccccttcatcgaattctcttgggacgactgcgtggtcgcgtcaggccttcgtttgagcttggtatttgttgagagcctacagggcgaagacacggtctccgtcgatgaggtctttggaggttggttcgtatacgtcggggacggctgaagcgcttgtccgtggtgacccatgtttgatttcctgcggggtcatgg

SEQ ID NO: 199996 - DNA, 284 bp, Zea Mays
ttcacggccgtcaagtcggcgttgagggccttaaacatcgacaccacatcagcgagggtcggatccgccatggcacggtgagccacggtggagcagtggaagaggaaggcgacagtggtgggctacgggaaacggccgcggcggcggacggaagggcggctgcggtggaaagatgggcggaacgggtgggcgaggaacgccgggatcttgataccaggttgtcaagagcagaggcactcaaggtggcaggtccccgactacgtagttcgtagtcgcggttcatg

SEQ ID NO: 199997 - DNA, 316 bp, Zea Mays
cgacgggtgggcacacgagtcgaccggggcgtcaaggtagcctgaagggagtccaagtgcacagggaccgccagtgccacaaatgagagtggtggggatgaacctacaggggaaagaataaagggtggtttgcagagggagccacgaggccaagaagaaaatcctacttaggaagggagtcagtggtggagctaaaggggctcgagatgtggaagtatatcttgtcgaagacaacatgatgggagatcaagagacaattagtagcgaggtcaagacatcgataccctttgtgaccaggagagtaactgaggaagac

SEQ ID NO: 199998 - DNA, 567 bp, Zea Mays
atagtgtggttgtcattccatcctcttcaaccctaaatgaagaaaatcaccaaagccaacaaaatgatgaaattatggatgctcatgatcaagatacttcaagtcattcggttcctcctcatgcttcaactagcaattctcaaatggtatcaagaatccatcattctattgtgaaggccacccagttgatcaaattgtgggtgatattagtaagggtgttcaaactcgctctcgtatagcttcattttgtgaacatttctcttttgtatcttgtatggaacctaaccgtgtagatgaagctctacttgatattgattggatgaatgcaatgcatgaagaattaaataacttcacttgaaatgaagtttgggagcttgttgagagaccaaagaaccacaatgttattggtaccaaatgggtgtttcacaacaagcacaatgaagatggattagttgtaagaaacatggcaagattagttgcacaagggtatactcaaatagagggattggattttggtgagacatttgctcccgtggcaagattggaagcaatccggatccttcttgc

SEQ ID NO: 199999 - DNA, 428 bp, Zea Mays
agaagggatacttcggttgatatctgaagaatgtgatgaactaaaggtgcaaaatgccatgttaacagacaaagtctcaatgatgcaggatacttcaaacaatatcattgaagaaaaacaaactaaaacatccatgcaaacaaagatgagtaccataaatgaggtgagtaatttagatatcttattctatatgctttcaagtacttcgtccgttaaagaacttctgtgtgcgcatgtggtgaaacatatgaaacttttgttctgctaaattagatttaaatgtgaaaaattgaaaaacaacccgattaatttctcttggctatttccttactttttaggggaacaatgatctagctactgataacagaggttgttgtctagttaatgaggaaccagacctgcaagtaaaggtccaatcattggaaagc

SEQ ID NO: 200000 - DNA, 691 bp, Zea Mays
cggggttcctgggtgcttcgtcagcccgcaattccactgtcggtgcctcagggcgcgtgcaattgctcgccggtgttggtgggcagtggcggagcaccgggcgtcgtggacatccaggctatctccgcgttatcaggtacggaaccgactttcgcattcacctaggcgcgtagatcatattcgtgggcgcaatcggccggtggtgaccggagaccgtgtgaatccctcgccggagttggcaatccgcgccgcgccgtggttagcctctgcggcccctccattcttgataagtgacccacgagtactttcacttttcactgggcatcgcgtagggctagaatcgtctggtttagaccggtaggatgcatgatcgtcgtggccggccatggcgccgtcgtgttgcctggcagcgccgtcggtcggagtctggtgaaggggagcggtatcgcggtggccgttgatcaagggatgaatggcacagattagatctcgtataccctttcggctaggaaagagctgggccgtagatctgttgatgagtgctcgggatcgtgtgtcgacgtggctgcttctgggagcgtcggatcaggatccgacgattgcgggggtgatatcaagtcataaaaccacggatctaatcctggcggctgaattccgatcggggggcttcgattggaagataccccttcgc

SEQ ID NO: 200001 - DNA, 287 bp, Zea Mays
aaacaaagaagatcacctatcagacctcgcagaaacattcgccaacatgtgtgaagcccaacttcggctaaacccagaaaaatgcatctttggggtacgccaaggcaaaatcctcggttaccttgtatcacacagaggaattgaaatcaatccgaaaaaattcaagctatcatggacatggcaccgccaaaatccaccaaggacatccaatggctgacaggcagattggctgcatttaacagatttatctcgcgatccgccaagcgaaaccttccatttctcaaaac

SEQ ID NO: 200002 - DNA, 344 bp, Zea Mays
atcggatcgatgatcaacggaccgaagccatccacgccagccctcggtcgtgaccgctagatctgatcctaatgcccaagatttcatctagccgaatgggtatgcacgacgaaatctcagccgttaacacagaaatcggtggacataacgcttgcccccaaccttcacctccaccggtcatcagcagacagcagcgccagcatccctacgacggcgccacggtttccccacggtggaagtcgccggagttcttcgggacggtgccccatcgctcccctttacccctcaacaccgagattcgcaacaaggagaaagattttaacccgtcggggatacttaccgcc

SEQ ID NO: 200003 - DNA, 331 bp, Zea Mays
gtcgctcagaccgacggccaagcgcggcggcagtacacaccggtgagtcccagcccggtgcaccggtgaactacccatgtgcctactagcaaaacacgacacagagaacagagggaatcacccagctgggagttcttacctggactcggcaggtggcaggactgcccacgcgctacggtgctggctcactacaacaggttcgaccggggcccaggaccttctccgcgctcgagagcgacgcagatgttcgcacgatgcctccctgcacccctctttccgacgaacacggcgacacgaacggaagctagaacttggcgtttgcatggaaggg

SEQ ID NO: 200004 - DNA, 882 bp, Zea Mays
cgctgtgccgtagacatcctctggcgccacatactccggcacattgcttggatatgtgatggtgacattgttatccttcgggtagctgaccccgaagccagcgccaaagatgtatgctgtgtcgtcgtcccaggaccggtacccacccgtgtccttggagggcgaaatcgcctggcctcccacgttgagccggtacatagtctgcaccgcagtgccagcatcgattgggaacggctggaggttgccatcgccggtgaccatgttgggagtggagatgtcgaagaggtctggggacgacacgacctcgatgccgttgacgaacgcgtaggcgttcgggtggcctttctccggggtgaaggtgaggtcgagcgtcgcggatgagacgttgacggagaactcccggatgaggtacgagtaggtgatcgcggcagccgtctggtaggcgctgaagttggagagaagggtgagcttgccccccgggacggcgacggagacggagaagaggccgtcggcggcgtcgtggttgctgtagttggccgggtagaagtgaagcctgaggaacttgcggcccgggccaagcgggaaggagtaggtgaagggcgaggccgagacccgcgcggtgaggtacggcacctgcgggaccgagggatcctggccagaggcggaggccacggaggcgaggttgtcgggcggggcgaacttggagcccgcgtccccggtccagacccggccgtccgtgtcgttgccctgccccttcgcgccgcagtccagcaggatgtcatcccgcggcacgaacgccgtagagttggccgcttgcgccgccgccgcggcgcaagtggccaggagaagcgccagcagcagcaaggccctcatggtggcaag

SEQ ID NO: 200005 - DNA, 388 bp, Zea Mays
gagcagaggtcgtgaatgggtgaagcaggagaccatgactaagtgtcccacggaggtagcgcaggatacgcttgactgccgagaggtgaacatcttgaggatcatgcatacgaagacacacttgctaaacagcataggagatgtcaggccaggtgaaagtcaaatactgcagagcactaaccaagcaacgatacaagcggggtcgctgatagtggtaccggtcatggcagagaccatagcatgagtgtcgacaggagtactgcacggcttgcaatcagacataccaacacactcaaaaatatcgagagcatattgttgttgtgaaaggaagagtcccactgaatgctgctgaacagccacacccaagaaatgatggagggtaccaaga

SEQ ID NO: 200006 - DNA, 275 bp, Zea Mays
aaacaacaacgccatgagggaggacgaccatggcattgccgaggctgcatgctgcgggtccgagggtcacaacagcatactcatggtggcgtgtggccaagtccaagacgcgagctcaaaaccaggatgaacagcgagctgagctacaacaagcgatgtcttgatgtggatgaacaacgacgacacgcgaagtcggaacaacagggtgaggtgcatggccagctagcaaagatgagcgcccatggcacggaagcgaaagcagaagtcgatggccg

SEQ ID NO: 200007 - DNA, 339 bp, Zea Mays
gcactatctaattgggaacaaatgccacatcttcactgatcacaagagtctgaagtatatcttcactcagcccgacctcaacctccgtcaaagaagatggcttgaactgatcaaagattatgaccttgagatccattaccaccccagaaaggccgacgtggtagcagacgccctcagccgaaaacctttcgggataaagggaactcactttctagaagattggaagaaggaatcagcttagctgaatgcgtgtctgggagacaacggtagcttagaaatcaagccaatgctagaagacctcatatgcaaggctcaacgcctggacacggagacagcgag

SEQ ID NO: 200008 - DNA, 418 bp, Zea Mays
gagactctctcaccgctgttctcccttctctacccgtggattcatggtcctttccccgccatcgagttcgctgtggcaccctcttcctctctacccaacttcggcgaccccagagccaccctagctcgcgtccaccttaaatccggcgacctcaccgccgcggagaggagcggtgccgcccgcagccgtctgtttccccggtctgataccctccatctgattcagatcgaacgactcggaccccctcggacccctcggacccctccctccgtccgatcttgattgaatggttcggaccccctcggacccctcctgttcgatcttgatcgaatggctcggacccctgtagccgtccgtttcccctctggcgctggacccactcggtcagtgcgctcttcccctcgatcgctgacactcc

SEQ ID NO: 200009 - DNA, 365 bp, Zea Mays
gaacaaataggcaagagacctcaaatgaatgagattgaggggtatatagcctcaagcaaaggaaatggtcgttgcctctccaccgaacacgtctggtgcagttctaacagctagtttttgatgtattagtatctgctgcctcacttcacatgtttgctaagtgtaatgttcgaggtgcacagttgcaaatttatccgagtatcatgtttggtgtcacaccggacacgtctcgtgagtactcggccacatctcatttgtatcctctctagatgccctatccagtggtagtgatacattggacacgtccagtgagtgtatggcctctcacactcgtctacacagctctctgggcaggtgcacattgg

SEQ ID NO: 200010 - DNA, 332 bp, Zea Mays
gcttgatgcatgcaggaacaagcctgcttaaaggagaggaactcagatgaagtgcaggccgattgaggaagtcgcggtggtggtgaacccttcagagttgtctgaaaaagacgaggaatcaggagtaacagaagctggcggctgcactatatttcttgttttcttcttaataaggtgttaaatgcaagccaccaccatgcatgatatttggacaaccttggaaagctaatattttctcagccttataccatatatgcttgatgtgcaattttttaattgacttggcaatctgaacatcattttggataatcccttattcttgtggtatgtct

SEQ ID NO: 200011 - DNA, 472 bp, Zea Mays
tcatggttagtagtagtagaatagaacgtgtagtgtatttgacattcctttacatagctggtacggattgcgtatccacctcgaacataatagggcgtagctgccggaggcgaggcaggccgggttctaggggtgctggggtgatctgggtaggccggtgtcatgacccagggtgcgtgacaggattggagattaacagaagataagtgtggtgatttgatttgttgttgggccatatacggccttgtaactagtgattggcccaagattaggctgtataaatactgaactgaaactagaagaaagggcagaaaagaaaaatacagaaacatttctaccgcctacctctgcttctctcctgtcttcttcccgcttctgcttcctcgcgctgcctcccttctattcttcttccttattccagagatcgccagagccttctcgccacggacatcacaattggtatcagaggctc

SEQ ID NO: 200012 - DNA, 408 bp, Zea Mays
gttgagggagtagctatcgagggtcatacatccagaatggcgtagcagggcgagtaaatcgagggatagagatgggaaatgccccaaagagagagatcggaggacagagtggacaagggggagctttgaggagaagacctgaaacaattgactgggagaggaggaggggaatatggcaatgggagagtcgtgggattaaaattgaaagggcatatttgtgttcaggaaaagagcttttggcaatgcagaaggcttttgacttcccaacaaatatttgtgaaggtgcacccattaaagccaatggagttgacaagcgatctgttgctgcaggcaagcacgcgcttggaggatatggggaactgtcacccaacactgaaacctacattgcaaaggaacccgacatgagag

SEQ ID NO: 200013 - DNA, 280 bp, Zea Mays
cgagggtctaagtgagtctgagtgacttgccttgtaacatcgtgtgccttcccttttatagctcaagggaggcacatacaaggatgccgagccccgacatgtgggcccagaaacataatggaagggatatctagagcaactattgcaggtgacgtctgtgcaatctccaggcccatgttatccacagcacgcgcagtgttgacatgcagcagcagcttccttggtaacgtacgagtaatgatgggcgtggtgcacgctgcagtatgggcgtgcagtctgc

SEQ ID NO: 200014 - DNA, 791 bp, Zea Mays
aattctagaatctctcgccacaactctagtttcctatctttactccttcctgtcatcaaccagcactacatcatccgcaaaaaacatacaccaagggaaatgcccttgtatgtccctcgtgaccttatccatcacaaaggcaaaaaaataagggctctcaaagttgatccagttaaccttcttaacaaaggttgttaatacagtattccactgacaacattaaacaataatcatttcagctctatttatctatacaccaaaagaacattaacatagtcgttcacacccttcacctcgttcccgcacctgaggtaccggtttagtctgccgctcctacaatcagtctcctcgatctctagctctgccactcttggactcccactcatgtgcctaaaaagaacaaaatgcctctcatgtcaccactatccccttaaatcacaaccccctcatgatccacacctatagctagcccagcctgcttgtgtcaccccacccaagtttggtttttcatccaacaagttcatgttttcttccaaggaccccacacctgcttgattattgtgacatgctcaaggccacacaagccacacatggtcctaccccacaacaccaccaccatattacaaacacccagaatctgtaatcttctcttctctcttcctgcttatggccagtcgtcatcgatgttcttggctcggtccaaggaatgtgtcgtgccaccatcaacttatcaacattggatgggatcatgctacaccacgtggtggatcaccatccccgatcccatctac

SEQ ID NO: 200015 - DNA, 499 bp, Zea Mays
tgaagcgtcacgctgcctgctagctgaagcgtccaggggggttttcgcgaaaattgcacagggaggtggggagaggtggaaggagtatttcgcaaaattgccggctgtcgttggatgggagatggatggccgagatttaatatgcgcatgtgagtacggtaccggtttgagcacacgatacgttgccgtccttaatacatttcccatccaaccatctatccttccagaagagggtattggctccatcaccgagcttagtaataatggctgcagcgatcagatttttaaccaccttacatacacgagtggggaagtccgtccaaggcctactggggtctgttttctgcagccatggccaacgagctctcagagcccaacataggttctttagctcactaatcccaagaccacccagctccttggacgggtaaccttaggccaagccaagaggcaatgaccaccacggaactctttcctgcccctccaaaggaagcccttc

SEQ ID NO: 200016 - DNA, 1444 bp, Zea Mays
catatctctagtggcaatccagtagcgcgccgcctctggccgtccgccgtcgtcgccctctccctcgtcctcgcccgtcgcacgtgttgtgtgatccaggtgactctgcttccctcccttcccatcgccatctctctctccgcactatggccctcgatttgattcgggtctgagcacttcatcccattccccgccccagatcacgcccaccgctgtcctgttcgccttccgccgtgccatcccatatccaccgtgctccccaccctccctactcctccccgttgggtgctgacctttttccctctcttacggaaatcatgcttcatctggtgatgttcttaatatggagcaacggataagcttatccgtgtgtcagtttctctaatatctaagtagggtttcccaccgtcccccgttacgtctagtatgccattagttttaggctgtgtctgatccattaatggcactgcaaccaagacgtgccatcgtccagtcgcaccatcacaagagccgacaaagggtaccatactcttttttgacagtgaatcaactgacactgtttgcacccagagatagagagatagaacaaatacacaacaattttgtaaaaaaaaagtcagtcctatgtgtggggatttcagaaattacaagcaaatcatttttttttctttaacaagttgcagcaagaaacttctttcgaggagcgaaacatgcacctcgacattggtggcggcatttattttgttcttgatttgcctttcccaatagctacgatgcacactactattcaactccgcacaccatttctgctcagtgagcataattcacacaccaataatcttgctcctagcagcggccaaaggcagatccatggaggttatgactggggcactaccgagcctcatccccaagcttgctaatctagtcgctggtgagtacaatctgcaaaagggtgtcaaaggggatatcatgttcctccaagaagagcttgagagcatgagggatgcactcgaggagatctccaaggttccagcagaccagcttcccaacagagataagatttgggctaggaacgtgagagagctctcctacgacatagaggttagtattgacgcattcatggtgcagtccaagggtaggaagctggttaaacaatatggtctccagaaagtcattggtatgtgtctcgactggttgttgcagcccaagattcgccataaaatggctactgaaattaggacgatcaaaaggcgcatcgttgaggtgcacgaacgacatatcaggtatgaaattaatcttggtcctgataagcttggcaatgctgctgtagatccccgaatatttggtcagtacacagagctgaaagagcttgttggcatcgacgagacaagagatgagttaatcgatattatgatggaagggaatgtagtccccatgaagcaag

SEQ ID NO: 200017 - DNA, 292 bp, Zea Mays
atagtacaaaacagcagtacatccagcttactagaccagcacatcagcaacaagtttatttaatacttgaatagttcataacagcacagcagcaacaagtttatatgaaactgcaagtctacaacttactagaccagtagaccatgaccaagaaggcttcagatgaggagctcatctccagtccttgtgttctcttttctcccaaccgatatagagcgaaaggtgttgccgtgttggagccttggagggagagagaagggtgaagaagggagagggaagggtgttttctgat

SEQ ID NO: 200018 - DNA, 615 bp, Zea Mays
catgaacctggcaagggcctatgagagaagggaactggaagcaggaaaaaggggaggatacaaagttgctgggaagagtttggtattcaaggaagccagcaacagcgcaccatctaaggtagctgctgcaccccggcctcgattcaaacggctatcaccggaagaactagcagcgaagcatgcaaaaggggaatgctatcactgcacagagaagtactcagtggaccacaaatgtgttgctcgaggggttttcttgctggaattagaagatgacactggagaggaggagacagtggccgagctgggcatatcactgcacgccctgacaggaattgatgtgggggagactatgaagcttacagttctaatcaaaggagtaccactcacagccctggtagacaccggttccacacacacattcatcacagaagcaaaggtgtctgagctgcagcttccattggaaaggcgccaaggagcagtacgggttgccaatggagacaagatcaccagcccaaggttctgcacaggattatccgtacaaattgctgaagagcggtttgccctgacttgctatgctctaccactagaaggctttgatgtggtgttgggagtcca

SEQ ID NO: 200019 - DNA, 288 bp, Zea Mays
ggacggacgaaggagagaaatcaagttaattaagcttacttgactgcaaatgacgtactaatggcagccagacaccaaaagtcgatgagcttgagcgcggagacgaaaccaccaaggaggacaacggtggaccacgtcagcaacagatacgcgaggccggtggcgaccttccgtgcggcggactcaagcagcaggtaatcgttgatcagcctctcttccggcctccttgcgcgataactctcagcatcactatagttcttctccattaatctcgcccaccaccatctg

SEQ ID NO: 200020 - DNA, 488 bp, Zea Mays
gtggacatggatgagtgtatgaccaattatatgtggacaagattgtgttttgtgtacttttgtgaatgagacttgtatgtggatgtgaatgaacatctgtgtggttaggatttgtttattgtgagcttttccgattacagttaccgtttcccgatcaatttcgagctattttgctcggatttatccgttttcgatataccggaatttaccgaccgttatccgtttccgactttcccgtttaccgattacgaccgaacaaaaatttatgcgggtgaaaacggtgagaggttttttccgaccgttaccggccgttttcatccttaggtggcgggcgggcgcgtgatccgcgggcgggaggggaaccgcggcgggggcagtctacactttactcttaatagttagtagagatagagattaggagagatttatatagtgccattggagcgcgattggtttggcgacatggtcaacatgactcgcagccgcgc

SEQ ID NO: 200021 - DNA, 359 bp, Zea Mays
gtgccactgtgaaaaacaacaaaagttagcatatgtcattgactaagtttagatgtagctgaatttatgtaccagttgtgtaagaacaacatagtaaattaatcatacaaactaatctatttattgaactatcgattattgaggtaacttctgttcgagaatcttgggcacatgacatatccttatgcggttacatcttaacatttgtattcccagccaaaaagtctacaaacaccatctttaccctgttccctaactgtctattcaggaacgggcaagagtgcaagacactacatgaacaatatttgataatgtgaataataggaagtaacaggtgcatacgattataatgaaaaatg

SEQ ID NO: 200022 - DNA, 620 bp, Zea Mays
gacgacatggaggccgccgatggtgcagccgagaatgggaacacagactcatcaaagataacatggcgcgagataatgatgcggcgagtggacatgtcaaggcagcgatagcccttgtgagaggatgggtatatcaggatcaatcggagcctgattagcaattgattgtaatcccctagattggctagctgccttgtatagactaggattaccttctatctatagcctaggtatgtttccttgtacagggaatagccttccttacatgtacctcccatgcatgcctattggctatatataacaggctccccaccctcaatgggtgtgtggtgattcaatccattcttcccctttctacatggtatcagctctctagatcctgcgcccatctccctgctgtgcgcagcgccaactcctccctgctgtgcgcagcgccaactcctcccccctggtcaccatgaccgacgccaccactcctgcccccgctgtgattgtcgccccctatgcgacgatcaatgtcaagaaccacatcccggtgactcttgaactggcaaaacccaacttcaaccagtgggaaccattcttcacctccctctgtggaaaattcgctctcctctcgc

SEQ ID NO: 200023 - DNA, 589 bp, Zea Mays
aaatcttgactcatcgtgcgagccatctgaaaagaagtgcaaatttgttgtcaagttaggtgcctcggcagatattcggcggccagaggatatagcatctaactctagctcagtttcagatccgatggcttcaaagacttgtcctgtgtgcaaagtatttgcttccacttcgaacaccacattgaatgcccacatagatcagtgcctttctgttgagtctaatactgagcttgttgaaactgtccttgtaaagcctaaagtgaagccaaggaagaagcgattaatggtggacatatacaagactgctcttccatacacccttgaggatcttgatcggaggaattgcactaattgggcagttgagttggctatgtctccagtgagcaaagaggtttgcactgagaacggaagcccagaagtggtatcatttgacagaagagatgatgaaagagaaggagatgtttatgttgattctaatggcataaaaattagaattttgtccaagtgtaatgatgtacctttggtgttgaaagatgaccttggttctagcaaagttgcgaagcatggaactggaaaaggtatactgatg

SEQ ID NO: 200024 - DNA, 290 bp, Zea Mays
atagcagtcgataggattacaaaagagtggagaactacctggaaatctcacgagagagggagagaatccaggcaggacaggagatggctcacgggcaggcgaggtcactgaaatgacagaagaggtgagctcatattagtcacatagtcataagtatatgaaatgtgaataaatacatacacagagtgttatggcacaggaatcgagtgatttggcgaaagagaggtcaaacgacgcgaaaacgacgtttgaacgaggaatagtgccataggaggtttgaaattggaaat

SEQ ID NO: 200025 - DNA, 362 bp, Zea Mays
gttgaattgatttatgttggtaggtcaagtattagaactttgatggaagaagagatggccagcagcacacagcccttgaagcaagcacaaagcaatgtcgctgggatatgctctgaagatattgatctaaacttggctggaagtctcatggaaatctacagatctcatactgaaggccaagaaaccaggaggtcgattgagtcaggtcgcagttccatttcgactgacgaagagaagaatactgaccctcctgctcatcactatcagatcccatctagtatccagagagctctagaagatgttgctgaagcagttataagacatcaatctgcaaacaaaaaatacataaacagcggtgatga

SEQ ID NO: 200026 - DNA, 2275 bp, Zea Mays
tatcgatctcgtcgtcgtctcccccggtggcatgctccgctcccgctagatccgatctattatctatggatccccgccgtctccccatccttctctccctcctgcttgccttcttctccgccgttgtcgcctctgacgagatccacggatgcggcggcgtcgtcgaggtcgacgttcctcatgttgctctatctccgtgtacagtgtgtttcgctttggttaggtgtgacttgttacactgatgcgacttggggttttgggtggtttcaggcgagctctggcttggccaagtcgaggaaggcatcggattccaagctcgattactccgacatcacggtatgccgtccgctcccgccatcgtcagtttttatatcttaggaccgtctcatcccatcacgtagacaagcttcgtagttgcactcagctgtcctttcctatcgagctttgactggtatttttatgcatgattcgtttagtctaaacatacatttgcttgatgccgttcacttgaattggacctcatggagagctgaacacgttctggttgcatgatgctgagttaccgccgctgctctaacaactatcctagtttcggattgcctgttgtcccatggtattcagatcactgccctatgggtttgcatggttgggtttagcgactctacactctattcagaccatttagaattaccattagggcacaagaggttgccctgccggtgttttgagcacatactgatttcttgtttctggtagctttggtgattgctggaccttaattatgctggggggagcgatgggggatgattcaaataatattgtccattagatttgagtaagggagagagtttatccagcgatctgaaacgttggttttcatgttttgttaagtctgggtgcaatttgtttagtggaggttgtgggtgtgggggatgatttggttgggtgggttctactaagtttaaactgatggatattttcatctctcatatagtgacatatgcaaactgtagcatgtagagattaatatcatttttaatacatggctattattctagtattgctctatttgtgtctgtgtatgttccgttaatcatgcttgtgctttggttttgatgcatatgtttttatatttatttatgatttgcactaagcctccaactgattccctcttaactttgtgtatcaggttgagctctgcactgttgatggtttggttaaagaaagcacacagtgtgctcctaatggatactattttatccccgtctatgataaggtatctttgtgttttttgtttactttagttctggattatcttttatgtgttctcattttatttacacatacaattttattgcaagtaggagcaaaggttaaagggcactactccctcctgtcacaaaacatgttatgttttggctactgtcagcatgatgccctgtttaagtttttgtcatcaatatcctttttgatatttcaattgaacttctagaaattgtatagcctgatcttccttcaaaaaacagttccatactattacatcattgatatattttatacatatttagacaattagactactagttattgtgatcaaggtatgtaggctcctaatgaatattacaaagaaatttattttttgactgtatgacatccaaagcagcacctatttttttttgtactggaggaagttgctaagatcataattttgatattctcttccattgtttctaaaataaaatttatgtctactatttatgcttgtcgcttctgtcaacacagggttcgttcatggtcagagtgaaggggcccaagggatggtcatggaagcccgaaactgtaaaataattccttaactgaatctttcctttgtttccctccttactttgtctttactaagcactaagtgcatttgttcttttactggatgacatgttcacctaacacttcaggttcctgtcatcattgatcacaatgggtgcaatggaaatgcggatataaatttccagttcactgggtttgtttctttagccatttagtttaatttttttgtgtgaacatgaatcacattgaaacttcaaatgttaatgtatgcatgcaccgtgcaggtttatgatatccggtaaagtagtgggagctgttggtggtaagagctgctcaaaacggggaggacctgctggtgtgaaaattgaactgatgacagattctgatgagttgattgcatctgctttgacgtcatcatcaggagaatattcatttacaaacataattccag

SEQ ID NO: 200027 - DNA, 388 bp, Zea Mays
gtgtccccctgctcatgtccctctgctcatgttgctagccaagcacacctaccctccttcctcgtagctccacatgatactgctaatttttaagactttttaatagaagatgaacctacggagagcttagcttagcatcaggccgtcagcttgatatttctgagatcgtgcgcacgagaagctaagccatccaagcagcttcatgcaccatcgtctgtgtctttcgggcaggtgttgtgccttggcttgtcgccccattccctcaccgctagcgcccagcagcgagcacctcgtttgggtttggatgcagcactgcacgattccctgacaactcgaaaagggtacagagcctgcggttggggataagcacagtggtgaaccaaaaggt

SEQ ID NO: 200028 - DNA, 310 bp, Zea Mays
accgcgaagactatccgcgcagaagtcgcctaagggtgcagccggactagcacaacaagtgcgaaaaacctcagtctaccacgaagactatccgtgcagaagccgcctaagggtgcagccggactagcacaacaaaagcaaaatcgacaacaccaaactgcccacgccaagatcgactatatgcgcaccagcacaccataacaaaacacaccagaccaagtacataacgccttcgcaagcatagccaagtgtgcgggggtacacaacctcatcatacaagcctttccacatgtacaagcgagggcaccac

SEQ ID NO: 200029 - DNA, 824 bp, Zea Mays
aacaagcattttgttgcaatattttcatgaagaatgtcatacaaagtgccattcgatatgaactcatagactagcaagggtacctcatcttctaggcaacaaccaaaaagtttcaccacattgcggtgaatgatttgagataaaatagcaacctcattgatgaactgatctatctctatttgctccactattttagatttttttatagccacgacacgctgatcacacaaaatccctttgtaaacagtgccatgcccaccatgacctagaacacgagtagcatcaaacttgttggttgcttcctctagttcatccaaagtgaatatctttgttttgtttgtggcattttcatttgatattagttgctccaagagtagaccttgatttttcttgaagtactctcttcgaattctcctttggataccttttttccacttaccggtgagtacaattgcaccaagtgcaaaacttatggatccaagaccacaaacaagcccaattacaatccctacatccattaaatgagaccatgaatatttcatgtcttttaatttgttgcataaagacatgactcaccaaaaattagaatacgctgcttagctgacatgacacatttatgattttttggatcatactctttcccgtgagggcaacttgtacaattgaagcctccatcaaaattgtggcatattccattgcatttatttggaataaggcactcatcaatatctgtagcaataagatggttgtaagggttggtggggcaacaagtaaagcatgcatgcatttattgtcgtttcgaaaaaagtaatacaatatgtgat

SEQ ID NO: 200030 - DNA, 1396 bp, Zea Mays
aatgttggcgcttctccgcttgtgcatgcgtcacttgtagcagctagtcttcatctgctaacaagttacttctcttcccagtggcatgaacttgtccatattctgcttgcacatccaaaggtaacatgcaggtttatcataggaccactcatcactcttcaatttcttgtgatatactaatttcgtctgaaacataaattatgaattttgccatccatcttatttctgaagcaaagctgattgtcgagcccatatcgctttgcttttattttggtcctgatctgccaagttttgtttactacatctttgctaacagcttctctacactaatctcattgtatgattcttggctccatgaaatataatcatgtagcacaattttgattgtcaaccttactcgtgatgttttattccagagtcattttagctatccttgtgtggcattttgtgcctgaatcacatagcaatcaatgttatcaagtcatcttactaatcacgattagtcggactgatcaatgtcacggtgatcagttatgtactacaataaatcacaattagtcaggctgatcggtgccatagcgactagggttaattagacgatttgataacattgatagcaatcactgcaagcttccatgtcaatccaaacttgctgtaaaatcctgcagttgacatgaggatgtttttctgcgttggagttatgctagttgaattttgtacacctacatacatgccttacttttaacattgctgttaaactgagtttgtttatctgggttctatcaggacaatacaatagatcccttggtattcttactgtcttataagcatggtctttgaggtgtcgcctaggtgtctaggtgtgcccccaacgccacagggcaccatggtaacactttgttgcctatatgtacaggcgtgcccccaatgcctcaaaggctaagcttataaaatacatagattatgctaatgttttggtggctaccccagtgtatgtcctgtgtgttatatgatgctatgtttcaggtttttgtatgtgtatatttttgtaattctgtgatttgggttttacatgtgtatgttgtttggaaaaattctatatgagcacttgttactctttttgataccctgttgagcacatactgattcagaatgttattctttcaatgtatatgctattcagcaatatgtgtatctgctttaggaagacctataaatctataatttaatcattcatgcacatactaacatttaatgactcatggtcaggttgatatctttatggatgtggcctttgatagtttgcacgaagatgcacatactaacatttaatgactcatggtcaggttgatatctttgtggatgtggcctttgatagtttgcatgaagatgtgag

SEQ ID NO: 200031 - DNA, 1149 bp, Zea Mays
agcttagatcagtggccacatctaaatgatctggtacagtgctacaaggctgattttgtgaaggatgactgcaaatatggacgctatgagagtgttgcaccaccatctttccaaaatcaaattttcgagggacctgatacagacatagaaacaggtaatccatcttccttgctgccaaatggctgtattaatttcacatgtatcttggaaaagttttatattcttgctctgtgtcacagaattgcagctttgcaacgcaagacatttcaagcctgaagatcctaccgaagatgatatgccaagcacctcagggaggcaaatgtatgaaaccgaatcatctgcttcatcttcaaaagtggtaagggcatcgtctctggacttctgtactggatagatttgtcctttgcttcccatgttttcttttgtgctggcctatagtctgcaattaatcttagtgcttttataatgggctactcacattggataagaactatgtcatgcttgattctttatgtattttttgtcagtaatccttcgcgtccaatcacttttagtaccttttccaccgctttctgatttcctttgcttcctgtgcaaacgatttctgtcaatggagctataatactggttgaagaccggtaaaatcattttaagcctttcgaaataacataccatgtgtttttattctttaaagctctcatgtgacaatttttcctccaagttattgcaatcagtatcaattctcatcttgatgttgaacattaacagtatctttatcatctgtgtttttctcagcactgtagtctgtcaccactgccagcatatgagcctgcatttgattgggagaatgagaggtctttgatatttggccaaagggtgccagaaagtataccagcaataagcaacaggttgcttcagcccacagactaaaccaatgcatccatcatttctctctccccaccccttcttctggtgatcaatgcttattaattaatcccgttttaaattgttttgcactgtttatagtggcttgaagataactgtcaaggtactatctttgtcattccaagctggattagttggtgagcaaaactagaatattttgtgattgcttcttaacttctttactgtaatttatctcatttacac

SEQ ID NO: 200032 - DNA, 540 bp, Zea Mays
gttataaaggaacatggacaaaaatgggtgatcgataagttagacttggaacataatcatgagctcagaccagcagacagcaacaacatgtttagtgggcataagtacatgacagatatggaaaaaggaattataagaacattgaaccacaacaacatacctacacggaagatgatagctatattgtcttatctgagaggaggtatgacagcactgccgtacaaaaaaaaagatgttagcaactacagaactaaaataaacaaggaagtaacagggaatgatatgacacaagcactgcagttttttcaggaaaaacagaaggaagatccaaatttcttctacagaattgtcattgatgaagataaaaaggtgaagcacatgttttgggcagatgggacatctttgaaatactacgagatgtatggagattgcatcagtttcgacaccacgtacatgactaacaagtacaacctgccatttgcgccatttgtgggtgttacagggcatgcacatacatgcttgttcgcatgtgcattcatt

SEQ ID NO: 200033 - DNA, 348 bp, Zea Mays
agagcgaggttgggggaaattccgaattcgagcagatgagtggatgattgtggctgattagcggtggttagctagcgaactaccccacggagctggacacgggctcaatttataggaaggatgggcggtggccacgaatttagacgagacacgcggcggtcggaggtgaagaagaagcactggccacgtgagttcgtagccaacggcgtggcagtaactccggtgagccacggagacttcagaggaggtcacggcgacacggtaaaagagttgagccacgcggcgcacggccgggaggcggcggtcgacggtgaacatatccacatccgccgcggtaacgatggtacg

SEQ ID NO: 200034 - DNA, 682 bp, Zea Mays
cttcaaactctttttttggttgctttgctgaaatccatggatccaagacctcatttatagctaaagtaagttccctgctcttgaaatatttcatgactagttcatgtaatttgccacgtgtataacccgcgaactgggggtgtaactcatggaagctacttgatccttggttcacaccaaaattatattggtctgggtgcgtaaaagcagcaattaagtttgagcttggtgctgcactgggaacagagcttccaggttttaaatccttaagaactggaaaccatgtgttatcgatcttacggaacacgctactttgttcaatgatagtgtcctttttaactaattcttgcaattcggaataagaaaatgggccttgatcatgcccagtgccatcaaggtagtaccagtcaccccgattaactgacagctcatcaacagtgcatacatggtccttcggaatgtttggaacagacttggacttgtgaaaactttgtgaatcatggtcatggtgcttcctgaaatgcgacgaaccatcatggatagaacttctctcagccccaattgaatgggagcgtgaagatctcgacggtggtcgatcagttcctctgggttttgtacggggttcgacagatgattggtctttaataacatgataatttatactaaccacttgaagcatcac

SEQ ID NO: 200035 - DNA, 333 bp, Zea Mays
ctttgaagtcttcccgaggctgagaggcaaactcattttgagatgccagccagcactgatgatgctgagatggatgtcgtgcttagcctgctggctggggaatcgtctgactctacctacaccgagtcgatggccatcatgactgggaaaaaatttgatgaagaagcggagattcggaaacctgaaggtgcccgcccaaagcgttcacaccgagtgaaccgcctgactgcacctgtcgaggagaaaaagaagaagaggcaacttcggtgattgtcgtgcttggatcaggatgctggtacttctgtaccgatccctgacgatgtcccagcggac

SEQ ID NO: 200036 - DNA, 350 bp, Zea Mays
gtcgactgggctggcttgatttgggcaacggtgaagagggaggtagtagctggcacgacacggcgatacgcaccgtacctcctccatctgatggtgcgccaaaggccggagcgtttcgttgagggtaatgggagcttggcgcttgagaaggggttgaaaggtcaggtattgcagcaatgccagttggaggacgaagaagaaacctctttggttttttggggcacccaaaactttggtgacttagaggaaatgccaatttttggcagccaaaacataagttttttccctcaaccgcaggaggtggggggcaattgcagttaccaaactatttcacgtttccaagccctcat

SEQ ID NO: 200037 - DNA, 287 bp, Zea Mays
caagctacgaggtcgtactcgggtgcaactggctatgcaccctcggccccatcgagtggaacttcgacctcctctccatggcgttttgggggcacgatcgccgtgtcaagtggacaggcatgggagtagtccctgccccacatgcgctagcactctcctccgacaacctgctgcagctactcctttcagaattcgttgatgtcttcgccgagccgacgggtctcccaccacctcgccccttcgaccactgcatccacctgctaccatcaacaccacctgtcgttgtc

SEQ ID NO: 200038 - DNA, 380 bp, Zea Mays
tggagctgcaatagtgccacggtcacgaagatgataaccctgattaaaaacaacatgagagtcatcattgttagtacaagtatcaacaacaggatcatcgtcaggactggccgtgggagtagagcgaggacgacgaatgtaagtctgagtgacatgtggtttggaagagtaagactgagatggtggggaagtggaaggtgatgtgatgggaataagaaaatctggggtagaaacagtaggtggtgatactgatgaagtttcagaaattggaggaaagctcatgaaggaggtagactttgtggaataaaaagaagaattagtggaagagttgtaaaagaagggtcgattttcattaaagctcacatctcgagaaatacgca

SEQ ID NO: 200039 - DNA, 554 bp, Zea Mays
ttgaaagatctgaagcccctggtcgccgttttgcggatcctggcttcggttttctgaagagatgcgatatcatacctctggacctctggacatgcgggttcgttctatacatcctcgcattttctcgaaggtccaacaatctgcttcaaatacaccagtgaatcataagaattgttcttggcagtttgcattttttttgttttttctattttttgctatgtgaatctatttgaatgaatcatatgcatcttgaatccgtgacgacgaatcgatggctcgatgatgattattcttgctttaaccacaccgaactaaaggctattggaagggtgctttcttccttcctccatttgcgccaggctcctctttcttggtgtttcctcatgaaaccttgctttcttgttgaagaatgcagttcctgttttcttccgcgagagtgcgaggtagaaggattcggtaagatttggtagcgtagcaaggggggaaagctggaggcctcgtccgctggttcttggcttgtagaaaaacctggcctttctctgagagcctttgcc

SEQ ID NO: 200040 - DNA, 341 bp, Zea Mays
ggcgacagtggcactgttaatgaactcagtcccattatcggtctgaaaacagcgcacagaagaactgaattgagtgttagcgtaagcagtgaactggacaatgtgttcatgaacttcagatttatgtcgcagggggaatgtccaacaaaaatgagtaaaatcatcaagtatgacaagataatatttatagctcgaaatactcaaaactggagaggtccagacatcacaatgaacgagttcaaaaggtgtagatgtattagaaacagaactatcaaaaggcagcctagcgtgtttgcctagctggcaggcatggcaaatgcggcgagctgctttattacact

SEQ ID NO: 200041 - DNA, 303 bp, Zea Mays
agatacatgttgcatcatgaactagtttttgtacctttgggttaatagttctatcattttctacatgaaaagagattagtctccacatttggaacgaacacacaagtacaacggttaatgcaacataagatagattggtagtgatcaagccaacagtcaagcaagtttagcgacttggcatgcgagacagaaacaaagctaattaaaacaagcttatgctaccaagcggctgcaatagaatctcacaaagcacacatatctgagtcatctactgaaccacttccaacatttgctgtatcttca

SEQ ID NO: 200042 - DNA, 480 bp, Zea Mays
aactttttcccttgtaaatcttcaacaaaatatgcgtttccatgtacaatgcctaccaccttgaatgggccttcccaattctacgaccatttgacgaatttattattcttatatcctataggcaaaatcgttttccataccaactctccaatctgaaacgatttcttcttcacctttttattataagctctcgccactctcagcttttctttttctatttcccttaaggctgttaatcgactttcaatatttccatcaattctgtctagcattagctcaccatatacctcagccgataaagaattctgacaagctactctgcaagcctgtaaattcacctcaataggaagcaccgcctcttgtccataaaccaattcaaatggtgtcactttagttgctccatgctgagatactcgatgagcccataacgcctctgacaacacttcatgccacctcttcggctgatctgcaattttcttc

SEQ ID NO: 200043 - DNA, 396 bp, Zea Mays
tgctacgggctttggaagatgatgatacatctgcaacagcccttgatggtctaaagcagattttaaggttttcttttattatctttttctggttgtcattaatttggtgagatcagatgtccgacttgatgtctacaactcacaaatattgaccttttgatgtgattctacagtgtccgaacagcagctgttttaccccatatattgcccaaattagtccagccccctctctcgtgagttggctactgatattacatattttctatttacattcggatagcactgttttattgacaaattgctttattggtgcagttcatttaatgcacatgcattaggtgctctagcagaggttgctgggccaggtttgaattcacatattagaactgttctccc

SEQ ID NO: 200044 - DNA, 381 bp, Zea Mays
cggttgcaagattgggagcgatactagacggtgtggtgcgtgatgaggttgcggagctaacggtgggctcaatttatagattccagggggcggtggcgcttgaattgatgatggcgcggtggcggccggagaggaaaagggctctggcgcatgacacagtggtctttcaccgtggcaggtgctccggtgatcaccgggcatgcaccgcatgattcaccatgacgggagccagtgctaaggcacgtggtgcgcaacggcgacagtacgatgacggtgagggttatccgagcgaccgacgaactgggggaaagtacggcatgcttagccgcaaccgagctcgagtggatcagacgccgagatctttactgggttgtgcttatc

SEQ ID NO: 200045 - DNA, 495 bp, Zea Mays
ctttggttaatgagagaaatgaagcatggtacgctcgtatgcgcaccaacaaaccttgccatcaaacaggttgcttcacgtttcttgaagctggtccaagagcactctggcgacacaaggtgcttgggagatgtcctattgattggcaacaaagagcgcatgtgtgttgatggtgacctcaaacaaatatatttatatgaccgtgtaaggaggctttttggctgctttgcaccattgaccggatggaaacatcacctatcttccctgtctgattttcttgagaatggctactcacagtacctccaacatctacaagacagtcaggaaggtgatacgccttcctttttctcttacgccagaaaaagatttgccgttatttatatggagctcagaagatgtttcaatgatttgttgttacatgtcccaaaatccagtattctggaagtgaattacaacagtatccttttacttcttgaaatgcttgaagagttcaac

SEQ ID NO: 200046 - DNA, 303 bp, Zea Mays
ggtcctgcggctcagctgcatggccaggtacgagagctaccccttctacaacaccaagtccttggcccggcgatcgctggcgtcggcgatgatcgattacttccccttaaatgtatcatcatcctttcctgcgagtgtggggggtgtacaacccacaccagcgcctcctggcggtcgtaacccatcgccttcaccgcctgcacaagcacgagcatcacctgcaccagcagcaccgttgaacatctccgggcctgcaactgcgactccgagagctgcacaacccaccccagcgccccctggcgg

SEQ ID NO: 200047 - DNA, 755 bp, Zea Mays
cagaggttgagcggagaatgaaggtttgtgctttttgatgacttctagtaacactccatgggtcctattagcacagtttcttgaaaaaaggtttcactatactagtaagaacaacgaggttataaactacagttaaggtaactgagactaaagtttcagaaattttagttttatcagcaccttatattgttgcagcacaaatcacacgtccatagcaaatcgtgttatagaaaatttccacattcagttagacctagaattcttgcagtgcatgaaaactcgaacaaacttcattacggtgtatttattctataactaaacagtgtaaatatctatgaattgatgagtttgatgtctgtcatgaacaattttgtttatttgaagtttatgacagtatgttagtttttctgtgtgagcggctgtcattttggtaagcattttatgcccccactttttcggacttgtgcaccagttgttcatattcgttgtaactactttcaggaagccaatgctcaatcattccatcaaacagcgggagactttgtcatgccagtagcccctgcccagaatttcgtttcgacttcagttgcatcattagccccacctcttggcatgatgccatctccatttagccagccagttgctccaccaggtttttcagattcactgcaaggttctccagctagagaagagggtgaagttccagagtctgagttggatccggacacaaggagaaggcttcttatattacagca

SEQ ID NO: 200048 - DNA, 524 bp, Zea Mays
ctcctctgagcaccccaggccctgtgactcatgcacgtcgtgcattgctcacaatctcggcaagagcaggagcctgatggagattgggccggttggcaacatcgacatggagggcattgtggacgtcctcgataatgtgatgctttcacctgcaccatcacactacagggtgtttatatttgatgactgtgatactctgccagctgacacttggagtgctatctcaaaagttgtggaccgggcaccccgtcgagttgtgtttatccttgtcagtccaaaccttgaacttcctcacatcatcctgtcgagatgccagaagttctttttcccaaagctgagggagtccgacattgtcaatacattgcagtggatttgcaccagcgagagtctagatgttgataaagatgcaatgaagctaattgcatctcgttccgatggatctttgagggatgccgagatgactcttgatcaactcagtttgcttggacaaaggatttccttgtctcttgtccaagaattggtaa

SEQ ID NO: 200049 - DNA, 391 bp, Zea Mays
tatcggccaattgatcatccgtgccaatcgaatatatagtgatatctccctttccaacatgatctctcaagaagtgatgtcgtatatcaatatgctttgttcttgagtgttggaccggatttgtagccaattttaccgcactctcattatcacacatgagaggcatattcttaaaaatgatcccataatccaatagagtttgtttcatccataataattgagcacaacaattaccgaccgataaatattccgcctcggcggtacagagagcaacagaattttgctttttagaaaaccatgaaacaagagacctcccaagaaattgacaacaaccggaggtgctcttcctatcaactttgcaacccgcataatccgaatccgaatatccaat

SEQ ID NO: 200050 - DNA, 285 bp, Zea Mays
cgcaaccattgggtccaaacctggcatttcttcatatgaccaagcgaacacatccctgttagcagaaagaaatttatgatactctttcttactctttatagacaaatgttcgctaataaagattggtcgagggtcatcaggtgtaccaatattaatttcctccaactcatcaatagttgattggtttccatcttccatttggggagatgctgttgtagcgtcaattggctcgatagaggtcatatgaacctcataaccaagcccatattttgtttcctttaaggc

SEQ ID NO: 200051 - DNA, 719 bp, Zea Mays
cagggcttacctgattcaacacatgttgtaagtagcaactgacagttttccagttaaacagaacacgctatatattatgtttagtgagcctgtattctatttggttgaccgttgttcagaccagaacatttcaaaactcaatgcaggattcacttccaatcccagagggtggaatggagaaagggaagagcatagttgacacatcagatgtcaaagcaatgtctgaagtagagcacttgttaatgcgaaagacatttactaagtatgtagctgcataattactattcttcaatttattgtgtttgatttgctatattttttcttgaaatgaatttcgtaaattctcaattcataactagcattcaccgtcacccctggtattatctggttctgtgatgtcccacctcttccagtctaaaacataattcaaaagaggtttccttttgttgtactgctgcacgtggtgtgttcttcacctttcctttgtttgtgcttgtgtgttgctttcacaatgtattctttttcaatgctactgaagctgttcatgccgagcattacatcctttgcagggttgagtttgatcgtcttacagacttattgcgtgcaagaaccattgagtctgatccacctaaaccaattgtttctcgtgaggaaaagaatgaagaaagtatcaaagttgatggaattagaggctcagcgttacgtcatatggacctaga

SEQ ID NO: 200052 - DNA, 290 bp, Zea Mays
tggaggtcgtcagagagagtgttgtagagccaggagcggacggcgcagggcgagtccgggacaggaaggccccggaggacgtggtcctactaagagtacttgccgagggtgagtaggaactgttcgcgccagcgagggaaagtaccggcgccgagttcgagggtagaggggcggcggtgcctgggtggtagacctccagggtagcggaagaggaccaggggggtagcgttgagggcagcacaccagagggaagcaaggtggcgcctagggctgcgtgccgagcagggaac

SEQ ID NO: 200053 - DNA, 310 bp, Zea Mays
caaactttgcatgccattcatgtggcgttctcccatagccagaattgctagggctcggtgtccgaccactatccggtgcggcggtgcctccgatcaggtcatagggcaccagccaccgcgtacatccactcctccattcctcaacggaagtttctagaagaggtgacaacgaacctgctcttatgttgtcgtaaaggtcatcggcacccaactgcctacgacatcgttgttgctgctcctgcatgcacaagagtcgggccgatggcctctacctccgatctgtgccctctcctcttgccacaaagctaac

SEQ ID NO: 200054 - DNA, 321 bp, Zea Mays
acagatcctactcttggagccaaccgagacccaacggcgccattgtagaccaggaaaagctcgcagcatccatctggcggtctgcccgtttagacgattattgcttattggagcaggagcgttcgatgatggagagcgagcagcagggcacggcatgcagacctctctccttccccgctgctgcagcagcagcaatgcacaagggaaacagaggaggggaacaggcaggaaaaaaggtgacagacaaacagaggcgcaatcatggccaccccgcacggcgattcccacccacaggaacggaacaagcgcaagcgtccacgg

SEQ ID NO: 200055 - DNA, 513 bp, Zea Mays
cacaaagcgacatagtcgacaacgatgtagggacaacgacgaggatgacgacagacggtggcggggcaaacccaatcacaaattgggaagaataaaaggactcacaacagcaacagatttgagtcgagggtgatggagcctgtgggcccgatcgggtctatccacaactatcaccacaatggcgcacgtaggggagacatggatgtcgtggcccccataatcatcaccaccacgtcatgcaggagagacaaggcatgatccaaccggaaggagagaccaagcagccactaggacgatggagaaaccagtgagtccttgatccgacgtgtcaacgacgatggatgcgatagatcaaaagggttggccgcacatcctaactacgagagcgcaacccccagcagagatcgatctccctaggagcggcgcggtggcaagagcggaaggggaagcctagatcgtaacctaaactcgtgataccatgatggagaataaaactggtgtaattggatggat

SEQ ID NO: 200056 - DNA, 431 bp, Zea Mays
aaagccctacattattatcatactggttaacactaattacccacgaaaaatgcccagaaactgctaatactactgctgttcacccacctgaaaatctgtttttttacagcaacataaccggattcaaacaacgatatctcctaaattataactccgaattgagcgcataagtacccgttggaaaggtatgacaaagctctacatgattcacccactgatccccactaattacccacgaaaaattcccagaaatccctagaactactgctgttcgcccacccacaaaatttcaggacagcacctctaccgattcggataggtaaacatataatcaattggattacaacacaattaaacaagatacaatctcaaaatcaccttgaatcatccccctttcctcccttcttccctccaccaaaatccaattggat

SEQ ID NO: 200057 - DNA, 317 bp, Zea Mays
cggtggtgtaccagactgtctagtgtcatgcctgaaaaggaaaccgcacattcagatcgtcgggcgaccattggcgaccgggattctagtggtgcaccggactgtttggtgagctcacagacagggaagtttttcaacttccctgtggagaaggcaaggctcccttagcccttggggctattaaagaggtccttgggtgtctctaccaggacaccaagcatccctagaacacactataactccgagactccatgaacaagttgtttgaagtgtttgagagatttgagcgtgtttctgagctgcaactccatcgtttt

SEQ ID NO: 200058 - DNA, 603 bp, Zea Mays
cagtccttcttccctgcggggatcgggtcgcgctgaccggctcggccgtgatccccggaaacgcgcttacttgcttggacttcggtcgaagcctttcgcgcgcttaaagctgactggtggtccattcggtcagctcctccccacctcaccacgccgcaggaactgggtcgcccgccggagagatcggatctccccaacaacctccggccgcaaatcgtgctgagctaaccgtctccacgcgagccgccctgctacgtataagtcagttccccatacctttggaccgatccaaccaagccaccgaatcgctggatttcgtcgtggggggaagctcggtggaggtgtgtgcgccgcctcggtgaattcgcattggcgcccgcgtcgggttccttggacggggcagggagcttcgtttcgtcttcctgtggctgttgatcgccttcgagggagaaggggaccactcgcttggtggtaattcctcaccggaatttcatcgccgtcacataatcgcactgctccgtgagcagtcgactctactgctcggcgtccggtatgaacgcagcctttgcattctccgttaccctctcttgatttgtactcgct

SEQ ID NO: 200059 - DNA, 611 bp, Zea Mays
acaggaatggcttgcctcagaatggccaattcctgctacatggcttgcatcgcggctaacattgccgccgaactcatagaatccccactaggatcttgcgggctgccacgagcccttcgaggtggcataactgcagccacaggagtaagtaaataaataaataaaattggcataacaccacttccaataatatcaaactagcactgacaattcataatataacaatagtaaagcaagcaacccatcctatatgtgcagtgtgtcaatttatcattatttcttcgctaggacctacagcctatccctctgataccaactgtaacaccccattgacccaaacacaatggatgtcatcaaaacactttccccaaatggttatgtataataaaagatgaagatagaaaggaaaaattcgacagcacctcccttgaaagttgcataacgaggaaaccacaatgtttatacatgatgcaaaagaaaagtaatccacagtgtataatcatgatgcaagagaaaaaataaacattcaagacaaaattaattcagctaaccaaaaatacgaccaccataaagactagaacataatagaccactggcacacactatttcaa

SEQ ID NO: 200060 - DNA, 419 bp, Zea Mays
aagtatccaaaatcttgatcgggtactccgtgtaagtcaaatcaccctgaacactgagctcttccatcggtaactgttcctcagggacacagagacacttcttcagttgagatacgtggaacacattatgcacattcgatagattatcatgtagctcgagttggtaggccatctctccaactcgcctaaaaactatgaatggtccaataaagcgaggggacaattttcccttgactctaaatctcctcattccacgaagtggtgacatcttgaggtacacatgatcaccttcctcaaattccagtggtctccttctgttatcagcatagctcttttgcatggtctgagctaccctcaagttctccctgattgtacagacttgttcttctgcctcttgaataagtttaggtccaaagaac

SEQ ID NO: 200061 - DNA, 680 bp, Zea Mays
aggaggtgtcgagggggtacacagtgtcactgccacgccagtagataaatagagatgtgtctgacttagcctcaaccaagccaagttagagaagataggtgacaaaccggctgtgccaagcgcgaggggcttgcttcagaccattgagggacttgttgagcttgtagatcatgccagagtgagtagcttcaacaaagtcggtagtagacaatttcagtgagagttccatggacaaaggcattcttgacatctagctgatgtgctggtcaagaacgggagatggctaatgtgagaatgacacggataattgtgggccttacgacatgattgaacgtcttatcatagtcaaccccaggacgttgcatggataattgtgggccttgtaccggtctagagaaccatccgtcttccgatatgtcctgacccacttgctagtcatcacattgctgcctgggggacgtgacaccaaatccgaggtgtgattggcaagaagggcctaatactcattctccatagtgtaatgccagtgaggatcgacaagggcgctatggacaggagacgacacgagagatcgacgatgaggtcacggagaggatgggacgatcaatagggcgaaggaccccaacagcctgtcgagtcaacattgggtcgatatggtgagggccacagtgaataaagag

SEQ ID NO: 200062 - DNA, 361 bp, Zea Mays
cgactgcataacgttgtgatacatgatagcgtaaaccatgcaaacgtttaaaatctaccaccggatttgagataaggcaatacgttatcttcgtgcgcgtaaataaaggcgcagttacggcagaaaactaatacaactttacagccgcgtccacgttcgctcgtccatctgaaatattggcggcggttagcggcggcggaagtgagaggtccggccggcgatgggcggcgagaagatgtccaccaccggcgctggcgatgacatcctgcctgtaacatctgtgcataagccaacaggtacgtctgtttcaatggacatgcatcctgtagcgtctgcaatcgccccatacacagagggtgtc

SEQ ID NO: 200063 - DNA, 289 bp, Zea Mays
tgccactggggataatctctggtgggaggaagacgtagcgtacgccgttggatttagtacaggtggtctagattagatcatagataccccgctgcgtgattcaatctagggcgctggatttgattgggatggttccgatcggatcgcgtttcattaaatcctaaccgcaggcctagctacgtatgtccctgattaaaacatagggtacctgttcggggcggttgatcctggacgttggctttagatcgtgtggcctagatcgctccataccgcttgagtgtgtgactct

SEQ ID NO: 200064 - DNA, 348 bp, Zea Mays
ggaaaaagaagaggctgaaaagagttttcgatgctattggattcgtctatcctgactatcgctacccgttacggggtcagaaaagaaaaggtacagtttctgtgaaggaagttgcttcggccgctcctaatcagccaacgccgaagagaaaaaaggtgaaggttcttacccatcggccacgttacattgagtcggccatagtgcccgagtttgtcggcgaggcttcttcggctactgaagccaaaaaacctatacccgcgcagaaaactgaagagctgactgcaacaccgaaggctgaaagaattgaagagccgaaagctaaagggacaaaaatatcagaaattttaa

SEQ ID NO: 200065 - DNA, 297 bp, Zea Mays
cctctccactagtcattcctctgaaaaatctccagcccctgcctctccttctccctgctcgtttctccctcagctcccatggctctctttcctctgttaaaataatccttgtgcttttagctggtgtttgttttatttctgttagctgaagtcagtcgcacggtctgttgttggctgtgcgtgtagtgggctcggacgtgcgcgttttgttcgcatggagagcgcgtactgcgccatgtatccaccaggcagttgggatggcagctgcccatgatggttatggggcgtcaggcaggg

SEQ ID NO: 200066 - DNA, 877 bp, Zea Mays
tatccactttatttcatcaccatgtatttacgctaacatcttctcaagatgggtcaaaaaaatatttttaatatttatcttgttacaaattgacacattttctttaggacttagaccttttatgagataatcagctagttggctatgagacttgatggaatagcctcacacttccactatctagcttctccttaatgaagaacctatcaacctcactatactttgtgtgaccaagtcgaataggacttgttacaattttcatagctataatattgtcattatgaacggtcagagtctcattcctcagcacctgcagctcatttagcaagccttttaaccacatcaactcactcaagatcaatatcattgtcctatactcagcttctgaagtagattgagccaccatcacatgcttcttgtttttccatggtacgagattccctcctacaaatacacaatattcaaatctagaccttctatcatcactgctacttaccaaatttgcatcacaatattctttatgaaccgtaaacctttcataagggtttccttcaagtacctcaggattctatatacatctccatatgttctgttcttggatcatggatatactttctcaccacactcataacataggagatatcaaacatggaatgatataggaatatcagtcgctcagccaatctttgatatgtttctatattgactatttcaccttactagacacaagttttgtgatttttatcaacaagggaactacatggatgactcctaagcattcttgtttctaccaatagatcgaggacatatatcctttgagataaaacaatctcttttgatgaccatggaatctcaactccaaggaactatcaaagag

SEQ ID NO: 200067 - DNA, 281 bp, Zea Mays
tgcaggtcatcctcagcctgggcaatcctcctagaacgtttgaagaagcagcgccggaacgggggagggggcagagaaatggcgcgaacagcctccggtgggggttggggtagcacctcgggagggacgctggtgtccacaacaccagccgcaccagtgggtcttcgccgtctatgcccccgacgagtacgcctgtgtccgccgccgccagtgccaccactagagcatgtgatgagctggtatccccagcaagttgcagacattataaacacatcttcttt

SEQ ID NO: 200068 - DNA, 388 bp, Zea Mays
gctggtcgaagttttgaagatgtttgagatatatcttcatcaggttacccctgaagctcttattagagtgagagtttttatatgggccatgaggagccaaggactggagccagatgcaagatgcttctgcaatattcatgagttgtcttatcagacgaaggcaaccagaaaggaacagtatcataacaattttggttgttacagtttcgtgcctcgctctgaggcgagttaccctgttcccacgtttcggaagaagtggccgggttcttggatgaaggaatggttttacgtgaagaataacctgaactagagggaagatgagaaaggcgttatccaacgtcctatatggtcacacttcgacattagaaggccatccatcgcacttgga

SEQ ID NO: 200069 - DNA, 362 bp, Zea Mays
cagccaccggccaccactcccttccccatccgtcgtcggctcactccattgtaagtctttaattatggtatgaattagcggtagttttagggcattatagtgaattttctatgtttattaaaatacttctatatattgtgatggtggatatggatgccacttagatgtgacttgcatccatcgtgtcgtttgtatatgtgcgggtcagccatcgtgctgttagatttatttgcaggttttggaaacctccccgtacaggggaagtgctgccgatttttttgacatgcttgtttattttttcgagccgtaccgagccggtcacgagccaagccgagccgatgaggcacaagtatttcgtccaa

SEQ ID NO: 200070 - DNA, 674 bp, Zea Mays
aattactctgcatcatgaagatttttacacacaggaggaatttgtcgacggaataccacagaactggtggtgcgaagacaccagggacaaggaagccgttctcagaataaacataacgggcaacagctcaaccaaaaccaagacgcacaccatcaacgtccaacatcgctgcccaccaccatcggcgccaccgccggcgatgaaccaacaaccggtggctgccgcgccaccaagcaatgtccttgccagcgagggacactcatcaaagcgttcctcgaagaagagccagtccaagcaccgggaacagcagcaggattacccgcagtttgggacctcagaggtacacgacctgtgccgcatgcggtgcccttgagacctgtacagactactcttacattactacaaagaagtatggatactgaagttctgtctaggttctgtacatatgcttcactcgatcagctgccactctaacgtagcccaagcaaagagtctagagtcctgggataacagtgttaacaacttgttgttttatttttgttccttattaaggagtgttcgctagatagttgaagccagggatatttgaacaatacttggtgtaatatgttccatagaattaccctaggtttgttctctcttcacgcagcagttctaatgatcttgtacttcac

SEQ ID NO: 200071 - DNA, 299 bp, Zea Mays
gcaaaaactacacatacccacacacaacaaaccacagaaaaataataaccttcacctgctctctcgcccggtcggatcgctccctgacagcctcccgaccatgcgcccccacatcctatcaaaaagtgcccccgctgactgcttcacaatagggtcttcggccttgaagatctcgcgttcaaagctcttgtccgatcggtcgaagacctcgtagtgtctgcagccctcgcgagacagcgcattcatggctccctcgcaggtgacgagggaggcaaaggacatgaaaccttccacgaggg

SEQ ID NO: 200072 - DNA, 410 bp, Zea Mays
gttttaggtcaatggatacaaaggcgcatttaacaatttttgaaacagaggacataagaaacaagataagttatgcacaaaagaacttaccgtggaagtggttttggcatgcttcttgcgtaggttgtactgaacaggtgcatttctctcgtcacgcgcaggtttgtccggggaacaagaatcagtgaatgaatgtgccagattgagcaaacttatgcaggaactatgccgaaaaagaagagtgatttaatacattaaaatggaggcacgagggcagatagcaacagtaaaatggaggaactaagcagttcacctagatctggtgtctggcgcgcggtgtgcagagtcgacagccgagcccaccacctacttcactttggctaggacgacggagggagggcggatccagt

SEQ ID NO: 200073 - DNA, 320 bp, Zea Mays
cttcagatagaccaaaccaccttcactggacccagcagcagtttcctttggcatgtcccacccacttgtgagtggccatactctgtaagcaatatgctcctagactaagtctgtggtgcctatgtaagtgcacactgtgttaaaagcagcctagcatgcttgtatgtcgttcccaagggcagtggatggcctcctgatgccgaagcaagaccagatagggcgttggataatccccttaatatgttccctttcaaccaagtcgttttttcacatagaaccactcttgcatccaggcccctgaccatatcttctaaaatgtc

SEQ ID NO: 200074 - DNA, 289 bp, Zea Mays
agtgtctaaagtgactagcagagaaggcctccgcgatagttgcaatgtgtagaagaacaacgaggaagcatgtgtcaatgcaccaatggttgtcggtgtggatgaagtagacgaggacagaggacgacactggcaacgagattgtgatggacgaagtcaaagaagtagatggttgacacatctagggacccagagtggcagtggtgagatctgcattgcgcaaggagtcatggtggtgctagagtgttgcaacagtggtgcttaaagaagatgacgaagagcatgaacg

SEQ ID NO: 200075 - DNA, 276 bp, Zea Mays
tacttattaaggctgtaaaggtagcctgccttttctcgttctgccattctacgatctcaaccattcgttctacaattctataatcccagccgtccgatcctacgtttcagtctagctccccgatcccgcacaggcgcacaccgatcctgctcctatcgcgccccaaaaccctctcgtatggaaaccgtcgcccccgacctcccatctcctccccgaaaccctctccttgccctcaacgccgtccctcctgcaatcccgcccccgcccgcgccgtcg

SEQ ID NO: 200076 - DNA, 420 bp, Zea Mays
gagagaaccaaggacaacaatatagtccattgaaccaaagggatacactgtttagataaaacatcgtcatgatccttagagagagagagagtatgagaatgattagaaatgcgagatttaggcagatcatcatccgatacttaagaacgggttatagcagataaccagataacggggcagaatcattaaggggtccagagatttggatgataaagccgcaacatgattcacaaggaaaagatcactagatccatgcgaaaggagaggtaggcaacaagatcagctggatgatcaacaggaatgctatgaagttttaggggcaaggatttatggaaagaaacattgccttgatagggtttgcgcaactagacaccaacaataaatttttttttgacacaacaagtgcacaaggaagtttta

SEQ ID NO: 200077 - DNA, 473 bp, Zea Mays
caacaatatcattcgttccttactctttcaggcttcccttcctgctcaatattgggttgaaggtctgcacacaaccacctatcttttgaatcgccttcctaccaaaactatacaagccatctgtccttatgttgctctctttggcacaattccatcatgtgatcatcttcgggtttttggttgtgcctgctaccctaatatcactgctactgcaccgcacaaactcgctccccgctctaccaagtgtgtcttccttggttattcttccaaccacaaaggctatcgatgtcttgatctctccacaaatcgtatcatcatttctcgacatgtcacctttgatgaggcagatttccccttctctgtctcgccccatctaactaacaacttgaattttttggatcctgagagtgcgcacttgtccccttcaactgggactttgccctcttctgcaggtaccatggcgtcccccttgg

SEQ ID NO: 200078 - DNA, 297 bp, Zea Mays
gtgccagcgacagaaaagataaaagaaccagagacggaagaagcgaaaacttcagctgagggagtgaaggcatcagaaattttaaatccttcagaagaaattggagcatcagaaattaagaaggggccgacagtaaccccaaaaaggaaaagaatggttaatgtgttagatgttttggaaagaattaaacttccaagcacaactccaaagaaaactgctgagacttctgaggcacttgctgaagtgtctgttgctgaagctccaaagcaacaagctggagttgaatctgggccttca

SEQ ID NO: 200079 - DNA, 351 bp, Zea Mays
gaaagagttccgtggtggtcattgcctcttggcttcgcctaaggttacccgtcccaaggagccgggtggtcttgggattagtgagctaaagaacctatgttgggctctgagagctcgttggccatggctgcagaaaacagaccccagtaggccttggacggacttccccactcgtgtatgtaaggtggttaaaaatctgatcgctgcagccattattactaagctcggtgatggagccaataccctcttctggaaggatagatggttggatgggaaatgtattaaggacatagctcctgcagtgtttgatttggtgcccccgcgtcttgccaacagacggttggtcaaaga

SEQ ID NO: 200080 - DNA, 442 bp, Zea Mays
ggtggacagaatagagtgactagtgattcattggcttcgcaacgaagggacgaagagctgtgctcggttgatttggatgaagggggaagagagcgtggtgaatttataggcccaatgagccaccgcgacggccatggtgataaccatcaccggaccttgcttgccaccaacgacgacatcggcactgcccttttctaagagtttgccacgttccgccgcgacagtaatgccatcagatcggcgatggcatggatggacggagaagagtggcgctggtgaccaagcttggccggaaggatcagtggtcgcgtggcggccggaataattatcttccaccgcgacgatcttacccacttccagaatatcatcgcgaggagatgctcgccgaatgctcagcccgaccatggcgcaaatcacggcgcagatcagtaccggcggcgag

SEQ ID NO: 200081 - DNA, 278 bp, Zea Mays
ctacgaacctcagtaaagctccccgagctggggattgaactctacctcgctggagaccccggatcaacatcgtcgtacttcacccggccgccgttgcacgtagacagagctccacggtaagccattcgtcgattccttgcacctgtagcatccttagcatcccgtgaagctccctgtgccatttgattaagccctaccaccgtgatcaggccggcgcacgcggttagccctattccggccatcaccgtcgtcgacccgcctctcgacgtggccaggac

SEQ ID NO: 200082 - DNA, 374 bp, Zea Mays
ccaagacttccgggaattttgcaactccattggcacgaaggcagtgttcgcctccgttaaccacccgcaatccaacggagtagtcgagcacgccaacgacaagattttcagcgcaatcaagaaaaggctacttgatgacaaaaatggcaaatgggcagaccaactaaacgaagtcatatgggcattaaacataacataatccagagtgactgggttcacaccttttcgcttgatgtacggatccgaagcaatgacgtcgcaagagctaaagcacggatccccatgagcaagccccacagccacccctgacgtcgacgaacctacctctaaaaaatcattgacggagaccgtgtccttgctttagaggcattgag

SEQ ID NO: 200083 - DNA, 367 bp, Zea Mays
aataacgagcatgtccagttatcagtactatctggtcatcctagaatatttctctcacaatttgtggacctttcccctccgctggaagtctgacaacttcaccactctatctcacttcttcgcgtcgacggtgactcaattcagttgcaccattcgaggtgttcagtgcgataacgggtgggagtttgataactccacgtctcgtgccttcttcctctctcgcggcgtgcaactacggatgtcgtgtccttacacctcctgtcagcacgacaagggcgagtgcatgattcacaccatctccaacctcattcgcaccctactgttccaggcctcccttcctgctcgctactggattgagggtgtccac

SEQ ID NO: 200084 - DNA, 478 bp, Zea Mays
ttcagatgtaacagctctggtccgttgtaccccctgcgattcccggcttctgctctccttgcatctaccttatggcaccaatgacttggacatcccggtcatgtcgttttatctcatttagcgcagtcatctgcaatttcttgtaataaaaatactagtactcatccatgtcatgcttgtcaactcggacgccatgttcgtataccatttcctacctcttcctcccgcgccacatgtaactttcaattaattcactgcgatctctggacatcacccatcaccagtgtatctggccacaaatactaccttgttattttggatgactgctcccaatatttatggatatttcctttacgcctcaaatctgacaccctctccaccctaaccaatttctttgcctacgttcgtacgcagttcggtgtcactatccagagcatccagtgcgacaatggtcgcgaatttgacaaccttcaagccc

SEQ ID NO: 200085 - DNA, 388 bp, Zea Mays
ttatggattcatcttgccctaattagcgtatttatcccactctagaataacaaccatgagctaacccaaccaatagagtcttgatggattgcataatctattaacccccacctgaccaaccagattttgacctacatcatgtagtccatctcacccataactattctaaccatatttccccaactccgataatatgcactaacctcgaatcaatgagctcaagaccggaaaaggaaaagatcaaccccgtcaaggaaggagagaagtcaaactcgatctttggatgcactaccacccatcacggagttctttcccaccataaactttcttaccacatgctcttcttgccctaacctacccatattttataataaaatgactatacaaa

SEQ ID NO: 200086 - DNA, 372 bp, Zea Mays
ggagcgacgatctgtaggatcactggcccaggtagcatcagagtaagcgtgaagctgaagtggggaatttgagtcataaaataaacattgtgtttttgtcccccgtaaatatctaagcacacgaagtaagtgcccataatgaactgatgtaggagcagagacaaactgactcaagatctgaaccgcatgagcaatatctggcctggtgacagtaagataaactaagctgccaacaagatgtctatatcgagatggatcctccaaaggtgtcccatcagtcggacgaagagataagtgtagatccataggcgtggcaacaatgcgagtatcactaagaccagaacgatcaagaagatcttgtatgtacttggc

SEQ ID NO: 200087 - DNA, 309 bp, Zea Mays
aggggctacgccagtagagcttgtggaagagagtcttccagaaaagcccacatcacctgttcccaaagcaccttcccaaggtgacttgaactatattgttcgacatgcttcaggaaagcagctatcagcagagcaacttgtcgaaacgcaacattatgctaaagagctgaaatacccccgtgggtccttggtatatggaggaaatgatgaagatgacttcctttactgtctaccagacagtaaggagatcaatgtttgccatgaaatgatggacaacatggggtacccaaagcttgagcttggtctgtc

SEQ ID NO: 200088 - DNA, 302 bp, Zea Mays
ctatatcttatacttagaaaaccgatataaaggctcaaggttgtacatgcctaaagttactatagcggaagtagttgaacatcatcgcgtaccaacaacaacaacaatatatgcattcatcctccttaagtttattactgaacaccaatagtgtctctagggtatccactagtgtggggataaaatgatatgacatataggggctctacgttatccactagcatggggataaaatgatatgacgtcggtgagatagcactgtgtgtgacgagagaaacaacgaaatcaccttgaacaccgac

SEQ ID NO: 200089 - DNA, 316 bp, Zea Mays
aggaaatatcagagtttattgtcgagtaagacctttccatcctggaaaagaatttccctcgagcagtgttgctggaatagaagatagaaccatcacagttatggtaccatcaaaacatggaaaagatggaaagaagtcctttactttcaacagtgtctttgggcctctggccacacaaggttaaactcacaagttgctcaagtgaattatttgtttgaaattactcctttttttagttaagtaacaaagtctttcaattagtgcagcggatgtctttacagacatgcaacctttggtccgttctgttcttgatggc

SEQ ID NO: 200090 - DNA, 436 bp, Zea Mays
ctaaaaatggttcacaaggaggatttgttaaagatctgaattcaaggcaggatctatcgaaaaacctacctgctcaacgtattgggaaagatgtttccagtcctttgtttgcttggagtccggccgagtcgaggacagcttcaagtcaacaggaagggtcttgcttaagttcaacaactaacccaagctttctcgatgaacttcattcttctattgcttctgcaaagcctaagagctgcgctccagcaacccccattgaagacagaggttctagttcaccatcagatatgctaagtcatgaagaaagagttccaatctgcagtccacaatcagcccctttagcatctgcttctgatatgtgcaagatggaggagatcatgaatcagcaaagaacacttgtggtggatacatcgaatgcttcagttaaccagtctcc

SEQ ID NO: 200091 - DNA, 348 bp, Zea Mays
gcagcaacatgatccctggacagtgttgaatgaaacagcctagcataattactagcatctcggaaagaaatattttcatgctcatcacagaaacccaaatgcctgcatactttagcagcagcgtcagatcccaactcagggggaaactttgccaccctcctgctacgcctaggcttgaaattgctaggcatcatctttcttcgcttgacaatcagagcaggagggggcaacagctcatcagtcggctttgtaagaccatccttgaattcttgcaatggggtagacagcatcagctcctcaaccacaatagccttcttccttctagaatatactttgaaacaaggtggc

SEQ ID NO: 200092 - DNA, 436 bp, Zea Mays
aagctcaggccacactacctctccagcgacgcctacggcctacctcattgatggcctcccctgctccaacctcgccgccggcgccgcgaagtcccccgcgaatctccccggcgtctgcggcaagacgggagctggtgaacaagattacaagacccatcaattgcctcctccaaccaccgtgtgttcccaagagaaggcccaaggctcaacgtcctcgctccatgcctcgccgcagcaggactgcaggagggtggccggcgttggcccctgttccccgggaccagtggtgtctgaggcgcaaaagaaggtaatccggagtctgggttttcaagtggtaaatggacatattgatggggatacgcaggatcagtatagcaagctgttctgcaatcccattcctgatacacagctggctgtgttggcagcaattttcggt

SEQ ID NO: 200093 - DNA, 316 bp, Zea Mays
cgagagagggtcgccttgcctgaccccacgcttgcaatgaaaagttttccctcggactccattaagtaagaccgatgacgtgccagactgaaggatatttcgaatccagttaagccatttaggtccaaatcctctatgagacagcacctgaaggataagttcatgttcaatagtatcaaaggccttttcaaagtccagcttgagcacaatgatttctgttttggaaatatggcataaatgaatatattcataggcccaggccaagcaatcctggatggttcttccttttatgaagccatattgatttttgtgaacg

SEQ ID NO: 200094 - DNA, 364 bp, Zea Mays
cttcagcatgcgcaaagatgtttctcggagctcaggtgaagtcataacctcctcgggcccagcgcacgtctccatcaactcctcaacaaaaagcctagaggccttcgaccccatcttttcccctccgtaccttgcacatctattttcctttgtcaagtagctgcgaccacagcctttcgttttgaggtaccctcttcagaccgggttttcacctgttttcctcagtcatccccggcatcagcagagtccccctccgggtaaggaccatagggcaagctattcagtttaaaaacccggttcaacctgacattggaaccacggatatcccaactcctcaacatcccagtcttcggcacatattttc

SEQ ID NO: 200095 - DNA, 318 bp, Zea Mays
tggcgaagcatagtgttggtgagagttcgcgaagtggtaggcgccgtcggatggggttggagcgaactcgtcttcgtgtagatcggtataatcaacgcgacttgttgtcttcgtcgtttgggacgagtattggtgaggggacctacggaatttgtttgagggggaggaattgtggatgatgttgtttaactatcgggaggcgggcattatctcgaaggttgagccgatgtagaatgtgtgatgccctcacttgtcgtgcagtagtagagggcgcaattgtatttatttgtgtggtgggtctggtgacccttcgctgtg

SEQ ID NO: 200096 - DNA, 469 bp, Zea Mays
gtgggaccatcccgtcggcctccctccaacagatcgcctctgtcttctccgtgctcacctatgacgtgtggggtccgagtgtcagacccaccttcaccagaatcgcgcgcatggcgggcgccgtgaccgcgccgcgcgcgtgaatctcgctcgggtattccgtggccacctcccgactcatccgtgcggaagataaataccttctccttctcggccgctgcacatccctccatctcgctgctattcccgtgaaccgagagagtcgtgtaagagtgagggtgccgccgccacgattcgccaccgataggggaagtagggcgccaattgtgccagcgggagggtggtcgtgatccagcggtgctgtgtgagggtttaatcggtgggcgacctgctggtgctccgggaacttctcaccggcgcgctcttcaccgcgcaacaaccgtctcccgtggaccgccatcgattcgtc

SEQ ID NO: 200097 - DNA, 339 bp, Zea Mays
cgctctcaacccgatttcatagcccaccccttgttcatttccaacatcgggacgtgtccaactcccgccatcgccataacccgtgaaacatcgtaaactcgcaattagttgggaatcaagcaaaatgtgcactttccatgcagaatcacgctcacataggcaccccttgtcacgtcctgcctctgcacgtgatcataaaagatgatcataaaagatatttttttctcgactaacgctaagaatggctatcactagactagtctaaaacatgatcataaaagatatttttcggattatgtttggaaaaatcactctaaacgatagtcgagggttgcaaac

SEQ ID NO: 200098 - DNA, 315 bp, Zea Mays
ctgtgagtgtagcaaatggacagacgtatgatgacctttatcaggtgctagacacgaaggagggagagaaggacatgtttaggatggctaggacccaggagaggaagacaatggacatcaaccaaatcaaatgcatcaaggatgagacaaatcaacttctggtgaaggataatgagatcaaggacatatggcgagagtatttcgacaagttgtttaatggggagaatgaaggttctatccttgagttggacgactcatttgatgatagcaactgacactgtgtgaggagaattcaggaggtggagatcgtgaatg

SEQ ID NO: 200099 - DNA, 289 bp, Zea Mays
aagacagcaactcctcttggggataaggcgagcaaataggcagcccgttaacctctcatcatctgttttgtctagcgacagtatgcatattggaattcttgctgctgcagcccatgcagcagccaataacagccaattcacagtattctataacccaaggtaaatatcatcttctttaattttaatatattaagaagtaatgtactgaaagtttcaattagactgtttttatccctttcagggctagtccttcagaatttgttattccttttgccaagtaccagaaggc

SEQ ID NO: 200100 - DNA, 288 bp, Zea Mays
taaaacagaggggctcttttgtaaactagcttcggcgaagggatacggttgtattctgaccgttcgatctattccggatggtccagattaaatacgtgaaggggtacacaaagttctaatcctgaacctacaactccaatccaacggaccctgtccatccacaatcatgcccgtccactccttatccaatggctcagatcccttcaccaaaggagtatattcgcttttaatcacaaacgcccatcgcgagatggacggtagccgtaccctcttcaacctcacgcgcag

SEQ ID NO: 200101 - DNA, 363 bp, Zea Mays
atgcttcatctagcattgtgccattagatagcaaatcagtggtccagatcatagtttgaatcaccctccatttaacccccttgaacatagctcatgttcatccacatccagctcaaatctggaagtggcaaggtttcctgcgtctgtgtggagaattctgggaccggagggatcgggaggggtggagaggagggaacacgcgcgtggggacgacccatgggcagaggaagttgcgcgcagaggcgtcgtgaggtgggtggccacacggccgtggtccgtggattcggtggtatgggagagaagcgaagattttttagcgtcatcgaggggaggaaatcacacctgataaggtgcatagactag

SEQ ID NO: 200102 - DNA, 281 bp, Zea Mays
aaattctaggccacaaagctaagtagtacatgccatacttgtcaactctgatttcttggtgaaaattggaaaaagccacttttttctctgaatacacaggagagctacatatcattatattaagaagaaattagggaagggtaaagaccctattacatagaggacacacacaactgtcacctgatacaatcaaacactaccacgaccaacacactaaaagcctaaccaccgacctggagagaggagagagctttagcgtcggccatagaccagtacacaag

SEQ ID NO: 200103 - DNA, 302 bp, Zea Mays
cccttttatagtttaagggaggcacgtacaagggtgctgagccccgacatgcgagcctaggtgcataatggaaggaatacattatgtgagtaattaatgctaataacacctgagtaatcaccgggcgccatgatgaccgcagtccacacagtattgatgggcagttaccgtatgagtaatacaggagtaatggtgagtaactatgcggcccatgtatcgaggactaagcacgctgtcagtggaatggacaggcgtatgtcttatctgtcatgaaggcgcgcgtagcccagaggcatcacgcc

SEQ ID NO: 200104 - DNA, 332 bp, Zea Mays
cttgaaactaaaaaaaggtttctcttttgcactcgctaatgttgcaagggggtgtggaggaagtaaataatgatgtagcgccctcaatcaaagtcgactcctatcagaccagttgtgatgcataaagtattgagcttgcatcaagtggcaaagatttgacatgtgaatacatgatttttcttttgggggctctcgggaggtgtttgattctttttatgtgaatgtattaatatacagcctcctcagcttcctgtatggcttggcatttctgtggtccgtcgaagggctactgttggaaaatgggacacattccacagttgtctttttgctgc

SEQ ID NO: 200105 - DNA, 330 bp, Zea Mays
tgccatcttttgtcagatccaacgggacagaaagttaggccttgctcttgtgagagcttgctggcttgcgttggataaatttgttgcctcaaatggtcacatgactatgctggagttgtgtaaggtaaaacacacagcacacatgcattgttggaatgtgtggggcttgttaatgacctgattcgattcacagtttcaggcacatggtgatcggtatttgcgtgacttaactcaatatgcaattggagttcttcacatcataacacttatgccacagccacatgtccgcaaatcaatagtgcaggggacattaagcaacaatcgtgctgg

SEQ ID NO: 200106 - DNA, 663 bp, Zea Mays
ctcggagagtgaggtcattgtttcaagctgcaaagaagaaggtatgccattctgctgtcaacctgtatttttgtaaccgtagctccttcaaacttttctctgtgtctatggtttgtggatcagagatagttactttgccgagctttcagatactctttctttgactactctatatatttggaatagaggttatacgatttagattaagtcgatgagtaaattggtttctttccataagggtaaatgttgatctttttttatttgctgccattgcaaaagtaatagttccatccagaaaaaatatcttatttaggatgttactggtcatattttctactttgaccatgaatatgtacaaaaactgttaacccattttgttttgcaaggaaacaaaaatagttgatttggtaacatgaataattgtatttgtatcagtatatatgttatgataagttattctgaaatgcaatattttatgttttactgacttaataccatgaaaactaaaggtcaaagtaatatattttaacaatctttctctttacaggcgccatgcattgtcttcattgatgaaatagatgctgtgggttcaactagaaaacagtgggaagggcacacaaagaagacgttgcatcaacttcttgttgagatggacgggtttga

SEQ ID NO: 200107 - DNA, 337 bp, Zea Mays
ctcaacggaacccttctctgctggaaacagaagattcaaaatctagtagtattccatttggaggaaaaggcagggtattacgcaaatctttattaagtgatatctcaagggctgagcaaagacttgcacctgattgccagacagatggggaagcccagaaattgaccgttacttcatcgccaactcatcttcatgctgttattaaattggacccaaataatggtgctttcggtttcgcgtttagtacaaaaggtccagaagagttaatatatgttaatacatggaaagctggggatgaactgaattggatttacacttttcatagcagtggcaagca

SEQ ID NO: 200108 - DNA, 322 bp, Zea Mays
gacatccgtttaaactgtggatggttggtctaggccgactttgctagtactgtttgtgtgccgaacttgaatgttgatatcgttggcttggtgttggcctttgtggctttgtccatcttgttgggtccgcgtcccggcgttcataggctcgtgtcaaactcatggttgtctgtgggagcaatggggactgaagctccatgtctttgcgcaatggttcgcccagccctgcgatgaagagattcacatgctgcaatgtggaaagatcatcgcagcgacacaggagcaccgagaattgtcgtatgtagtcgtccaccaatctcgt

SEQ ID NO: 200109 - DNA, 304 bp, Zea Mays
tccctttagtagaggtgcttactcttatgttgcagttggagcatcagggcgagattatgatattcttggaaggccagttgacaattgcttattctttgcgggtgaagcaacatgcaaagagcatccagatactgttggtggtgccattttgagtggtttgcgagaagctgttcgcatcgttgacttactgaacactggcagtgactatattgccgaggtagaaacgctacagacataccaaatgcagacagacagtgaaagaaatgaagtcaaggacatgtcaaatagacttgaagcatgtgaa

SEQ ID NO: 200110 - DNA, 644 bp, Zea Mays
ggacttgtttcttaaaaaggaaactactctgtcagaccaaccaagcatgaccgaacagtttaaaatcttacttccggagctacatttcttctttccaagcatgggtaaattgtttaatgcatttggggagagcatcttggaggctgttgggctacagttaaaatgtctgcccaatagtgcaataccagacgtcctttgttggttttctgagttgtgcttatggccttatctcgaacacattaaggagcatcttgtagttgcaaacggagttagttatataagaggaagtattgctgctaatgcaaaatcagttgtcttctacctacttgagtctattgttactgagcacttggaggctgttattcctgaaatgcccaggatagtgcacattcttgtgtctctctgtagagcttcttatactgatgtggccttcctaaaatctgtgctatgtctaatcaagccactcatctcctacttcttaaggaagggaactaatgaaacaaaagtactgggccatataaaggagggcagcaattttgagttgctttgttttgaagaattgtttgaaattgttcgctgtggtaaagattcggtggatacaactgaagataatattcaggcaccgttggtcatcttcattctgg

SEQ ID NO: 200111 - DNA, 343 bp, Zea Mays
tgccatgactaagcttaataatgcacgtgtgtcatgttttgtatgtttcttgctgtagttgattgtgatataggagtctatcgacattgatgcataggtcctctattaaacttgtgttgggatgcttttgtgtgattcatataagaactaacgaaaagtcatagcaattaaataaatgcttgcacttgtgatgtcgtgttgcgttggttagttataggtattaatcgtcgtccttccggtgggttgatgtggtacgctcgatgaagtgtagatatctaattctaacacgtggttgtttgcggtgtcttacaatttagtgttgggtcgctaccatgtatttgta

SEQ ID NO: 200112 - DNA, 337 bp, Zea Mays
ctagttaaccaccctctttgagaaatacccttgtgcgttggtcttctgcacgtactcatgcatatggctcccagctactggcagtaaaaaaacatgtaaaatgttgtttagcataacgaaagcctaaaaactacagtttgttgggcattagtttaattgttttcttcgttcaaacatggctcatctctctgttgccaccgacccaccgttcacgatttgttataagcaaattgatgcaatttcattttaatttggatattattaacatcaaattgaatcgtacatcagctaggactaatcgcttgtgtcgccatgcatagaccagataacgaacaca

SEQ ID NO: 200113 - DNA, 794 bp, Zea Mays
caggacacccattctcacaatgtacccattttaatgcttttataaggtggagtctactatccgaggatgaggcctttcacattcttaacaccgctgaggcctcaagcatcgacgacataaaacataattctggttattggggacaaaatggcaatccttgtgcctgggtctctctgagtgcatttgctgctggcagatcaacaatagttgcaacatttgctgttgattcagattcagatattgagacatttggtggacccatttctctggaggcaacttcaaaaatttctgcatattatcctcttgtagttctccaaggggggaatggaaatcattttggtgggtactggtttgacttatctggaattcatagtaggattaagaacatggataacaactctcccaaggagctgtacttagttcctggatcaacaatggatgtccttatcttcggaggacctgagcgttgggaccaagttattgattttgttgaaacagttgatgttattgatccatccaaaaatcatattattagttctaccgctgtgaagaaactatctagtggactatatcgagtatcttgcctaagcaaagtgagctatgtaagtacttcaaatggatctttgcatttttgtttatgaactgcgtattgcaatatattctggtgaattgattcactgaaatatatttaatttaattcactttttttttagaaattgctgttttcacgtgggaacatggttggtaaagatcatcctgtgcctgcaatttccaaatcagagttcactgttatt

SEQ ID NO: 200114 - DNA, 455 bp, Zea Mays
caatgaatcgttcgggggcgaataggctacgttcccatggaacatcaacagtggcatctcctctgctctctaccagtgacggtgagacgcactctccttcctagatccctcggcgcacgtgtacaccatggcatgtaatgggcgagggtgcgacaacgttctattttatagggcggggtacgaggccgagatggatcgaccgatgaacgcgcagttgttacatggttgtcactggtttgttacgctggcggggatagagatgacaagatggtcccacgtgactgtggcggatgttgagtccgagcgcgcatgaaaggggatgagagaatgagctgcaggcccaagctgtcggtagagctgatgtttattatccttattaaaaggtattttaatttaagttttcctgtccaacaatatctcgaattttattatcaaaaaggtatatcttaataatt

SEQ ID NO: 200115 - DNA, 447 bp, Zea Mays
cgaccatctccataagctccatgtcactcaaagcatcgcaatagcctttgctcaaggcttccaaattgattcccctctcataatgggatatggtgacgaccaaggtttggttgacgccccgacggaaggcttccacctctggttcatgaatatggtccgcgaaatgctcgaagcgggagatcaggtgtgggggatagatatcctaaaagtcgcctagaggggggaatatgtaaaacctaaaatttacaaactttaaacacaaacttcaccccaggttagcactagaaccagttcatgaacatggtccgcgaaatgctcgaagcgggagatcaggtgtgggggatagatatcctaaaagtcgcctagaggggggaatatgtaaaacctaaaatttacaaactttaaacacaaacttcaccccaggttagcactagaacgagtataatg

SEQ ID NO: 200116 - DNA, 418 bp, Zea Mays
ttactctgtcaggctgactgaataaggatccattggtacagtgcactgaaaatatcccaatccactgaacttcaccaccgacgagctgtgcgctcggattcgcgcctgccacggtgattcgtgcctagtgcagttggataacgtagaagggcaagaaatatcgcaccgtggatgaactccggccactattctactccggtcgtcgtacccgcctgagtcacggccgcttcggatagactcaccagagttagccacctcgcgaccttgcgccacgtgcctgggtgctttaaccacgccaccgtgagtcaccttagcccatccggtgatcgccggagagcttgccacggtaaacgccaccaattgcttgcgccagtgcacccccttctctccgaccgccaccacgacatctcaaattcac

SEQ ID NO: 200117 - DNA, 676 bp, Zea Mays
tagtttacaatcacatgaacttcatacatatacaacgacacacataaagtgggaaaaactttcgagcacccttttcttgaagttccatatgaaatttttttagtgaatgtaccacaaacatgctaactactctcactttgagcagattttgcttcaataaatgcactgaaacatagttaattaacacaatctagtaacaactcttaagagtatacacatttcattatactatcctaaggttttattttctgctgtgctaatccactcatctacttgggattgaataagtcgtttggatggtttataatctaggacaggataaagctgatcgggtgtcagtacgagcacttattgctttatttcttatcctttcatgggttgtgatcattgtccaatgcttcacgggttctgatatattgaggtggcgatcattttatgcaacacatgatatggcatggaaagctcattacagggaagtgttcgaccatggaatccgagaagctttgtgctgcctaggacgtgcaaaatatctgtaggtggcagtccaatgattttacaccttggaactccaatattagtttagttatttgagctgataattatatttactaatttagaactgtattggaagaagatgaggtttattctgttgcaagactccttggtgatttggttg

SEQ ID NO: 200118 - DNA, 661 bp, Zea Mays
gtggtatccggtttaagcaaatctagttttagataatcgactacgtacgaggaccggttttgctggtttaagagtttggagaacctaaacgctaagtttgagtacgactgatgcattttaagtcacggtggtatcctctttggttgtggagccgttttatggtctatctggagggctcggaatgactggtgctttggtaatagaactctttatgatccatctaatgtgcttttcatgtgctgcttttggctggactcttgggcaattcgacagaaaaagaaggaaaaaaggaaggtggagcaaggaagcagactcatcagaaagatggcaagtgaagtgatgtgtcgtgccttcgtctggtgtccgatggatcaccgaattgctggaagatgatctccatatctcattgtgatgttggcgcttcgctgattgcgtgttcttaagtcttttgctccttctggagttatgcgtcttgctgggatacttgttttgcctccacacgagtgctatcttgtaataagtggctccttgactttgtcgtgtatgtctgtttgcgctttaggtcgtttctttctctatcgagcgcgctcggtattgtttaggacaccttgttgccttgatcattcaggccagtggtttcttgtaaggtgacttttgttcc

SEQ ID NO: 200119 - DNA, 308 bp, Zea Mays
gcaactcagaaaggagaaagtgttgaagctaaaagacaaagggaaggagggggtaaagaagacccaacataccgagaggaccgctttcgggtagtcaccttttttagagccatcaccgggggagcaggtacaaccggcgccactaggagggtcatccgtgacaccgtctctgcgataagggaggaaacttccatgggctccatccccatgcggtgcataggcgacgtagaggatgctagcaggaatggcgccactcgcgccgctcccccatcatcatgctcggttctgacggcctcgcgcgaatctct

SEQ ID NO: 200120 - DNA, 282 bp, Zea Mays
taagttcccgcgtaggttccgagggaaaccagtccctgacagggtaggtgtaatcctggggagggtagagataagcccacagcacagtaatggcgacaaatactacgacaactgatatccatatgcgtcttcttggacttgctcttgtgcgaggaactgcagtacccttcatgtcgctgaagcccagttttcacacctgataccaccacttcattccctttggctactcacattgatgtgcctcgccttcattgctttcctcttgactaaagcaaatgctac

SEQ ID NO: 200121 - DNA, 814 bp, Zea Mays
atctgatccctccccccgttgccctactcgctcgcagcaggaggacgaggagatgctcgtgccccgccaggaggcggtcgacaccgacgcagcgcagcccatggaaggtactggtacgctcttatctcattttgctgctttgcttcagtttgatttgtagcttggtttgacaatgtgccacattagaaacttagttctgtgtgctggcattatcctgattctccatacggacgcgtttcctggatattggcagtggtggcacagactgaggtggtgagcacggcggagagccagcctgtggaagatccgcagacatcacggttcacttggacaattgagaacttcaccaggttcagtgagaagaagcactatttagaggtttttgttgttggcggattcaaatggtgagctccttatccttccactgttctgcctgcagaaaccatggagttttttccctagcccctctgttctttagagtactcataacatctgttgaccttcatgcaggagtgtgctgattttccccaaggggaacaatgtggaccacttctcaatgtacttggatgttgctgactcaaccagccttccgtatggttggagccgctatgctcagtttagtcttgctgttgtaaaccaaatccagccagagtttacgatacgcaaaggtgtagtcttgctttatgctgtgttatccgcgtcttcatgccataaatgcgcacttgaatgcagagggaagaatgttaaactagaaaatattacatgccaaagcagcacatataaacacgggagtagaagtgtttgaagaatgaag

SEQ ID NO: 200122 - DNA, 351 bp, Zea Mays
atttaatgcgcgtctgctgggtgagttggccgaggccgagctcgggcaaggcggagatttctcctgaggtcgaggccttgatcggatgttgcctgtagccacgctcggagtggttgaaacaatggcagagtgggggaacagtgcctcgtattcgtgccctatgcatcgtcgtgggcggtaaaggtagattagaccttagtcgtgtcgtcctttgttgactttggcaccctcagcgggggcatgtgaacgtatggacgcacgttctggaatcggagtgtttggccgaggcgggtagcttccggcaggtgaatcggaaatatgcttctcgcttgaggttggcctcgggtgggt

SEQ ID NO: 200123 - DNA, 296 bp, Zea Mays
gccagagatgttgatgaagcgatctctttttgcttgttgatggtgtggtggcaatttcttgttgtctagcccttatcctcaccacaaaacaagcaaaacggattccttagaggtgcattaaacctcccatcgaagcttcaacctccccgtccctctctcggagctagtgggcggaacgcgctctgagagggttgttgctgaaaacttgcttattgttggcctgactgtccctaagactgggtcgtttttcttcactatgtattgggttgtgaatgcttcgaccatatttaggatgg

SEQ ID NO: 200124 - DNA, 334 bp, Zea Mays
atttcaagatgccttttttcatttgtttttcgttatatcttccaattcaaatcattaaagtgatttcatattataatatttgattttttatgtactacacgttctgatgcaaacaatcaaacactagatgtatatgtcctaaatataccaatgtaaataaccaaacaaaaattacgcataaggagcctggctcctcacgtacggaccatgctatcaccgtacagaaaccaatcacatgaacgatttcattcccaaactccactgttacaccactcaacattggacgatttcatcccaaattcaactccacggttacaccaccctctcgtccgac

SEQ ID NO: 200125 - DNA, 310 bp, Zea Mays
aaataaggcattttcagtggaacgctatatggtacaacatacatgactgtcataatgttgcattttaacctggacctctctccttttgatgttccattatttcagtttgtttgaaacttaaaaattctaatgtcaattgcggaattgcctgatatccattctcattttgtttctccctaatttgatctcagcgtgaagattggagactgcctcctctgactccagaaatgatcgagtatgcacgcactgatgctcactatctgttatacattgcaaattgtttggcatcagagctccatgcaaaagcctg

SEQ ID NO: 200126 - DNA, 439 bp, Zea Mays
accaggggtccacaacaagaccaccctcaccaagagcgtggccaacagctccatgtccataatatcgctaaccaatagcaaccaggcgaagcccccctcggcgccaggactaccctccacaacaaggtcacactggcggcgcaacaagaggcagaggccctcaatagcaaaggaagttttactgtgtctttcacggcgaggatgcagggcacccaaccagagattgcccagaagccaaggaaacaaaagaccgcatggctagagccatcctatcaaacaaccagagagccatcattcacaccccccaccttcattaacgaaacgaacacccataccacccccaacaccagcagaatttcaaccatgcttttccccagcaaccgcacctgcagcaccaagaaagattagcactgccaccccaccaccaccaaaacaagaa

SEQ ID NO: 200127 - DNA, 365 bp, Zea Mays
ttcagaactgcttccactagagtcttggttaatggagaaccgggtgatctcatatttcaccaacgggggctgcggcaaggggaccccctctcgccaatgttgtttattctagtcatggacgtgctgaacttccttatcaagagggcggcggatctaggtctcttactcccccttttaaggcggggtgctggacagagggtatcaatgtacgcggatgatgtggtgctcttcgtgcagccggtggcgagtgagttaaccttgacaaaagagttgctgcgggttttcggagaagcttcggggcttgtcaccaacattagcaaatgctccataacaccaattcggtgttcggatcaggtggtggagga

SEQ ID NO: 200128 - DNA, 847 bp, Zea Mays
attatctattcatctgtaaatcacgatatggttcattgatttctgaaagtttcatccgaaatcttattcactttaatagcagactgtatatggataccatggtatataggaagtatggccaacaaggttctccctgggaatttaatctacgtgatattatcagatcttgtgagatgatagcaggttccccaaatcctatgatggatgattcttttttaaatactgtttatctgcaaagaatgcgcacattggttgatcgccatgaagttgtcaagctttatgaggatgtctttaagaaaaagatcagcattcaccaaccaaaaatgctccatgttaatccacattgcttggttgttggaagtgcctctattagaagaaataacatccaatcatataaagtgcaaaacaatcaactcaacatatttccaggtgtccttaatagtcttgaagcagccatgcactgtatccagcaaggttggttgtgcattcttattggacaaaattcagctggtaaaacatcattaatccgcttgctggctcagctttctggaaatacgttgaatgagttaaatctgtcgtctgcaactgatgtgtccgaattgttgggatgctttgagcagtataacttctttaggcactacaaaactgttttatcagaagttgagcattatgttgatgtgtatttcagcctgagtattgatacgaaccagaagaattttgttgcagaaagaaggggtttgtttaccaaatggtttgaatttgtggctgcaaaagggcactcctcaattaagacttcgaaattaatgagtgggaatgcatctttgccttcattaagcttgcttgctga

SEQ ID NO: 200129 - DNA, 334 bp, Zea Mays
gaaatcttaagtgatcgaggggatgtatgtgcattttctggtgcacgcgggatttcagcaatcttggagaatgcggggtgcactcacatcgaagccatggcccatgccaaagctgccttctccacggacgtcacgaaggacccttcagctgaagcaaccttaatgggcggaaaattttataatgatgtgtgggagaatggtggccgagaaatggctcatgaaattatgaagaaaagtgaaaaagacatccatgaggcccgagccgaagcaaaacgagctgaagaagctgctataggtattgttttgcggcatctaacttcggcatttgattttg

SEQ ID NO: 200130 - DNA, 297 bp, Zea Mays
gcataattgtcactgcaaagggttatcgtgcaattacagccgtccgatctaccctagacggccacgattacaatctatctctaccgaactggtacgcgattgcagttgcccgatccaaattcaatggtccaaatttgaccacgcctcacccatcctagatccgcccactttccgatctacgacatagatttaaaatacgaaatagtaccctcctatctcatcacgaccgcacctaaccggatcaacggtccagcgtcctctaatccaatcgctacgtcggagccgatcagagccgca

SEQ ID NO: 200131 - DNA, 476 bp, Zea Mays
cctgaataatgcgctaagaacccccgaccactattcattgtctcactgataattacaccggggtccccccgacttctattccttctccaaacaaacccatggtcacgacgcgctcgccgtcgatcaccacgcggcgtggactggcccagaccggcgatggctgccctaaccagctatggggtgagcattaccgattccaggcgacctatgaacgagcttcactttggcttgcatacgcagagaatgttctacccacgcacacggcggaacccgcgttcccaatcaatcatgcccgaattggtcaaatgggtgtcacgataagcttcctgggtatgcagagctactaaaacaatacacgaagaacacagaaccataccggaatggtccaaccatggagcacgaagaactagcggttgccggtgactgagaaaggggaaaacgtcgcggtgacgaactcgagtgaaattgggagatga

SEQ ID NO: 200132 - DNA, 303 bp, Zea Mays
cgcgatgattcccgttgacatgtgggtcccggtggcagctccactcacccacctccgctccgtgcaccgcgtcgccgcatcgggcggatctaaaaaccccgcatgctcctgcgccgggagctagtcaactacctgggcgcgagggctataagctcgagcctcgtcatctctcgcctcagtccacggccgttcacaactctccaaagacacaaaccaccgccgccccggcctaggattggaattagccgtccgcggagggaagagcgtcgccgccgtcgatttcggcatacgccactgccgggc

SEQ ID NO: 200133 - DNA, 500 bp, Zea Mays
gtgataatgaatttccaggtcataatccttgatcagctccaaccatcttcactgacggaggttgagttctggttgagtgaagatatacctcagactcttttgatcggtgaaaatgtgacacttgttcccgattaggtaatgcctccatatctttaaggcgtgcactatggctgccaattccaaatcgtgggtggggtaattctgctcatgcggcttaagtaggcgtgatgcataagcaataactttttcattttgcatcagcacacaccctaagccttgcctcgaggtatcacagaagacgacaaaatcctgatggatatctggtaatgtcaaaacgggtgctgttgtgagtttctcctttatgatctgaaaacttccttcacattttggggtctacacaaatttatggtctttcttgagaagttctgtcataggtcttgctatgctggagaatcctttgatgaagcggcggtaataccctgccattcccaggaagcttc

SEQ ID NO: 200134 - DNA, 660 bp, Zea Mays
acctcagcggcggtgagggagtctccccgacctctgggaaacccggaatctaagtccgagtcgccgctactagtcgctcccgaaaccctagcctcggcggtgatggcagcggcggcagtgaggctggttaaggagcgcgagaggaagaatcaggtggtgccaccggcatctccgttaatggaggagcccgtgtggaaggaggaaaagcagcgtaagaaaaggaaacacgtgggcgccgcactggtggttccatcgccgccgactcctgatgcggcccaaaacttgcggatggaagccaagatgatggctgagggggcgacggtgaggaagaagcagaggcggctgaaggcggggcaggagcaatccggcgagccaccattttcaattgatgtccatccacaaggaggggaagaagctactgatgatggtggcgttggcgtcatggtcactcagtgtgtcaagaggagcaaaagcaagaactcccgggttttgaagacgcagcagacactgccccaaggttttttccctcccatggccaatcccaattccattgatcaggaccccaattattcctcaccttttggtgcattctttgcccaattcgcctacaaacctgctaatatcgctgatcgcccagcgaggctgcctcctcgaggccac

SEQ ID NO: 200135 - DNA, 291 bp, Zea Mays
catgcgtgcttaatcatgattaggtgctctcaattggtatctcatcattgcttaatcattctttgggtaacttatcatttgagatatcctccatgattaactcttgttgtgttcgtgaataaacctgcatcccgttgtgagttgtgctatatggttttatgattagcctgtgtgaaaatatgacatattgcttagttcatataatgatcctgttgtggcactatgtgttatgcctctaatacattctctcgagctatgaagtgcataaataatagggaactttcagctggt

SEQ ID NO: 200136 - DNA, 336 bp, Zea Mays
gccggcggtacagaggtagtagggggatagtgatattccttctccagctctgtctgctcttgttagccttcaagatttatccataacagattttgatcaggcccttgaggatgtcattcctgaagatatgctgttggaaccgactgttgatgatatgatgaatgtttgctctgacgctccagacgtgggattagaggtatcccgggcggtatctcgtgcatcgtcaactttggaaggcagtcttcggtgtcaagaggttggtcaggattgcctgactcccatggaggtgactgaggatccttcagcctcagaggtggccgttgcagaaaacccagc

SEQ ID NO: 200137 - DNA, 560 bp, Zea Mays
cgaggcccaaaaacccacgcaccgcgcgcgccgaccgaggtgtcggccagtcgtgaatggcctgcaccttggtcgggtccatggccacaccgtgggcggagatgacgtggcctaggtacgccaccgatggggacccaaagatgcacttggatcgcttgatgaagaggacatggcggagaagttcgtcgaggacgacgcggatgtggcgcaagtgatctgcccaggtcttgctataaatcaaaatgtcataaaaaaagacaagaacaaaccgacggaggaatggccggagcacgtcgttcatgagcgcctggaaggttgccggggcgttgcataatccgaacggcatcaccagaaactcgtagaagccgtagtgggtgcgaaacgccgtcttgtgcacgtcagccggccgcatccggacttggtgataaccggagcgaaggtccagcttcgtgaagaactgcgcaccatgcagctcgtcaaggagctcgtcgacgatggggatggggaaggcatctttgacggtgagggcattaagggcgcagtagtccacgcaaaaccgc

SEQ ID NO: 200138 - DNA, 282 bp, Zea Mays
tgtacacaggagacactgggttcgtcgtattcagttttgttctcacaaatgattagcttctgccgctggaggcatgtgttggtccgacacgaatggctattccgcttcttttcaatagaatcaatcatcatgcgcacacatggcacatcaatcatgcacaactgaaggcttggtgccagactgccggggggattaagataccatctctcgtgcaaatcatccaatccccttctgctctgctccaagcatagcattctttatgttgtgattgttcaatcctgc

SEQ ID NO: 200139 - DNA, 322 bp, Zea Mays
agcgttggtgagatgaggacagaaactgagttacttccacaatgttgggagcaggtattttacattttggtagatgttctggctttctttagaatataatctcacatttgataatctattcgtgtttagataaaccaccaatatgaggagcgcagattgcttgttgctcagtcgtgcggtgaacttgccgtttatgtccgtccagagatacgagattccctcattttatccattgtgcaacaacttgtcgaagatgctgcaacagttgtaagggaagctgcaacacataacctggcattgcttcttcctatgtttccaaatc

SEQ ID NO: 200140 - DNA, 293 bp, Zea Mays
gattaatcgcgattagtcgggctggtcgcctggaagagggcgattagaaggacgacgcgattagggtttctagtcgtcctagtcgtccaactagtcgtcgacctgggcgattagtcgtctggtcgaacacttcctggtcgtttttggtcgttgcagttttggtactgggcttcactctggtggtttttggcccatctacagtagcccgcccctccaaaaaccctcccagctaccaggacccctcccagccgcctgaacccttcccagccgccagaaaccctactcctctcctc

SEQ ID NO: 200141 - DNA, 403 bp, Zea Mays
ctcgatcagaggttggacatgaattttctggagcgcccgggtgtgaagttggaggcctaggtaacgacacgggaaggtccccctggtcccttggaatggctggagcacgtggtctaggtctatgttatcacatcttatcgggtggatagagctcttctcaaggttggtgaccaagcccgaggcacagccaaaagcgtgcaggatgtctttgaccgccaggaggtcttctctagaggggttgataaagatagcagcatcatcggcatagagagaagtcctcagttttgttgtagttagcggaatgggggaaaggatcccatttctggctgcaaggtccaggatacgctgcatcggatcaatggcaactttaatatggtgatgcaagatataataactgcaatca

SEQ ID NO: 200142 - DNA, 283 bp, Zea Mays
acggattgaacacggcggccagggaacccaccatggcggacaccatggcagagcacgtgtcacgacgcaagctcgactccccgattcaaaagagcgacatgcagaggagaatgctacgaataacatggataggttgatcacctgcaatcggctgcagaggagcccgcccacggtgcgagcggaacccacggtggagcaccaactccggcgtgaaatcgcgggttccccgatcggcaatcccatctagcgaagcaccttgtgccatccatgcctctaatcaaag

SEQ ID NO: 200143 - DNA, 291 bp, Zea Mays
acaattcatgtgaaccggtatgcaaccaccatcgatggataaagatccaacggcgcagatttcatcctgccctaactaaccacatccacccgatcgagatccgacagtcgcgggcgaaacattacctagatctattccagtgcgttcatcggaagatcaacggccactgccatcccacatccgataggtacgccgattccatccagatcgcccagcgtgagatcgacggcaaccaatgcctctcctacctcatcactgcgacccgagctcgacgagaattttgcaaacatg

SEQ ID NO: 200144 - DNA, 324 bp, Zea Mays
gttagctttccattgcgtgtgcaaatttaagtatcagtattaggttatgtggagggcctaaaatgacaaaaaggaaatcatagctcacgctgtgtagctccttctcaggcagctatgccaaggcaaataggtttgtgcttctccctcagtcaagacaaaacagttcattctgttattgaacttcacgtcaaatgcctttattgatcattattgttgttaatacattgactactactcggggtgggctacgaatggcaaacatgtcaatcgtcttgcgactcaccggtatgccctgttacccatccattggcaatggccgctttt

SEQ ID NO: 200145 - DNA, 467 bp, Zea Mays
gaagaggaaggccattacccaggggcagggtagcaacagtgttcgtcctcgctacgttctgccatagggtaccccagcccagccagaggaggaccacacccagctcagtacgctccacaggggtctccatggacacctcctactcgtcaggctacccccactggcaccccggcgaggcctacaggacagaagactggccctacatgcttcaagtgcagtcagattgggcactatgctaatgcttgtccggtggggaattctggtacaccagctcagaacaagcaacagactcctggcaagggatattctattgccagggttaatcaagtcaccgttgatgctactcctgatggtgctaacatcgcacttggtatgttttattttaatgcaattcctgcaacaatattatttgattctggtgctacacattcatttatgcctgctcgatataggaagagacttctggg

SEQ ID NO: 200146 - DNA, 272 bp, Zea Mays
gttccgtgctcatcttgactctgtggagctcatcgagttctcgtttttaactctactgtagtcggccattctaacgcgatcgtgtcactgcagatcgacgccactgacagccttacggtcgactgaccaactggtgccttctccatccagatttccagaagcacggtggtcacggtatatccccgatgcattccacatccttagtggtagccttaccgcgctgtgttcggcgaatcacgcttgtcggatcgacgtgcccgccgctgttgacg

SEQ ID NO: 200147 - DNA, 400 bp, Zea Mays
agaattaccatacataatcagcaaacacattcaccacaataatcaaacctggtataaatttgtatatcgattgcgcccttcacacactaatttgtatttttacttagacatcacatgaacaccactaattttacccgcgaccataaccatgcgcgtctagactgaaacaagcaaatcaccgtgattacgagcttaaccaaagccatctaacagtcggctaactagagcaacgacatagaccgctaaataacatacacgtcggcttgcctattattatcgcaatccgagactcaacatacactgccatatttttataaacacacatactcacaagtattttcgcacatcgaccaatctatacgaatcgtaaaccactgatccccaaatcgcaatcaccatg

SEQ ID NO: 200148 - DNA, 289 bp, Zea Mays
aacccacaaccctttgctccaaacatttggggtaaccaccagaccacatatctcaatgtttataaatatctaaatacctatttatctatactactctattaagaacctaatgtgggcacctggtgctattcaccctccaaacactctaggcctgccccacacgccccgattggttctctggtccctctctcagctactgccctgtggacacgctgacactctaggcccgcctcacactctctgattggttctcccgcctctctctcagctactgccctgtggatcctag

SEQ ID NO: 200149 - DNA, 406 bp, Zea Mays
aaaaatgcaggtacccaatctttgcgtatgtcatataatctggcaagggtgttgttctcgtgtagatggaaatcatcaagcatcatttgccaggctgcctcgaactccatttcattcaatggatgatgtattatagattggaaccttgttttgaaatccatgtcctcaaatcttgcatataattcattcaagtggggcatatacctgttttgcacatgccacaaacacaatcgatgtattgtgtttgggaatactctgccaagtgcaattggcatggcagggtcttgatctgaaatttataaatttacataacatcatgcaagacaatatgatatcatatagtacatgacataataattacgagccattttattacaacatacctgtcagcatcactcgtggtccg

SEQ ID NO: 200150 - DNA, 280 bp, Zea Mays
tctagtatggagatggatggctgaagggtttatcgctgaaacacaaggctttactttggagcaggttgccgagggctacttctacgagtttgtgaacaggagtttggttcagcccataaccttgcgttcaagatatgaaatgcgtggagaaggaggttgccgagtccatgacattgtactgaacttcctcatctctcgtgcagctgaagagaactttttaactacgctgtatggcgcccagggggttccatcttcagaccgaaggattcgccggctctct

SEQ ID NO: 200151 - DNA, 2486 bp, Zea Mays
ctgcaagtgaccatgagccagagtgagtgtttttcttgtgatttctcgtcgtttatttggtgattcttgattgccgcggccaagacatcatctttattgtacttcctgggggtggacctaggtagggcgatgagagcagcggttcttgtttcttggcgggggctcttgattgcttctgatgctgctaagtggatcccactacccgatatagggagaatagagaaaagaaaacatcggattcttttgagcgcttgtgtttcttcagtgattgatggaataggcagggcgtttgttagattctttttgagctcatgctccactctggctcgaattcgtcgttgagcttttggtacagctgtagcggaataacggatgggatgttcgtacaagctcttggaagcataaatatgccctttcctaccgtataaaggtgcaaatcttggcaaggttcatggcttatgttggggtttcgacactgctgagatcagtacattccctagacgagcttgaaaacatcggaatttttctttttataactttatacaatatacctttatattgagatgggaatgatttctttaactaatcatatcccatgatgaggttcatgttaatgttgagaatttattgtggtcctatggggtttaatagaaaattaaatactgccgcgccttatcggcttatcctttggtactctgtctggctgtaggttttgacatcaacgtacttcgtgaagaagcaaggagtaggtggttaaagccttctgaagtgtactatatcttgcagaatcacgagaggttccctatcacccatgaggcaccaaagaagccacccagtaaagcacatatatcccttaattagaggaaattatcttacttgtataattgttcttttctttgacaacatatttgattgttctacaggtggttccctattcctttacaatcgtcgtgtcaatcggtatttccggagagatggtcacacatggcggaggaagaaggatggaagaacagttggggaggctcatgaacgactgaaggtttattttagaaggctcagtatagcagcaaatcatttcagttgtttccatatttttatctgcgtcttctagttcaacagtggttgttaagaatttatgtttcaatactacaaaactcgctttttgggcaaatcaccttcttgtctaccatgacttttccgcggtgcaacatgtaaactatcgacttgggacaaagttaaaacgacttacttggtcaaactatgtattatgtccatcttaatttccatgatagcctgtcccagtgacctttacatatacctatgattttacaaacagcattgcaagcttgactataccaaaaaactgtttccatctatgttgtcttatcataatagtcaatgaatgtgttttcatagtgaagaccaaaaatataaatattatattctgagcatagaagggcaggcctggtgcaatgttgagagcattttcggtaagtcaacgcctccgcaaattccgggggaaaggcttacctctatttatcccttccccggaccctacattccctagaccccactcacgcgggagcctccggcactgggtctacactttttattatattgtgagcatgggtggctaggagaacctttggcaattactttatgaaattatgatgtacctcctatgtgacagcctgcagcacagtcatgacgctcagactttcatctttaatggcacaagtttgagtttcatggctgctacaggttgtcacaaatgaatgcatattatggcgctctgctggagcaaaagcgctctaggagctttttttggtcgtttgctggaatataatacccctggcacttggtaggttgatggttgcctgattgttgacgggacctttttctagttttctgtctgtagtgtggtagtgcgagtgcgagatcaggtgtcaccaaatcaagtctgcagttttttttgtctgtcgattaatatgattttttcttaggaattaagaattttataggaatttataaaactcaaatgaaagtggtacctttatctcactagtttgttacagattataaattttagaagtcgataactgatcagcgtcctctgtctcacatctgacattttctcatgactgcaggttggaaatgttgattctttgagctgctattacgctcatggggagcaaaatccatgtttccagagacggtgtttctggatgttggaaccgtaagattatcttgccattcagttagctcaaatctgtgaaattatgatttatgacccatgtaagttgtatgcgataattgtagtcacaattgtgctgaattactgtgtaacttgttacttaagaataaattgaattgtttctgaacatctgtctttgagaaacaaaaatagtggttacaacattcaactttatcgattcacattctctacttttgcagtgcatatgaacacattgtgctggtacaataca

SEQ ID NO: 200152 - DNA, 308 bp, Zea Mays
cttgtggagcggacttcaacgactcagctaatccctgcccagttctcgcgcctatatgagtgtccctgacctcgcccttccttgcgcacttaatccaccagcgtccccacgagagcgcctgcgtcaaacgccattaccgccgcaagggagcagtagagagagagaaccgcgggttctagcgctggcggcgtattgtggggcattggtgaccaccctgatcgcacggtgaagtggcgctgtggttccagacagcggccgggtgccctcacctcagtcgtgcgtcgcggcggattcggcgccgacccgtg

SEQ ID NO: 200153 - DNA, 448 bp, Zea Mays
tgctgaaccgcgtatgccaaatcagggcgagtcagcgtgatgtactggagagcaccgacgatgctcctgtacatggaagggtcgacgactggagcaccaacagtcgcggagatcttggcatgagtgtcgacatgggtcgtcgtggagtgacactcggccatgcctgcacgctgaagaagctcgacggcgtactgtcgctgggacaggaagatcccggtggggaggcgcttgatggagatgttgaggaagtggtgaagatccccaagatctgtcatggcgaactcggagtggagcctgtcgatgatgcgctggagaaaagttgacgaagaggcggtgaggatgatgtcgtagactataatcttatacaaggaagactataatcagtctatactagtctatgtacggctgcactatccatatatgtctaacagtgtgtcgtatgcgtctg

SEQ ID NO: 200154 - DNA, 355 bp, Zea Mays
cgaggaggcggcggcgagctcggggcaagccccggaaaacgcgcgtccactaacggtcagcgccgcctactcctcaacccctcttcctcctcgggagattagatttttgatttcccctgctgtgcgtgactgcgtgtcgactagcgacctcgagcaattgcttagagattcaacatttaagcggtgctggggagctagcgaccaaaatagcatgcagagctggaggaccacgaacggacgagaggctccttgaacagttgcaccggcacatgcacgcacgaggtgctgggcggattccttttctctcagccgccttccgtcgatgcatgcatgctagcagttccccttccgtgat

SEQ ID NO: 200155 - DNA, 396 bp, Zea Mays
agcattcatcgaacgagggatctcgacagagaaaacttccaggcttgattgtatggttattttcttgggattggacggagactggtcgatggtgaagacaacaaaactagaactttgcaaagaatgcaaaatgggaaatattagctctattagtggtcattagtaaatgcaaatcaagtaaatatcaatatggtctaatgtcacgatgtcctttgtaacatatgcaatctttaaagtaggtcgtataaaaatgagaatgagataacaaacaaatgtatatatacataaaagaattatgcaaactgcattctcaaatttttggactatttcatttccataaaaagatcagcaggactgtaaatatagatgctgcaatacataaattaggatgacaac

SEQ ID NO: 200156 - DNA, 418 bp, Zea Mays
gggacctacaccacttccttgggatctatgtcacgcgttccaaggacggcctcttcctctcccagcgtcagtatgttgcggatctgcttcaacgcgccggcatggttgtgtcaccctacggcgactcctgttgacactcatgccaagttgttcgctacagatggtgccccggtggccgatgccactcaatactgcagcctcgccggaggtctacagtatctcatgctgactcggccgaatctcgcctatgccgttcagcaggtgtgcctcttcatgcacgacccgcgcgagcctcatctggcgctgctcaagcgggtcctgctgtatgtcaagggtaccctctccactggacttcacatcggcactggcagcattacggatttgtctgcctactccgacgctgattgggcaggctgtc

SEQ ID NO: 200157 - DNA, 278 bp, Zea Mays
ccaaacttggcaccatacaacaaatttcagatttcagaactgaaccaaattcagttacaggaatgcctagcagctgatctttgggggcatttttatccactttttatgtgggaacaagccaaagtcacttaaagaaacttgttcaccatcatatgggcttcaacttctctataaataccatagcacaaaacattatagaacagccacaaataggcttcaaaactgctatcaaaacactgaaattcagtttcagttactgtttccaatctgaaaattca

SEQ ID NO: 200158 - DNA, 501 bp, Zea Mays
agcatgttgcatcgtcttaagtcattaccgacttaagccggttgctccgttagtagggtatagtggtcaccctaagttgagtaagtgtgttgattccaagtttaatcaagtcaaagtcgatggataaccaatagtttgaatgcctttgagagtgaaatcttttattgatgacgtattttcccattacagaatacaatgttgctccgatagttctcgctaagggtaaaacttcctgaggtgctctatattccatgaattccctacttccgtgccatccatttgagtaagccgatatgatcctggccgagtgacctccgacaccatgaatggcccttcccatagcggcgataatttgtgtcgtccttctcccattagaattcggcgaaggaccaagtctcccactatgaaggatcgatgtcgtatagtcttatcatgatagcgcctcagggtctgctggtatctagttgactaaattactgtattcaattgctcttcttccag

SEQ ID NO: 200159 - DNA, 394 bp, Zea Mays
ggacattccacctgtgactgaaatctcacacattttccacccttgcctctgctgccacacagttcgacgtttccatttagggcatcaagtgcaataatggtcacagattcgacaaacacatcacccacactatcttccactcccacaacattcaacttcgtatgtcttgcccctaaactttgcctcaaaacagtaaagccgaacacatgcttctcaccatcaataatgtcgttcactccttgttgattcaggatagtgtccttctcgcatattgggtcgaggcgcttagcactgttacgctcctcaatattctaccgactaagacacttaacttcacatcccatcgtgctatcttcggatccccaccctcatatatactcatcactatgttttc

SEQ ID NO: 200160 - DNA, 334 bp, Zea Mays
ggtcattggaggcaaggctgtgaggaagcgattgatgagagacccatcagccaaagtacagcctcgtactatgagaccactgcatttactctagggccccaacatccgagcaccccgcagagaacctgcgggcatttcgaagctaaaaggagagcttcccccaaatggcatggaacccttagacataaacaacagaagcatcaaatcaaatacagaacaacataataccgcagcttcaaatcctgattagatagcccttgaaggtttgcatcaccaacatacaagacacaaccactagcttgcattaaaactgacagaggtgtgtccaacctga

SEQ ID NO: 200161 - DNA, 584 bp, Zea Mays
caagcaaatcatcgtgattacgagcttaaccaacccatctaacacttcggctaactagagcaacgacatagcccgctaaataacatacacgtcggcttgcctattattatcactatctaaggcacaacatacaccacaacatttttataaacatacatattcacatgtatattcacatatcgaccaaatcatacgaaccgtaaaccactaatctctaactcgaaaccatcatgcgcttacttcccaattcatgaacacataacacgtattgacccgactcaagatatagaggaagcgataactactttggcatgtcaccacctcactatataagccaaaacaatttctaccatcgactaagagttctaagtattaaacacattattactttccacgcacaaataaacctcaacgtaacactagtggcaccgatggatttttactaaactcatcatgcgcataacctcgtctcgtatgcaaccatatggtggcgtgcactcgagacacttcgatcaacgtggcacgaccactaatatgaactccgacactcacgtcttaataacacatcctccacgcaaactagc

SEQ ID NO: 200162 - DNA, 322 bp, Zea Mays
tgagaattatggaatcaaaattgctgggtttcatgctgatacaatgcatcttgcacgcctttgggattcatcaaggaaaattgatggtggatattcacttgaaggacttacaaatgaccgtagagtcatggatactgttccagaggatttacctaagcctggaaagacatcaatgaaaaccatctttggcaggaaaaatattagaaaagatggatctgaagggaaagttgtatctgttgagccagtcaagaagttacaaagggaagacagagagttatggatttgttattcttctctagattccatgagcacattgagactt

SEQ ID NO: 200163 - DNA, 341 bp, Zea Mays
ccttcgctttcatcaatcacctgcagcgctctcattattttcttcttaaatttgaattgactatcactgaaggcagactggaattcaacaccaatcccagcaatgcgcctactacgacgtggaggcacagctggagaaattgggttcccaggtctgacttccagaggagcaggtaaaatgtgggcagctgccttcacgaccttgttactgaaagaggatctgagcgtgccaggggaatgcagttccgaagacatggaattaacaacatcacagacattgacattaccactggtaggggtagacttatcagccaatgaatcaagatcatgttgcagactctg

SEQ ID NO: 200164 - DNA, 470 bp, Zea Mays
caagttgcaaggattggatttgttttgaataagctgcagattttggccagtaattgatgtcctttagttgtctcgtacttgtgtggttcgcgcgctagaggtttggggatgttactatgtctatagagaaaaacacaagacagaatttagcttgcagctgttagtgcagctgcctaagagttacaatggaggttaggggatgttacaatagggtgccgccttgactggagggaggctggcggcggggggctggaagacgggacctggcaggtggcatgaaggccgacagtggaggacggctggcatggaggtgggcgatgcctgctgcggagagcagggaggtggggaagacgggactggggggcggtcacaggggaggcgccgcggaaggaggcgtagaggacaggggtgggggccagaggggccatgtgggggaaaatcatttcgcttacaatataagcgctttccag

SEQ ID NO: 200165 - DNA, 290 bp, Zea Mays
aggatgagggtacggtcgtggatgacctcaccaagatcaccaagggccccggccatccccttcatcttgccacaatagtcaccgacggagagatcgccctgcatgaacacatgaaactcggcgtcgaggcgaagtgtgcgagcttcgcaattgccgaggagttgctcttcgatggccagccagacgcggcgccaagtgccacctgaggtgcgagcagactccatcagctcgggggagagtgtgcccagcacctaggacagcacgatggaattcatgcgccgccaggatgg

SEQ ID NO: 200166 - DNA, 335 bp, Zea Mays
gctgaaaaggaaaaacgtgccaagaaaaaacaggttaacatttttttggtgcaagcatgccatccccatcctataataatactctttctgcttccttttctggcgtatttcatttataagtgaaattagtgattgtgctgttcctagtcctcactgttgtgtttaatttgtttttgaatgtactaatgataagttatgtagtatcctttttgtacttgttgaggagttttgtaatgctctgtatatctctaggcaaaacagaagaaaaatagtcgaagaagtaataaagggaagagtggcaagtctgacatcaataaggaaatacttatgtacag

SEQ ID NO: 200167 - DNA, 413 bp, Zea Mays
atgcatgcaaccaattcgcatagtatccaccaaagctgaccctatcggatgcagaactgaggggggtcgatatggcaatatgttcaaagaaggattgttatgatactgcccagcaattggcttccctttaaccaatttggaatgtaccccaagaaaattggataacatgaagtgaccctggcaagtaaagataacatcttggtcataatatgccacatttagatgtgcacagattgaacatgcttcagttccttgattcctcatcaacatctcatgacgaacgagacggtgagtgtgaatgcatagattagagaactcttcatctgagagaaatgctggatggtatatggcatcatgcaacttatgggcaggatttttcaaggtctcaaaaagcgaatcccgatgctcaggta

SEQ ID NO: 200168 - DNA, 387 bp, Zea Mays
aacagggaagagatccctgtgtacccactgtacagagatcctgtgagtgtatattccacttgattccattctttattgttttatttttctctcccagcgctaatgccatattgttaacccaaatttctgccctcttctctgcaaacaggtacatgattttggtttttttcgctatgatccaggtgccattaagtttcttaagtatgatgagattccgctggcacctgaagcagcatcagtcgggctagaaatccgggttgtcggaaatgacagcggggaaaaggttccatgaattatatcttaaattctgctgttatgtacccctaaaatatacgtccttgttagacaccacagaccacagcagttgcatatttttttgcattgttc

SEQ ID NO: 200169 - DNA, 370 bp, Zea Mays
ggaaaaatgaacaggtgtatcagggagtatgggctccgtgatattgggcaattggagcaggatttggtttttggagatgcgggagcgaaggaagtcatcagtatcctcaggtcaaagcaggtttgtatagaaagagaaacaaaaaaacaggcttgctgctaagttgctgtcgttttgtttttctttgcttgacatgtttgttccattattaaggatatgagcccagaaaacaaaatgaggttgctgattatatatgcaattgtatatccagagaagtttgaaggtgacaaaggggaaaagttgatgcaggtatttcacatcaattttttcattgcttatatgcagtacagtgatggcatcaataatgcag

SEQ ID NO: 200170 - DNA, 300 bp, Zea Mays
aattgaatcataaatatttaagataaaacgtgagaagattcgcgctcgcgtgtcaaggaccacgggagaagaggatccagcatagaaggcgttcctgcccacctgctgtccatggcgtgttgtgggcacgcatcgtcgccggtgagcagattggagaaggatgaaggacgagggcaggatctcggatccgacggcggtgggggttaggcattgaggaggaggcagaggtactccgctaaggtgaggctggcgatgcggtggaggagctgtgttaggttgaattgaggaggatgaactcgg

SEQ ID NO: 200171 - DNA, 509 bp, Zea Mays
tttcacaaatggggcttggctggaggctcaaggcgtttttggtgtggtggatgacctaagcacactttacttgatcaaagaaaatggggagttactagcaaggaggacatgtgatcagttgaagctatcttcttccattattgatctggttttgcaggatggtacaagcttacttaggtgattatcagttgttttcagttgggagctttccccttaaatcatgtattatccttcatttcgtgggataatttggccttaactaataatttccattaatatttgtaggccaggtttctacatttttacaagtgactgcttggttcatagatttgattacactgaagaacctgaggcatgtttatgcgaagttcccatatcaactaaagatgcaatgtcagctaggactatccagttacctcgaagtttatcgtgcattgattaccatcaacgtcactcgctatttgtcctagttggagattccaatgtttcatttagctccaatagttatt

SEQ ID NO: 200172 - DNA, 296 bp, Zea Mays
tgtaattcctgtacaataacatgaacaaaatttatggattttattggacacaacgaaatgcccccaccttccctcagccctcacaagcgtgctacaccaccgtgtccgctgctaccgccagcctcccgtgcttcgccactacggccgctgatggcgcccatcctctaagcccagcgatggtgcggatctcgcctccaaacaggcaggtgtggctccttgccttcactgtgtcttggttgtggacctctcccttccaccaacatgcccccttcccagccaccattccacgcccgcgg

SEQ ID NO: 200173 - DNA, 308 bp, Zea Mays
atgcaactgatctatgagctgggaaaatcgatcgacataatcagacactgtggtggtttgcctgacatggaacaactgcctaataagaacttcatgctggtccttgcgaaatctatccatgaccatgtgaccaaactgttcccaagatattctactcaaatgacattctaccgattggagccatcgtgctgcagaccccgtaaaatgcatgcgagcaatcctaatccacacactagtgtcaacagaatacatggtgaaataatcttgacatcgtgtctgccatagtttaggattttccccatcgaacc

SEQ ID NO: 200174 - DNA, 358 bp, Zea Mays
attcattatattccaactttttagcaaccgtatggtggaaaaatgtgccttacaactttaacctatgtttggatagttctctcactcaatttggctaaattttccatggtctttattttattgagaaacaatgtggcatattaatatgttgtgttttatttgagtagacataaacaccgtctaggtatgccttgaatagaggggattataggaaacctggtatcacaaaaggtcattagctagcccaataacatctttatccactaattgtactctaataccctctcgtgcgaatacaatgcccttgacatctgggaaacatcatttttagtttaaaaggtgatctattgttttgaat

SEQ ID NO: 200175 - DNA, 435 bp, Zea Mays
cttgggagagctctgcaccagatgaaaacaagacacctgaaaagaggttctggcagtcaggccagtctgcaattgcccaaacaatttcattactgttacaaaaagcttggttgttgcaagctgacaatatggtatgttagtttgccgttgacctgttgtcttgaggtattcaagtggtgaaacttgcttgactgttttcaacattcatttcaggagggctctgcattaccacctccgtcatgcgtaaacgatgcttctgtgctacttgagtttgtcatgagttctgtcacttgcatggaagaaacggcaaatctgaaggtctttgaactggtagctacatgggctgacgctattgccaactgggactcctgggaggagatggaggatcagggtgttttcaacacaattaaagaagctgtcaatttccaccagaga

SEQ ID NO: 200176 - DNA, 278 bp, Zea Mays
tatacataggaggtaggggatcaacgaaaaagttgattccataatcataggtcatgcatgcatcatgtttaaaccatactaaataaatcttccactcttatggaggtatgacacgtaccaagactacccaacggaaggcaaccggaccccgaggcgtgcctcggcaccagatggctcctcgacatgaggggagcagtagcggaagtaatgatcccataggggatctggaggtcagagttgaacgactcatatcggaactgtgccatgaaagtagggag

SEQ ID NO: 200177 - DNA, 289 bp, Zea Mays
ggcacaccggtgctttagaagtaaccgccgggtgatgacatggcacgctggtgttttagaagtaaccgccgggtgatgactgggcgctttttggaaacggtatccgacccgggaagatcccatatgtactgcgctttcagccgcctctgctttcggtgccatagttcttgctttcctgcctccagatcttctctgtccctttgcaattcggctcccactctgttcgccggtggagttgagatggcgcccaagcgaaaggcctcgagttcatccgctgcggtgattcccc

SEQ ID NO: 200178 - DNA, 373 bp, Zea Mays
gtcgggctgacttacttagtgacgaggagcgcaaccgtgggagattggagctggaggtgcggaggaaaccagtggattgctcatcggagttccgtctgcgtggcggaggcgcttctctccgtagtctgcgtcaccgactccccgttgcatggtaatatctcgcccatgcggtttactttgttctgttcttcgtgttggcgcgttaaggatggctcgtggagccctgtcgcgaacgccggcgcgctcgccggagttccctgttgagaactcgccgtcgtcgcgtgcggaccgcgtgatggggacgatggggtcctagccatcagatcgtgtctgtgcggttaggattgagtgtagcgtaccagttcaggggatt

SEQ ID NO: 200179 - DNA, 621 bp, Zea Mays
gcaggaggcgagagtggcggcggcgaggagcaggaggtgggactcggaggtggtggacgtcatgccggaacaggaggcggcggtggcgccggtaaaaagcaggaggtggaactccgacgcagtggatgtaataccggagcaggaagcgccggtggctctggcgaggagcgggagatggagctcgggggcggtggacgtggtcccggagcaggaaaagccggtgatgatggcgcctgctgctccaccacctcctcctccgcctcctcgacggcgacggcgcagcgtcgagaaactgccgacatcagaggaactggagcaagagatagtagtggaagaggtgagaaaccccccgatgccgccgccatcgctggccatgttcccgcctggaacgccaccaccccctccgcctccgcttccgcctccctcgacggtgtcgcgcagcaagaagaagcgcagcggcagcgtgggcggcgccaaggagctagcgtccgccattgctacgttctaccagaagaagcgcaagagcattaccatgaaggccaagaggaggccccatgcccatcaccaccaccactccgatggccaatactactcgtcgccgtcgtcagatgcgtcagcgag

SEQ ID NO: 200180 - DNA, 801 bp, Zea Mays
gaatcccaaggttcttagtgagggtattctttggatggtctctgctgtggaagactttgggatctccaatttaaagctaaaggtgcacttttctatgcttgtttgctctatacttactgtgttatcacacacttgttcttttctgtctttgttgttccaggacatgattgatttttgcaaagacaccggtcttcagtctagtgctgctgtaacaagaaatgctactataaaattaattgggatgctacataagtttgtgggcccaggtcatcttcatgtcttcttattttaacatgttatgatagtcgccggatcatgttcttgaaataaaccatcctgcagatattaaaggctttttaagtgatgttaaaccagcacttctaagtgccctcgatactgaatatgagaaaaatccttttgaggtatgccatgttagtcactgtttggaaaatacttattgtaactttgattttcaccgacatcggtttggttcaattattagggtgctgctgctgctgctccgaagagaacagttcgagttctggataccgcatcttctgtatctgctggcttgtttgatgggttgccacgagaagacattagtgctaagataacacctactttactaaaaaatctgggcagtccggactggaaggtagcggcctcttttaatttatttgatttactttgcaagtgtcttgtattttatttgtgatatttgctattatgcttatatgtgaattgataggtacgattggagtccatagatgcagtcaccaaaattgtggaggaggctaataa

SEQ ID NO: 200181 - DNA, 344 bp, Zea Mays
gataatcttccattccttgtattgaccatgagagttagaagcatatggtaagatagttttgcaagggaaagttttggtaggccaaatgaataggctagtagctggttatgaactgaatattctgtagcagggattaatctttgttttatgtccagattggggcaactagttgtatcaggtgaatttccaaaggtaagatagaatctgtcaagatgagatagatatgggtgagatagactacatgatgtaggtcaaaatcttgtttgatgttaagtggggatagacagatcactcaatccatcatgacactattggttgggttagctcttgtgctcatggttgag

SEQ ID NO: 200182 - DNA, 306 bp, Zea Mays
gatcttcggcaaatggaatgacagggaagatgcgttgagagtgggggtgggttgagaaaaactggtccatccttttaataggagtcacaacgatacccatggggaagatgttgggtggaaggttgggccgaattaggaatgcgcgcatggatgggggtgcggataggggcatggtgcatgcgcaagttacctactatggaagggggccgcctactatggaagctccacctgtggcacactaacgatgtgtaaggattgaaggtcgcctccatctatggaaggagacgctgaggttggaaggaggcg

SEQ ID NO: 200183 - DNA, 511 bp, Zea Mays
cttcctcaggaatcccgagagaagccaaagcaagagtacggatagtgcccctgctcacggctcgggggaagataatcccttgcagatcgagattcaggagccctcgggagaaggaagaccgatcagttgaggcttcactaacccgaaaactccgttgtccaccttgcccactaaggagtggacatggatcactcggaagaaagaagtaaacatcctgagtcagggaaggataacatgccccccgatacctctgccctcaaaggaggatgggaagaagaacaccattgtgccagctcctttctaccctgacatcctcttcatccaagggagattggagtcagtgcccatctccgacgatgagcctaccatgcaaggggaggaacctccctagcgtgatgcccgacgacgaagaaacagatgacagaatgtgcggcgacatcatgaagctggggaacgggatccagcacagcccgtgtcccgggacgaagccttggaagtgggggaaactccc

SEQ ID NO: 200184 - DNA, 604 bp, Zea Mays
gaattggaggcaggcacagatgggggtagagcaacactaaagccatgagtagagtcactagaaacacgacggatcacacgggagcgatggtgacactaggggagcacacaacggcccaacaatgatgcagtgcagggccaagtgggtggcacgccgcgacgtgtgggctaccaggcgcgtaaccatggtggagcagggcaaggcggcgatgcacgcgcgaggcacacataagatgagtggcacgaggaaggcagatggcgcgggggacgcgactaggtggcatacgagagggaggaatatgatgaccagacatgtgagagaggcgacaaggcgttgtattgggcaaattttgattaacttttgatgcttaactctatgaccatcgaaagttaacatggccatcgaaagtcacattgtttcctaatatgtccacctttgattttggtccatctcgataatcctatagcattagttgtgtatcatattttaaaacttattgcctagaataaatatcgagatatatttttgttaactacaaatcaagttggttaaatgaagtcccccggtcccaaggttgtaacttttgtaaaaaaaaatattaata

SEQ ID NO: 200185 - DNA, 301 bp, Zea Mays
gactatctcctgcaacttacccatccccatatcatattcaaactatattctgcgaacagtgcagtttacagtgtagaacagtgcaaaaacaatgttttgggtaaactttgggtaaattgctgaacacggtcttaggagaaggtagacaattcacttatacactttaacaggaatatctctatattttctaggttatgcatccactgatgacaaggatataattgtcattttcttcatattttaacatccatttaactgatttcgtgcgtcgatggcttgcaagagaaaaaaaacaattcaa

SEQ ID NO: 200186 - DNA, 356 bp, Zea Mays
attgaatatttgttgtcaaataaattgatagaaaataaggcatcatctgtagctcagtttctcaagagcaacccgggcctggataaggtgatttcaaaatttcattgagtgtcttgctgtaacaatataactgttatttaatgttatttgtcaaaagggtgtacacacatctaacttttgttagctatatgcaggttatgattggtgagtacttgggacagcatgaggagttccctcttgctgtgatgcatgcctatgttgactccatgaagttttcaggattgaagtttgatgctgcaattcgtgagttcctgaaaggatttcgccttcccggtgaggcacagaagatagatcgc

SEQ ID NO: 200187 - DNA, 341 bp, Zea Mays
gaaaattgatgagggtgccgtgcatgctgtgttttctaaagcccttgataactatatcaaatggtgcaactatctgcctcttcgtcctgtctgggataagtatgttcttttttaaaaaatatactttggtctcatctacttaattccttagtatggtttctttttatatatactttggtcttatctacttaactccttatgatcgcctcatttggttttaagatattgcatggttttcttttagcaatgattcgttgacaaaggaaaagaagttgctatatgtgtgtttatactacttgatgtggggagaagctgctaacgtgcgatttattccagagggc

SEQ ID NO: 200188 - DNA, 409 bp, Zea Mays
cggggcaacaatgttcccttccttctccaccataaccactatgctgccctccacaccctgctcgtcgtgctgcttgccacccttttgcacatcgcaatagccacccctaccctgtccgtaccccttcccatccgctagaacccgcaccaatgtttctgcagtggctgcttttctcatctgtgtgggcaccctcaactatagacgttgcccgagcatctgctggtttgggcgttctctatttcagcaagcttgatttctatggctcaaccattatgagtagttattctatgggcatcgtacactcacctcggattgggtttggcttgtttcctacaacctcacgggcacgaccccgacatggtacttggtactctgccatggagcaagatgagggggcatgtcatcgtgg

SEQ ID NO: 200189 - DNA, 315 bp, Zea Mays
atgaatacctcaagacagaaggaagatatcaacgaagattagaggaaagccaaatatagccgatgaggtacaagtctaatcaacagaagcattgaagcacgaagtgatatgaagactagccaagagccatctaccgaacgtccaatttgtcgcagatcaaataaatttcaaacctaacaagatatgggcagatcgcgtgctcgatctcaaagacaaaactatatgctgacctctaaagcataaagttgatgatataattctgatttctaaggcattcgaaaagggcaaaagggcagaatgctgatctctagagca

SEQ ID NO: 200190 - DNA, 366 bp, Zea Mays
tttctcgaatcccaactcatttcttcctcctcttctggattatcatctgggaggcaaaggggtgacttgtcgtagagcattttatgtcaaagatgccctgctttaccgacggagacagaaaattagtgaagacagagatatacaccatacaaccaccttcgatggacgcgggggatgacattgcttgacatggactgcgtggctgaggcaatcggcatacagtacttgcagcctgtactactatacatagacagttctgttttcctccaaagtgctttatccttagaccattctcttctgtcatatccactcccgctccactccatactgagcgtgcgttcttgatccatactgagctctgccgag

SEQ ID NO: 200191 - DNA, 285 bp, Zea Mays
atttcagacttttttaactttggccttgatgaagagaagtggaaagatttttgcaagcagctggtgagtccatttcttacatttagtactgcatatagtttgtttactttatatgcctaataaattaaacgataattcttttattgccaggaccaacttcgactagaatccacaatgcaatctagaatacgggtgtatgaaagtggccgctcagaacaggtttattataatccaatattcccattatggacaacagtatcctactctacctgtagcaatgataat

SEQ ID NO: 200192 - DNA, 325 bp, Zea Mays
gcagagttagcgcaccactcaatgtccctttgggctatcagaccgtgtaattacctccgagaccgagaagcattcttgtatagaaaacttcctttcctacttttaattgaaaggcacagctcctgtcattgcgttcaaaatacttacaaacaacgacagatacagtacagatagattgtacgaaccctaggtaaagacaatgccgcaggaactttgggtgatagttccggaaagggagagattcttcctagatcgaagaggcagccgaccgcgacctaaatctgaggagcgcattgaatctgataaagttctctaagggttagag

SEQ ID NO: 200193 - DNA, 330 bp, Zea Mays
gtgatgggaggctggcgccgagcgtcggcagtgaatagggcggaggcgctggaggggaagggggagaagactaccgcccgaagccggaggtcggacgtgctgtaggagggagatggtggcagtggtggccatggtctggagacggacccgagaccagaggcctccccggcgagcggcggatcggaggcggagagggtggtgggtccgctgctggctgctcagggcctggcgccgtgtgggggaagggaggcgacggacatggggtgttgtggtgggaaacggaggagccgatgaggggtgggaaggagcaagagaggtggtggactggtg

SEQ ID NO: 200194 - DNA, 329 bp, Zea Mays
gacggcttcggttttggtgacacatttgagcatgggttggctgactcccatcttgtaaagctggccttagatgagagcgaagtcccggcttcggtgtttgaggcgcttggcctcgttgacatcggctggatggtagtatccttgcaggaacagggttattggtgctcgccagtcttcggtcataatgaggttgactatgcggtggccttcgctgtcgttggttatttgtaggccctctgggctgcggacggctggtgtgccgatgacatggtagaatacgtccgagggtagggcctcgcccccggcggctgctttggccaacgcgtcgg

SEQ ID NO: 200195 - DNA, 322 bp, Zea Mays
aacaacaacgaatgaataattaaactaaatctagcgatggttagggtttaggggttggacctttctgacttctgtgcctccttgtgttcaccatcaaggttgtttgcgatgacctaaatccagcgatggttagggtttaggggttggcgagagaaatgtggatggggcgtgttaggtggaaggggcgagagaaatgcggatggcaatgagatagagcgggatgcggcgagtgaagtcggtgacgacgcagctcatcgacgcgatgagaggtaagggggcggcggtgaggtacctggtcgagggggcaggtcgtcgacggcgg

SEQ ID NO: 200196 - DNA, 354 bp, Zea Mays
ggaggataagacgacgaggggcctggatcaccctggtagggaggcgggacaaactgatctctatcatcaaagaactcttcctcaacatcttcatcttcagcagacatgaatggaacaccataagcttgttggtgccattcattgatttctggaggggtgcatgaaggggcacgtcgggcgagcggggggcaaaaggaattcccatggtgatagactgacgatggagattgtcatccgtctcccgctgccgcctggccagctcatgaacgtcagcagaaatgtccctgcacatagagaaaaaggctgcaatcccatgagccaacctggctcccaggccatgacctcgaccacgac

SEQ ID NO: 200197 - DNA, 292 bp, Zea Mays
agctcatcagaattgctagcataataaagcacagaagtatcaggactggctagaggcgacgagacatgtggagggacaatggaacgacgagtatagacacgagtaataggtagtcgatgtgatgaagctggtggtgaatatgtctctggtggagatataggcaaaaggggaccaggcaagtgcggatataaaacagtgtcattacttgaaggaaaacacaaaaaaagatgtggtctctactggagaatacgaagaggaagtagaggaattataaaagaaaagacaattttca

SEQ ID NO: 200198 - DNA, 286 bp, Zea Mays
gccggagaggtacggggcgatatcggctgcccgatccaaaacatacgtgctagattaggcctacgttagttattcacccgcattccctcatggttgtcggatccgagatctgcggttgcgagcccaccagcatgtaataaaatctcacacctaggtacaatgatcaacggacaggatcaattccccatcgaaccaatgccctagactaatcccagccgtctgtttcactatctacggacaccttggcgtcatcaagctcacgacgcccaggcgcatccgtcgcgcc

SEQ ID NO: 200199 - DNA, 311 bp, Zea Mays
gatgccgcaagtctgctcaccaggaggtcagcagaacagaaatttacacgccctttttcatttgtttgtttgtcattttgcactgtcttcggtgaactgatagagcaaatggaaattgcagatggctcttattgctcgcttgcaacatccttacatcgttgagttcaaggaggcatgggttgagaaggttggttcttcatgaacatgcttctgtatttgccttttatttggttccgtcctctgttacctcaacgcatgagttttgatagggctgctatgtttgcattgtgacgggatactgtgaaggtggc

SEQ ID NO: 200200 - DNA, 638 bp, Zea Mays
cgccagctcctcagctgccccagtccatactcacgggcatccagggcccctggccagggacacaacagcagccatggacgttgcctcaacctcaactgtggtctacgccaccaccaggcttccctcatcaggttgttcccatgccatcatgggaccagcaatcgctcatctccaacttcaacatcatgacactccagccccctcaacaaaatgagtggtacttcgactccggggcaaccacccacatgtcctctgatgccagtactctctcccattccactcctttacaacacccttttccctcctctattattgtcggtaacgggaattctattccagttacattcactggcgctgctgttcttatagattctcttcgtcttaataatgttcttgtttccccaagtcttattaagaacctcatttctgttcgacagtttacctctgacaataattgttctgtggaatttgatcctcttggttgctctgtgaaggaccttcactctcggagagagatcgtccgatgtgacagctccggtccactctaccctgtgcggtttccggcatctaccttccttgcctccaccactccgtcgctctggcatcaacgcctcgggcaccccggtcgtgaagttttg

SEQ ID NO: 200201 - DNA, 310 bp, Zea Mays
ccaaaaaggagttgatcaccggggaaaaacccggatcttcgagaaagaagaatgaaggcaatactccatcaaaggtgatgaggatatcctccactattacccgttggtaaagacgcaattggcccagttggcccaattgtagtcggatggtgaccgtgtgtgcctcaaaattatcccacctcgcttaacttgggaggaggaagccactttaaaagggagagccacccttcctccattggactagtcttttggggcgattggacctttccctgcattgggtgtgcttaatgaactgttgggctccgggcaa

SEQ ID NO: 200202 - DNA, 389 bp, Zea Mays
cagggccaggagccttattggaaggcagggataagatggttttctagatttcatcctcagtaaaaggactgtccagcatggaaaggtcatgagaggggatgtgcaggtgttccagatttatagagtgctctctgtcagttgaacaacccaccagattgaagtagaaatcattaagcaacatctccttatcctcgtgtctggacaaaatgagaccatcagaggataatagattaccaataaaattcttgccttgcaggtggaagaaaacagtgttagcatcccccttagccatctaggtgatcctagagcggctccgagccatagagcgctgcaaggaggaaagagccacaatgtgactatcaagctgatctagcagccacttctctaac

SEQ ID NO: 200203 - DNA, 352 bp, Zea Mays
ctgattcaagttgtccactctgcaagggcccatctaggcccaatggtggcacacagtcgagtcgtaactcaagagtgagaaaaagaatgacatatacaccttctacagtataatagacagggtcaaaccactaggctgaccccacatatcttgtaatctcatctcccctggtctataaaagggagagggagacccctttagcggagggactctctcttctcaccaacatacacacatttagccatttcaacatccaagcaatacaaaccagccactcccgagaggccgagaacgtagggtattacgcactagcgacctgaacctctttaaaacattgtctctcgtgtaccac

SEQ ID NO: 200204 - DNA, 746 bp, Zea Mays
gaccccgggccggagatcgatgcagcctgagcacccagagtgatctcctccagggcgaggtcgtcgcagacctggagaaaggtagggaagggcctctggcgcatgatcaatgaccgtaggtgggtgtagcgatcgctgaggccgcggaggatgttgaggacgaggacgcggtcctccacggggcagcccagatcaccaagtgagtctgccatggtcttcatcttgcggcagtacgcactgacactgaggtccccctggacgaaggtgcggaaggtcgcgtcgaggcggagagcacgggcctcggcgttgcccaggaactggccctcgatggccagccaaacagcccgagcgtgaggaaggttccggaggaggctgtggaggtcgacggagatcgtccccacgatccaggtgagcacgatactgtcgaggcgcacccacgcagcagtcggcgccacgccggtggggtcggagaggacgtgatcatccagggcgtagcggcgaagggtgaggaggagtaggtcccgccagcgtgcgtaggacgacgactctggctccaggacgacggggaccattaggcgaatgttctggacactcccagcctgaaggtggagctgagccacgagcgggtcagccgggtcatgccagagcatcgtggtggtggtgcggggctcggttccgtacatgccgcccacggtggcagaagaggtggtcccgccgtcggacgccgcaggcgaagcgaggagctg

SEQ ID NO: 200205 - DNA, 447 bp, Zea Mays
ttacagaagggatcctggtagagagctggctaaacctgtaggaagaagagcaggagataagcctggtcctagagtgaaaaagatcttccgaaaggaagaaggaaaagaatcatctgccttggttcaaaagctacagaaagagattaaggaagtagttagagatacaggcacaaatatacttgagaaggatgaatcttttgatgaaaaactgttgactgcgttccgggcagctatagggaaatcagtggatggaccagccaaaagtactaacaccaatcaattaataagaacaaggaggtcattgcttcagaagggcaagaaacgtgagaatttgaccaaaaagttgtatggaacatctacaggaagaagaagaagcgattggcatcgtgattgggaagttgaattctggaaataccgttgctccccaggaataaatcctgaaaagat

SEQ ID NO: 200206 - DNA, 320 bp, Zea Mays
caaagatcattaaaaataagctggcaccaatcggtctcgtggaaacggtgcatttcttctgtcagaagcacttcatggtttgttatgccccagctagcagttggaaacaaaagacggttgaataagatgaggaagaaacatttgatggtaaggtcatcatcctcgcctttccttaaatgatcatgtagcaatgtcacattgaactcgtctttagccaaaccaagctctgccctcaagttgcttgctgcaactgcttcgtcaatccccaatggttttccaccgccatgatttggtacaccaaggataagatgcacaatgtc

SEQ ID NO: 200207 - DNA, 293 bp, Zea Mays
atttatacaactacattaaagaacaaatcaggtaaactatgataagtcaaacagtgtgccaccagcccgcccaacgagtacgacttgtccactgctccacacatatacaacatggttggttttggtggcctaacctagcctggctggattttgaagccagggtgagctaggaaggtccaagtagggacatattaggttgtttggtttcatttctaagctcatccgggctagatgaagagcttgattggttgtctatgtcgcatgaactagtgcatgcgctcatctgtttggtt

SEQ ID NO: 200208 - DNA, 304 bp, Zea Mays
ttacaacgatgttcgtacaacagacaacacacactaaattacacacctgcatgctacactgataggtgggcctccgggcacgtctcctggtggacctatgtcgaactgatcagcgtgtagccttcgccgacatccttgaagccttcgcgccagctacccttcgtttgacttggccaagcgagggctccgtgtccgaggcacaacgaagggtgacaagagcgtcgcgtccgtggcatacgaagtcttggtcgttaggctgctgcattgcgcgtcccctcaatgtgttgggtccgccggactggag

SEQ ID NO: 200209 - DNA, 457 bp, Zea Mays
gacatggctaaagatagcaatggcaaagaccgagatctgagaaagaggcttgacaatgattattattttaagtgtgcaattgaggaatgttatgcatcatttaagaatatcatcaatggccttgtacagggtgaaccagagaaaaggtccctcctatatttcatctattaaactctgaagaaataatttaccgatccatggtctacttgatgctgtttatttgctttcagggtcataaataagatatttgtagaagttgaaaaatgcatctctgaggacaaagttattgcagatttgaacatgcgggccctgccagatctctacttcaagtttgttgagttggtaaactacttggtatgtatgacctatatacttatgttagacaaactacatagtaatagattgtgtataacatgtgagatatttgcattgacccttttagttgaccctcaccaga

SEQ ID NO: 200210 - DNA, 367 bp, Zea Mays
tgtacatgcaggctggattatttttccttaagcatgccgaagcagtaggaaaagagataccagcacaagagcttcatgaaatattattgctctctttacaatggctaagtggaactatgactaaatcctctccgtaagcttaatctttttatttatgttcacattgtgctcaatcttatcttctccttgccgattagcacttccgttttgcagggtctatcctcttcatcttttgcgggaaattgagactagggtgtggctcctggctgttgagtcagagagtcaatccaaggttgatggtgaatttgccacttctgctgttgctcataacaaagctgttggaaacagtagcagtattatagaacat

SEQ ID NO: 200211 - DNA, 361 bp, Zea Mays
cttggggtgattttggtggtgtgggtttggttgatgcggaggcgggagtgggggtggtacgacttgtacctccaggtggtgctgatatgcgtggttaggtagatcctgggcgtggccatggttgtatggttgtgggtggtggtgttgatatgtgtgcgcgacaactctttggttgtcgattggttgtgcttgagacatcttgtccctggtggcctttgttttcgggcaatccctcgttgggtgcgtgtagtcttcgccatgaaacatgcagtaatatctacgcggttgttgcgcccggcctcggccccggccacgcgtgccattgccgcggccctggggggataatcttgacggcgagcgg

SEQ ID NO: 200212 - DNA, 595 bp, Zea Mays
tctgtattggcctttcaaaatcttggtgacctaaagagattgacaactcaggatgcatcactcttttcatttaccacctgattggatacccgaatcatctcattttagatcactgcatgcattaactctagttgagattatgtttagttgctttgtatatagtagtaatgagtggatgcaaaataagctattttgatgctattaacctgcactcacgcatacgctcaaaattgttatatatggctggtcaggacaacggcagactgcgcatggacgcagccatccaatcaggtggttaatgatctttgaaatctacattccctaagacatatagaggtcaatagatgcgaggatacattttttagaggactggatgatggtgttgtgctactcacagtccaatctctcaaacttggacgatttacgcctaccaaaaattctttgtcaaatttgttcaaatgtttcccagcactttcttttttgtatgtgacaacatcatcaaatgaggaccatgaggaagtggtactgtagtttccaccctctagctcgctgacagcattatctgggaactctacgtcaggaagctctgctcatg

SEQ ID NO: 200213 - DNA, 327 bp, Zea Mays
acaggaattcacctcggcatattagcgatgtgtcaacgtcatgggtggatgcgcgtgcgatgaagccggaagagcaagcttgtaaaccattatggtccaatgaatccaaactgatgattagttgtagctttacaaactcccagtcaccaacagcaaactgctgttcagagcgatgcttatcggtttgctacttgaatgcatgctgctgaagcagacataggagtagcagaggcaatgaggccgataaccctcagtgccgaatgggctaactgatgatggacgtaaagttcatcagcattcaagtaccaaaacttaaaccaaattttg

SEQ ID NO: 200214 - DNA, 476 bp, Zea Mays
gcactaaggagatataagccgtgttaagcaggcgaaatttgaaaacatggccacgctggatgacatccaaagccatcaacacatcacctttaataatattccaacaggatttataaaatagacctgtgaaaccatccggccccggggccttatccggaggcaaatcttttacaacagcccacatctcctcctcaataaacggagcatctaatgcagataaatcatgattgtggatggccaactcatccaagtcaagagtgtagctcctctcctcagccttacccaaaatgttctcatagaaatcaaaaacagccttctgtttatcttcttgtgaggtgaccacctgatcaccaacgtgcagcttaggaatgaagttcttctttttcctgtatttagcctgctgatgaaaaaaggaggtgttggcatcaccctcctgaatatacaaaatccgagaacgcagccgggcgatggttctc

SEQ ID NO: 200215 - DNA, 353 bp, Zea Mays
  misc_feature (298)..(353): n is a, c, g, or t
attcctgtgaattggacttggtctgtccagcagcatgccgatggatttgtggtacctttcccctgcaatgttgagcttcaacgtatggttgctatgaaatatgtgcacactgctggaggcgaagggattatggttattcaagagttggatcaaaaaattgagcctgtccagtacctgcagaaagtgtgggttaatgtatatggtgtaccctatgagatcagatcttttcttccactttgggcggttggttctattttaggtgctactcaaaaggtcgatttgcgatacactagaaagnnnnnnnnnnnnnnnnnnnnnnnnnnnnnnnnnnnnnnnnnnnnnnnnnnnnnnnn

SEQ ID NO: 200216 - DNA, 327 bp, Zea Mays
ggggagcaaacaggcacactgtctaagcttttgtggattgtagtgaaaacattagcaagatcaaccgtattgtttaccttgtgagtggaggcagtagagccgtgcagcgcaacctgaacgtcagtggccatcgaagccggactgtctccaacatcttcagatggcccatggcactcctcctgcggccaaacagcggtaacaacggggtctgcaaaagagacagagctgaccttcctcttgggcacccagcacgctgccggcatcgaaccaagaccacggcggcaaaagggtgttgagtgcctgttcctgtcgttggagctgtagcag

SEQ ID NO: 200217 - DNA, 435 bp, Zea Mays
gataaacagtcagacattaacaatgacatctctactgcttgtttacaaaaaaaaatattattttgcgctaacaaacactgatgacttcaacaggtcaggagggtgaatctgcttgtgcgataacagatgtagttaagaaaggtacttatgtctgacatttgtgccaattatgtcataaaagtctatttttatttcgctttggatatgactgatcaggtgtgattactttgttttaccttcttgtttggccagcccctccaaaagtattcaatctaaagattgttggggaatctatggaaggaagcaagatatctgccagtgctactgttacaggtggaactgaagggtccagcagggttcaatggtacaaggcatcttcctctgaatttaagaatgaacatgagcttgaagcccttactccgtcacgagtttcta

SEQ ID NO: 200218 - DNA, 307 bp, Zea Mays
acacttgcggctgcctgccacgcagagttcactgcagtgccgcgagcatgtgattgtgaacgtgtgctacgccagctctcactgaatgattggaaaccacccccctccctccgtgttgcctgtgctcctctgctgtctccgtccaagctcacgagatgcctcgttctggctgggcgtcttctttgcggtggatcgagagcaactattaatcatcgtgtcctcctagccatgcagttgcagttgcagggcaagcgatgatggtcggtccttaatcatcgtgtcttcgggtgattataattgaaagtag

SEQ ID NO: 200219 - DNA, 349 bp, Zea Mays
acatagtctcaatcatctccagccattcttggcaaggctctttaaactgtttctcaaacttgaagcgatagggtaatcgaacaagttcattcttcttctttgttccttttagcttcggcatactccattcactcaacgttggagatacccagttggccaggtattcttgcattagatccctggtgttgatttgttcagccaccactctgaattctgctttggccagcggacatgttgaccctagcttcatgttgcacaagggtctggtcatcccgaagcttaaggacagcgggctcatcaccatcgtcatcagtttccctcttttcttctcatcagccttaatataaaa

SEQ ID NO: 200220 - DNA, 608 bp, Zea Mays
attggacttgggatcgacggtcgcaatttaatgaagcgaggcgcaatccacaccgtaggattgaagatccacggtgtccactcacctacgcgaagagattcatccactctaaccacagccgcacatcacgaaacggacggcggatatctcatccccaagttcgtgacctcgccagtacagcgccgccggaggccacggccagcgcactccggcgagcaaattccggtaaccccagaccctaatcctagttcgaattgacaccaggcaaagtgtagaggaaagcggagcggtcgggggggtgagcttaccaatgacggcggccgaagagtctctgcccacgagatgggggtatcccgcggcgagcttctcacaccggtgagaaattccaccccacctggtcacaggcggcccctaattcctcctctaccacctccgccgtggcacagcgaagcgccaaagctcgaccaggttggttgaataggcgcgtaggtgccaatccacggtggaggtcacgcaaacgttcactctgcggcaacgcggcggtggcttgggttgtgcggcgatttctttcctgggaacttctgagtgcaggaaagcgggcgtagttg

SEQ ID NO: 200221 - DNA, 378 bp, Zea Mays
tattcttctgccctgttgctgaatgtccctgacccatctacttacaggtagtaaggcaagttacaatcctgatgcagatagggcacttgttccatacaaggtgaatttgtacagataaacctgcctcttctttctgcaaaagagtaatggtatatgtgcttatcatgttctgagattccatattcttggcaggctggtacacaaccaattccaccattgcagaatcatgatgctacacaggaggagaattcaaagtacctatgtctaaagcagcatgttttgttttctgtaatgtagtacttaacgatgccatggatgacaattggcagtaaaactggtctacatggataccaccgtgatttaactagaacttatttt

SEQ ID NO: 200222 - DNA, 311 bp, Zea Mays
aagaggtatggtttattatcagccgccagatcagaattgaacgaccacgattagatcatcgtagtatgcttatatgaacccatagatccggaaccgagggtggtgattcaaagtaacatgaacccgatcctgaccctagacgtgaagatcaacggtgtggaagcgatcaacccgaaacagtgtcgacgttttaatctcgaccgttcacggatggatcaccggtccgcgactcctcgcccatccattgccgatccaacggtggatatcggatcccaccgaactacatccccgaccgaatcccagccgtccgt

SEQ ID NO: 200223 - DNA, 387 bp, Zea Mays
cacaaccaaaaactttgaggtgtgcataggaaggtgtagtggtgtgaaggtggaagaagggggtggaggaggcgagggttttggtggggagccggttgacaaggtatgtggcagtgtggagtgcctcaacccagtagaccggaggaagactcgcctgaaataagagtgagcgcaagatgttattaatggtacgaagagagcgctcagctttgccattttgctgggatgtgtaagggcacgacatgcgtagggcaacaccgttggaaagaaagaacgtgcgggccgaggaattatcaaattcacggccattgtcgcactggacgcttttgatggtggtgccaaactgcgtgcggacataagcaaaaaaaatgagagagagtagcaaac

SEQ ID NO: 200224 - DNA, 675 bp, Zea Mays
attaaatgggttctggactgggcctcatttaccaggaaggacaggggccaaaacagaagaattcctaagactccgaatacttctgccaggactgcgggttgatttgactctcttccggggtctctttagaaaatgttacaccgcgaaggggtatctgttgatatgggccgtcagattagaaacggacgtcccagattaaatccgatcaacccgaaccggtatgcagtgagggccacaggatgatccatcaacggcccagattaaaactcgcccagatccacaggatcggagaccaaaggccccgattcactcctgctcccacgatgcgcacgcctgattacagccctccgttgccaatccaacggccaacccatcttcttctccaacgctacgcgtatacctggcaccatttgcccaacccgaacgcccagtcggccgcgatgcgcaacaccaagccaatcccagctaccggccggcacagtccaggccctacacatcgacaccgccataaaccgagcgaccatagactcttccccggcttcgcatggatggacgtcgaaaggagaaacggtagattagggagaggccataccgcaggttcgccgcacaccggggcttccgatgagcgcacaggtgatgggggatggcggccacgggagcccggttttatattcg

SEQ ID NO: 200225 - DNA, 326 bp, Zea Mays
cgctggtgagcttgccctctggtctgaccagcaccttttccccaatgctctcctcggtcgcaccctgtttcgccatccatactcgcccagtgccaccgcgctcggctcccctatgcatggcctcgccaggatctcagtggttgcccaccttggaagctcagtatgtcgagttccacaacacactccatcgtgctcagacaacgaagcttggttgtgtcgattgctagttgcttgatgaaatgcctaacaagaaattgaagaatcaatcgaccccgtgtttgaccctggcgtcttgccccgtgatggttctcgttgctgattcctcg

SEQ ID NO: 200226 - DNA, 492 bp, Zea Mays
ccggcagagatgggatctgggattatggatatattgcatggtctggcatcagttggaattgagaagttatcaatgcaggcaaacaaacttatgcccctagaagatgttaatggtaaaatgatgcagcagattgcctgggaggctgctccagctctggagtctgctgaaaggtttgtaatcttcttttttcatgcttgtttgtgctttttcttactttatcatatgccttgcttaaaggttttctcttttatcaatgcagatatgacccgttggactatcatagcgttgatgctttggtaggagggggtggaaatgctccctccagtaagaagaagaaatgtaggtgtgctgatctttcatcatccttgggtggggagaatgcttcagaatatgtttcacttgaggaccttgcaccattagctatggaaaagattgaagccctttccattgagggtttgaggatacaatctggcatgtcagaagaagaggcac

SEQ ID NO: 200227 - DNA, 453 bp, Zea Mays
ctcgttttaagatcaagtaaggtccaatgaagcgaggggacatcttgcccttatctttgaatctcttcattccccggagtggtgacaccttcaaatagacataatcaccctccttaaactcctgtggtcttcctctattatcagcgtagctcctttgcctggtttgagctaccctcaaattctcctgaattatacggacttgttattctgcctcttgaataagttcaggtccaaagaactgtcttcctctagtcttatcccaatatagaggagtcctgcatttcctgccatacagagcctcaaatggtgacatcttcaaactggcctggtagctattattataagagaactcagcatagggtaagctcttctcccaacttccaccatgcttgagagcacatgctcttaacatatcttccagcacttgattagttctctctgtctgtccatcag

SEQ ID NO: 200228 - DNA, 606 bp, Zea Mays
gctatatatcagaatgtcatcaaagaataccagggtgaactttcggatgaaaggcttcagtatatcattcatcagagcttggaatgtggatggcgcattagtcaggccgaacggcatgactagaaattcaaagtgaccacaatgtgtacggaaggctgttttgtggatgtcatccgggtgcatcctgacttgatgataaccactccggagatccagctttgtgaagaaacttgcacctcggagttcatcaagtagctcgtccaccaccggaattggaaatttgtccttgattgtttttgcatttaattcacggtaatcaatgcaaaacatccatgttttatctgccttcttgaccaataatacaggtgacgagaatgctgatgtgcactctcgaatgattccttgtgccaacatctgatcacactgacgctcaatctcgtctttaagcagttgagggtatcggtagggtcgtacaaccactggttctgtaccagccagcaaccgtatgtgatggtcttggcgatgtgatggtggcagtccctgagggtcctgaaacaaatcagagaaagaggacaacagttcttccatacaatccctgttcttgtc

SEQ ID NO: 200229 - DNA, 553 bp, Zea Mays
gccgttgtgaaggcacgtctgaatgagacgtttcttatgcttgatcttggtcctttgttattttcttggaattgaggtctccaccacacctgagggcttctatctatctcaagaaaagtatgtacatttagggtcttcttgatcatgcttctcttcctgatcactgtaccgttgagactccgatggagctcaatgttcatattagtgccactgatggtgagcttcttggtgatcctacccattatcgtcacatagtcaggagtcttgttgtcactcgtctcgatatttcttattttgtgcatattcttaatttgtttcagcccccactcagcttcactatagtcacctgcttcatgtcatctattctttccattctttccacatacaagttctttatagctctaggctggctagtgatttctctgatcgccaatctctttctacggattgtgtttttcttggtgtctctcttatttgcttggaagactaaaaagcagacaacagtttctctttctagtgtagaggccgagttgtgtgcttcagctcttgtgac

SEQ ID NO: 200230 - DNA, 574 bp, Zea Mays
atcgccgctaaatgacatacacgtcaacttgccttttattgccgcaatccgagacacaacatatactacaacatttttataaacccacagattcacaagtatattcgcacaccgaccaaatcatacgaatcgtaaactactggtctccaactcacaatcaccatgcatttacttcccaatcatgaacacatacatgtttatcatacgaacagagcatttcaataattatcctaaaacaattaactcctttacacaactcataccacaaacctacttgacttgcttgaagtgtctactcgaatccgtgagcacaatcacacattatatgcgaagcataatttaacgaacacaaaatacgcatcgactcaattcgacttataaatattgagaaagcgatgactacttcggcatgtcaccacctctctaattaagcaaacacaatttcctacttatatcgaccgaacattcgtgtcgagcacaccttatgttaccttgtctcgcatacaaccatgctgtggcatgcactcgagacactaccgattaacttaacgcaattaccaccacaatgcacttc

SEQ ID NO: 200231 - DNA, 513 bp, Zea Mays
cgaatgggggcgccgggatagagcatcggcatctttgttctcggatccctgtttgtacacgattttgtactgtaatcccaacaacttggtgaacactctttgctaccacggagtgtgcagacattgatcagagaggtgggcaaggctgcgttgatcagttttcacaataaattctccaaactgcaggaactggcgccactgttggactgctaagagaatggagaggtattccttctcgtaggtggataatcccctggttttaggacccaaagccttgctgacataggtgatggagtggctgttttgcatgaggactgcacccacactggacccgctggcatcggtttcaatacaaaacggctgagaaaaatccgggagcgccagcaccggtgatgactggagggctgtcttcagcgtgttgaaggccgaggtatgcacttgagtccagagaaaaactgcagatttcttgagcagatctgtgaggggacggctgataactccgaaattacggac

SEQ ID NO: 200232 - DNA, 359 bp, Zea Mays
cgagctatctgctgcacaagctgaacgggattcctataggcatgaaatagaagaattgaagtcatccttacaagatgtaaacacacggcaaacaattacaggaacacctaaacgttcagactggatagacctgcagaaggaacttgaaggtgaggtgaagtttcttagagaatcgaatgcggacttaaccatacaactaaacaggactcaagagtcaaatatagagcttctttctattcttcaggaactggaggaaaccattgaagaacagagagttgaaatatctaagatttcgaaggtcaagcagactgctgatcctgagaatgggcttttagtaaaagaagacaaagaatgggcta

SEQ ID NO: 200233 - DNA, 314 bp, Zea Mays
cgtttcgtcatctatagtccagtacatccatcctcatagtttctgatctcgtgagcctggaaaaaaagcaagagaaaaaactttatcacgtctcacccccacaccatatacctcgccacacgtctctgcctctctcctcaccatatcgtcgtccgtcgtctcaagggcaaaatcgtaggtgtaccatgaggtgtagcccactccgtgtgatccaaaccgtggagcacgcatttagatccgcgtgaggcgaactactgcatcctgccgcacgcgatagggatcaagacaataattcagaaaatccttgtcggcta

SEQ ID NO: 200234 - DNA, 376 bp, Zea Mays
gtgcgttgatgttgaataggtttggtggagaggtagatggtgttgatgttgtcgcggtagacaaaggtgcatcaggacaacgcacagtgcagtttctggagaagctgacgcaaccaggaagcttcaacaatgccattattgacggcgcggtaatccgcctagtgctcaagcatgagacaacattttgacgcttggaggaccaggagacaaggttgccactgagaaacatagcatagcccaagctggattggcttgtatccggataactcacccagtcagcatcagtgtagaagacgatcccggaggtggagaggcgaagaagcacatgatttggagtgcccaaaagatagcgtagaacatgttttatcgccgtcag

SEQ ID NO: 200235 - DNA, 506 bp, Zea Mays
ctttgtttcctcccctgcccctggttgtagtacgtaccatacatgctatggccttaattgcttagcgggcaatatgcttgattgggtgcatgcaaggagaaaattttggatcccgtcgtactcggctgctgggcatgcatgtaattgtttcttgcacatgcaaaggacagagaaaggatttgtttatccctcctaatgtccaggcgggtacaatgtttggacataaacaaatttggttccgcgcgttgctgcatgcaggttaggatactgacatcatttttgcccataaaaaagcacatccaagtaggcatacctggaaacgaagcatgcatgggtgggaaggaatcgtgcatgacgtattcacttgagcacaaaaggaaacatgcataagcaagataggaaattaatcacacaaccacacaaggaaactggcatgcacatgggtgcaaggaatcatgcgtcatatacgtctagggagaagggtacatgcgtctacaatgggatac

SEQ ID NO: 200236 - DNA, 287 bp, Zea Mays
ggagtagtagtgacccgtccgtccatgctaagcaagctacaccggaatgcgtcttggcggccatgcatgggtcaacgatcgagatcgacccggggcacgacggcggccgacggcggcgagcagggagacgatcgatccaagaggaggtgtgtccgtgcgtacgtgtgtgccgtgtgcacacggcagcgagcagctagggcatatgcatcatttcagaagagaactagctactccgatcaagatgagcgacgaaggattgtacgtatattgctgagaggagatcgagg

SEQ ID NO: 200237 - DNA, 433 bp, Zea Mays
gccgccggagctcgcgggcgttggcggccgccgccgtgggcgtatcactccggtgtggccggctcggcatcgatttcttcccgtttcccctggtaaggaacccttgctttgattcgatgcgctggtctgttcttcaggctgtcttgccctccgagagataaaatcaaaattccacctttttaatccccgtaccgtacgcatttgctgcgtccccggtggtaccctaagggcataatattggaaccataaatgtgtgagcaatttgcattgttgcgcaacttgactaatccatcccgcatataaatggggaaattttatagctaaatccaatctgcccttttgctgcaggaccagggaagggtatacaattacaatgcatgctcttgatgatttgtcacagcaatccccttcgctccgttattagcgaagacag

SEQ ID NO: 200238 - DNA, 333 bp, Zea Mays
ctggtagaatacatgaggctgaggagttgattggaagaattgctgctgaggaaagagatggtgtggtttggacatccttgcttagggcatgtgctgctcgaggggcagaggaaactggaaagatagctgcagagaggatgatggaggcagagccatggggttcaggagcacatgtggtgatggccaacctctatgcaagcaaggggctgtggtgtgaggcagcacaggaacgccatttgatgaagcagaaaggtgttctaaaaggtgcagggtggtcatcagtcgaagttggaggggacgacaggggggttggagtgtttgtttcaggagatc

SEQ ID NO: 200239 - DNA, 558 bp, Zea Mays
agctcaacttgtgggtattctcatggaagtgtgtaataatcccaagaaccctgacttcaaccattacttgtttgaggctctggcagcagttattggccggactggtgagcaggacccaacactactccctgcttttgagaccagcctctttccagtgctccagaggatattggttgaggacatctcagagttctggccatatgcttttcagatatttgctcaacttgtcaatttgagccgaccacctctctcacagaattacatgcagctatttggtgtccttctcagtaatgcaacttgggaccggccaccatgtgttcctgccttggttcgtttgctgcgagcattccttaggaaaattctaaatgagctaaaccaagagggcaggcttccaaatatattggcaatatcccgtagcctcctctcacgcagcagcactgaagattctgcattctacatgctgaacacactagtggaaaacgttggttttgacattctgaacccatatataagtgagatatggagtgctttgtttactcggctacagactagacagac

SEQ ID NO: 200240 - DNA, 311 bp, Zea Mays
cttgggcggtggcgccacgtaaggttgttccaccccgacgttatccgttccttactgagccaaattgcgacggcggcgacacgaattgcggtggtgagtcaccgacggtgagatacacggcaccgcagatcttttgttactgtaccatggcaaagatcatcagccgacctgacagcgtgatttgcagggctatttactcccaattttgtgtagtgacggagcaagcttcctataccaaagttatagccccatgttccagctacaactttgctatgggaatcatacccaaacttgcactggatcttatttaa

SEQ ID NO: 200241 - DNA, 378 bp, Zea Mays
cgcgcccttagcgtatgtttgggttagagacatagtgggatgggacggacccaacccaacttttagagacggtattgaccttgttatgtgtttgttttagaggatggaaccatctctgatctacatttggttgagggatactaggaagtgggatgaaccatctgttgtgtggggcccatcatttaatcttttgtttttcttcctttgtcaccatagcttttcttcctctgccaccatggatttctgccattcagtacatgccgaccagtacccgttcaccccctccctacccgccggaggtcgctttgcctgcacgcgtgccaaggcttgcctctcccaactcgctgttggatgtcatctaagctgtgctcatgctgg

SEQ ID NO: 200242 - DNA, 413 bp, Zea Mays
aggggagatgctaacggggccagcaagggctttatttatggacgaaatatccactggtctggatagctcgagcacatttgagattgtaaagtttatgaggcagttggtccatgtaatgagtgaaaccgtcatgatctctctgctccagccaccgccagagacatacaatctttttgatgacataatcctgctatcagaaggatacatagtgtaccatgggccgcgcgagaatatcctagaattctttgagtctgccggtttccggtgccctgacaggaaaggtgtcgcagactttcttcaagaggttacttccaagaaagaccaacaacaatactggtatcttgatcaggagcagtatcattatgtatctgtacccgactttgcagaacgtttcaaatcattccatgcatgcc

SEQ ID NO: 200243 - DNA, 1331 bp, Zea Mays
ttcagcacggtcaagcaggatcccgacaccggtggtagcagcagtgatcacgggcaggtggtgcttcaccatccgcagccgcccgacttcagccagaccgagtgcctgacgtcgctgcacctgccgtcgcagcagttcccgtacccacccttcgaccaccacggcctttacagcgaccgaattttcaggccagacgcagttgagctgcacgccggcggcgtcgccagtatggactttctcagcggtcagtacgacttgccgaggcctggcgatgatgccagcttccataactgggcgtcagctgcagcatgtagtgcaaccatgttcgaccagcaacagcaacagcagcatcagcatcaccagcaaccacaatcttcacctgcacaagtgagtgcataattacaaaaccaatctttcgactgttcgttctgccgcatgtgaacttgcttatctatctatttgctgtcacaagtttatagctccgctgaaacattttccgatacatatttttttttctcatctcacattagttgacccatttttatccatgtttattaagacttaattcaatccacagtccatatcaaactgatttaagttctgagcaattctatgggcgatgagagctttccaatcattgtttaaattcatttattaaaatttaaaatcatgcagaaagaatgtgcagttatgatttttttttttttttttgcctttggcattatatgttttactgatttcggtatctcttgtggaccatgactgaatctctaaccatcagcttcctgcagcaacaactctagcaactgcctcgttcgatcacgccgtttatcacagttcatctcagcaccaacaagtcatgatcggttgatcctatatatggtaaaaaaatcggagataatattgccctccaaaaggtgctaccctaaactaatcatcaatgcaaaatgtgtataggcaacactgtcgatgtaaaatatatatttattgtagctaattctttcttgtaagtatctatctgtctcctgtatactactggtatagctttcataaaaggattgggcacttaactattagttcataggcattcatctttgcatgaatgaatatatttgaaattttggccaccatgcatggcctttcctttattgtactggttcacttgaatctctctttttaatataatgatgatatgcagttctcctgcatgttcgagaaacaattaccatggttaaaaatgatattgtggttttctaactcatttctatacgtatggaaactaatcattgtattcatttgtcagaacagtcagttgcatcttggaaaaaaag

SEQ ID NO: 200244 - DNA, 275 bp, Zea Mays
ctctgcgtacacggttcggtgcatcaccagaccggtctggtgagacctagatagttgagacttaatcattttcaaccaagtttttcaactttacttgccctttcttgtgagcttccctatgacttagacaaacattgttagagtataatcaattaaaattagtctaggaaactcgcctctttctcaacttttcaccaggatttctggtttgcccaaactaagtccaaaaggtacttttctctacaaaatgcgttagagtgcaaacacaagtgcta

SEQ ID NO: 200245 - DNA, 370 bp, Zea Mays
tccagagtctaattattcagatcgcgaacctatcatttgttgtttggatgaacattgtagatttactcaaagtgttctggacatgacaactgcaccttcactactgccttggcaccataaaaaaatgttaacagaaagcaatttgactaatggttctcagcaatccatgtcatgtactttggatgaggatcagcagcagttggtaacagaacatgcatctgacacagtttttcatgctccacctcaagtttgttcacttaatctcggttcatcacctgatagtccattggatatggcttctgctagttgtgcaaatccatctagctctgctagtagggaatccaatattgctgaaaggaatgtaagcaca

SEQ ID NO: 200246 - DNA, 287 bp, Zea Mays
cctcacaggcaccaagctgcacatgacgtccgccttccacccgcagtctgatggccagacggaggtggccaacaaagtcatcgtcatgtacctccggtgcttcactggggaccggccccatcagtggctacgttggctaccgtgggcggagtatgtctacaacacggcgtaccaatcatcacttagggacactcctttcaaggtggtttacggcagggatcctccctccatccgctcttatgagcctggcgatacccaggtggcggtggtggccaagacaatggctg

SEQ ID NO: 200247 - DNA, 326 bp, Zea Mays
agacagagttcctggtgtagcgcctgcatgacctagaggaggagcccttccatgcgcgggcacaagagctccatcagcgcgtcgctctcgataatagacacctgcatatctgtgccacccgttaccaccggagggtccccggagcttgacgccgggggaagaccatacgatgccgacaaagttgctgaagatgggccatgctcctgcatggtgagcacgactttgggcggcagcacagacatagcaccgccatggttgtggcctccagcttgggccgctctagtggcctctagtggctccctgtccttttcccacaacgcgagctt

SEQ ID NO: 200248 - DNA, 368 bp, Zea Mays
ccactactcactaacaatacatcacgcacgacaactaccacatcaaccggttaatttatttggacaccgcctgcctagcgtaccactagtaccccacatttgactcatgctcaacaatacatcctttattcgattatacaacagcgacctaagcgtcatgttacccaatgcgtacatcttttctcgttgcgagtataaccatatcacgacatatacccgcacacctcaatcaaatatcttacgccaccaccactacaatacaccacaacacacacgcacatacgtgtccccgatgcattctcatgccaaattttagcacaattatttatgacaacgtttactgactatgtgggggacagatatccccc

SEQ ID NO: 200249 - DNA, 405 bp, Zea Mays
caatcacctgttgtgtacactgtaattgaaatccatttgccacttggacttggaaaggcttactgattgtggtcacatttggcaaggactgagccacagtagtactgatgaaagagtgtgagctccctgagtccaacagaactaaagcatccaagccagatatatgtcccataaatttcatcgtacggggaacctccagaccagtaaccgctgctttcgacaggtgcaatacattaagttctgtttctccatcagctgtatcctccaccaaatcttcctttggcagttgcaccatcttccacatcttctcaactaagtgcaactgaaccgagtcagctgttggaacttgctttctgctgcaaggggatccagcggtgggagtagtaacttaaacagggttctcgc

SEQ ID NO: 200250 - DNA, 2215 bp, Zea Mays
cagttgttcgctgatgttgcaccccttgtgactgagaacttcagagctttatgcacaggtaaccttctcaccacttccttttcgtcaaatcagtaaaagttcatctgttagttagtgttacttattattttgtaaattggtttatgtggcaattggacatgttgctcgagatttttaatggtcgtggtttcacataatgcgttcatcaaaatacttgcgtttttattgtcagactattaaatatttgaagtagcatgatatgatgtaaaatgctgtaaattcacaaagccacactcttctgaaattataaaaaactgacaattccaagagcttgctttgagcaacaacactttttattgcctacggcgtagagcgacacccttttagtgcttggaggttactgagtagtaaaacactcaagtacactggagatttagaccatgcttagtgcttacaatggccacttaatgacatggtgctaggaaataggaaccaagtgcaaatcatgtcatattgtttaggagggattgtgatgttatcaccaaattgctagggttatgctacaattgcccttgtttatccagatgtgggtcatatccagggaaagttagatctgttgacgccccatccaaacagtaaaaatgaaaactgtttcactgagagtttctgtggtgaataatgttccagtgctaagattgcaattctttttaattttaggaaactacaagtttaatttcaagttcaagtgtaactttcttttaattactttgggatgcttgtgaaattttactctgattgaaataggccacagtttttctgctttgtttaatttcgctccaacgattccagttgttgaggaaatatttttcctatatttatgtacaaatgctttacttcctatccttactaatacaagcccattaggacattgatgcattgtccaatgcttaagtttgactagcaatatcaagaaaaatggataatatcaaaataaaagagttcatattttgaaaatttaccctgatgaatctactaatcgagatcttctgttgcaaatctttgtgaattatagatattgatgtttggaactagaaacaatttgacctaggacaaacttaaatgaacatgtacttgtggccaatggaagtaatgtgtagcttctttttgcaacattgaagaatgccgcaataatgtcttctattactgctcctactactgttttaattatctgcactaggcaattgtaactgatgttctggtgatactaatccttctatcatcacttggtagtcctaatgatttttattgttatttttttctttgcttaaaacccactttggaatatcattcaaacttccactctgtcatctttcaagccatatccaatgtgccattctgtgattctgtttgaatatttccgaaatctgagaacctaatcttttctttctgtgatgatcaaagatacacatttcgatgttcattgtttcataggaatttagttaatttcctggcaaagtaattctgcatccttaatggttgactatatttttatatatgtttagctttaatatactggactacaaatttatgatctctttttaaattatgaaacttcattttgaatttttgagcaaggtgattatgttactacaagggagtctcttacagatttcatgtaaagttggatgcatgacataccggttgatgtttctattttgaaaagttatgttttggcagacaatttgttataatattcttcggtttatgacatcaactaaaatcaggatatggaacgaagattctgaacttgtgtacatcagtaaacacatacatactcgcattcgcatgcaattagtataacttgggctgtagactttttagtccgtttcttgtcttgtaagctttccgcctaatttatgcataaaaagctattttgatgttgatctgagcggttaatatactaatatgtgttttggaaatcttctgataatgtagtgggtacctttgttctttgtgtcacagcccaccttgtgcttgtgcatagacaaatccacagaatatattccattctcagtttaaaaaggcctccttatttcctagcattgttgctcttaattgatgttgcacactttaggtgagctgggaattggacacaagactaagaagccattatgttacaagggatcatcgttccaccgtgtcatcgaagggttca

SEQ ID NO: 200251 - DNA, 279 bp, Zea Mays
cggcagttggatcacacccattggggtcagcgtcagtaaattcaggcacgggaacttcttcagcagcaggaaccgagggaccagcgccccgatccaaactagatacttgccgaagacgtctctttttccttttctgctcatcagcagaaggatcaagttgattggctcggcgagggcgtctcgggcgaacactgacaggtctttgaacatccaaggttgtaccagcttctaggagaggcgccaccgccaatgtcccagcaggagcaacatcagaagaat

SEQ ID NO: 200252 - DNA, 516 bp, Zea Mays
aatcaggttcgtttactgtttcactgggtcactgactgtttgcacaagagtccttcctcttctacctattctgcgtttaaagtccccgacgccgttcaagcgcggccgtgctccggcgagccagcagaccggccgaacgggactgtgaccggtgcctagctttggcgtaaaccgaattcactacctgaagaatgtttcccctaagttaatttgaagaatggtgccctaatttgccctgaccacggcaaccgtgagtattgcggctaggtggtcgcgttcccggcgaccataggatttctaattcaattgcatgcgtcggtgagtttgagggaagcttaaggatgctaaaacgagattggggagggcgtgatcggacctgaggagggctggccacgacgagcttgggttcatggcgttcttcaaccggtttgggggaaattccaaattcaagttctctggtggggggtttgggatgcaggtgggtgcagtagatgcttggatgcatggcggagctgg

SEQ ID NO: 200253 - DNA, 434 bp, Zea Mays
ttctcttctaagatggcatgacgaggagcgcattaaggatggtgcattaagacatcctgctgatgcaccggtgtggaagaggtttgatgaaaagttcctaggatttgcatcagaatcacgtaatattcgttttggtttggctactgatggatttaatccatttgggatgatgagctctacacatagttgttggcctgttatattggtggtatataaccttcctccatggctttgcatgaaagatcacaaccttatgctctctttattgattcctggtcctaaaagtcctggagatagaattcatgtgttccttgagccactcttggatgacctaaaggaattatttctaaccggcttgtacacatatgatgcatcaagagatgagagttttactatgcgaggggccgtgcttatgaccataagtgaacttcctg

SEQ ID NO: 200254 - DNA, 382 bp, Zea Mays
gggtatggctgcctcaggttcgttggattagagcccaacggctcagatttaattaggggttttaataatcaccaagcgctcaggaccagaggatccacgatcgacggcttggatcgcttagacgtctagatcgcgagcgaacgcatcggaaccgctcattcacagatcgacggttaccatctcctttcttctcgatctaaactctaggcattggattgccatccaacggttaccaacattccccgctcccatctaatcgtggccgaccaacccgagatcgacggtcaacacatcatcgccaccgatgggtcacacgccgacgcactccagggagggatgcggtcaccgacggcggcaccatggccgggaggttccccaagcc

SEQ ID NO: 200255 - DNA, 1685 bp, Zea Mays
acatgaaactgcaaagatgtcacatcaattattctgctgccgctgctgcttttgttgtttttgatgtgcaaccttgccaactttactctgcaatctacatttgtatgattgtatctactagtttgagcatagaacaccgcaaatgtttagatacaataatcaagtgctgaaatgtgaaacatttctaatttaaaatattttctaacattcaaattcaaatatttattataatgactatattttgcaggtacagaactagtcgatggtcttatgcaggtattctggtgtatattagatttagacaggccggacacacagacaataaatagtcttgttgtgccttgtgtggaatttatttatagctatgctgaatgcctggctttgcattccaatgaaaaaactagtgtgtcagtgggacctgcagttgctctgctgaaggagctgctctttgcaccatatgaagcagtacagacatctagcaggtgattttctcttctactgttcatacatcagtaagagtaccacaattaatatttgctagtttttcttttgtttttgtatcattttctcacttgtgttttattgctgctttccagtttggctatctcatcccgatttcttcaagtccctttccccaagcagacaatgatagctaatgatgatgctcctgaaaaccaagctaaagcaagtgcttctgctatgaattcaaccagtgcaaactctcaggttatgattgaagaagatcctgtcacatcatcagtgcaatattgttgtgatggctgttccaccgttcctatacttcggcaaaggtggcactgtagcatatgtccagattttgacctatgtgaaacttgctatgagatacttgatgcagatcgtttaccagcaccccattctaaagatcatccaatgtcagcaatacctattgaagttgatacatttggaggtgaaggcagtgaaatccatttctctgtcgatgagctaacagattcaggtgttcttcatgctgataggagtgttcagacctccccatcatcaattcatatatttgatgcaagtgagtctgcagacttacctgagactattacagaccaggcaactgtttcgatttctgcatcaaaacgtgccattaactccctggtacttaaccacctaattgaagagcttagaggctggatggggaccactgctggtactcgagccatacctttaatgcagttattctacaggctttcttctgctgttggtggtcctttcatggatagttcaaagccagaaaattttgatttggagaagtttgtgaagtggctaatggatgaagtcaacataaataaacagttccctgccaaaacacgatgcacatttggtgaagtattgatccttgttttcatgttcttcacacttatgttccgcaactggcatcaacctgggagtgataattctcattcaaagtcaagtgggagctctgatttgacagataaaggtcctgctcaggttctgggatcaacaacaataactcttccgtcatctagtgctgacctggataaaaatgagtttgcttcccagttagtccgtgcctgttctgccctcaggcagcagaaatttttgaattatcttatggatattctgcagcaacttgttcatattttcaagtcatcatccataaatggagaagctggttcttc

SEQ ID NO: 200256 - DNA, 343 bp, Zea Mays
atttgggaccgccgtctacatcaattattctattgtaaatctgtcaaactagaaagtgtttctaattacaagaatcttgctgatactgttgatgggatctgtggtgataaattcggtgttgataagaaaattgatgaatttacatatgatgaaactacggcagctttgggggtagccagtaccacagaacctgcaagtaacaaacttgaccatcaatcaggggatgctgcagcatccttacttgatgaaagccaggaagctgggcactcagaaattccttgcaatggaggtagtaaagctgagaaatcttccattgctcatggtcaaataaaggtagatggca

SEQ ID NO: 200257 - DNA, 390 bp, Zea Mays
ctatactaaagatgtgtctatcttcaatgagagggtgcagctcaaaaccagagagagcttaaagtaatctgccggtactccaacagtaagaccacctctaatatcattaaatccatctgttgtttaacaaggcctcatgaaccgttctactttttgctatcctctttgggattatagaaaataggctaggggcaatgatcgagatgcttttaccctgcaaccagttatcggaccagaagatggtactatgtccattacctaccatcgagacaaggactttactgaagaacgctctagctttacttggaacctgaataggaagtcatgtccaaggtcttctagagtcggttttttgtagccacaaccatcgcatccggagggcccatccaa

SEQ ID NO: 200258 - DNA, 489 bp, Zea Mays
aagcgatccactaccacccatatagcatccctgcctcgaggagaacgaggtaagcccaccacaaaatccatggtgatatactcccacttccactctagaatttccaatggcttcaataaacctgcaggcctcttatgctcggccttcacgcgctgacatacttcacaggcggccacatacttagaaacatcaaccttcatcctcttccaccagaagttttgcttcaaatctctgtacattttggtttcgccagggtgaacggtgtaaggcgttttatgagcttctctcaagatatccatcttcacctctgacttctgaggcacacaaagatgacccttgaaacgaaccaaatcattctcatcaatggtgaactcacggggtttaccatcgccgaccctctttcgagcttcctgcaacaaacgatcctgctgttgagccacgcacactttctcgagaagggaagattgaatgagcatccgagtctcctct

SEQ ID NO: 200259 - DNA, 568 bp, Zea Mays
acaaggtctgtaccggccatggccgacaaagattgctcaagctaactatctatgaggcttcactgacctacaacggccttagaacgcacactaatttgacccgaacaccccgagaacgaccggtccacgtgcacggcggaaaccgagcacgggagtacacgttcccgcggattgggagtggtctagttcgatttaacgggtcggtgagcatcaagagcaagcaaggatgttgaaacaaggaaaccgagggtgagattggacctgaatcgggctgaccacggcgaggtcaagttgtgcggtgttcctgagcgttttgggggaaatctcaaattgaagctttctggtggaggatttgaggtgcagaagggtgcgctagatgctcgaatacataacgaagctaacggtgcactggatttatagactccgggggcggtggctctcaatttgaccgcgatgtgttggcggccggagacggggaagaagcctggcgcgcgcggttacgtgtccctagccgtggcgggctcatcggcgatgatgggacggcagtagggaattacggcggtgccgt

SEQ ID NO: 200260 - DNA, 323 bp, Zea Mays
ctgtatgatctgaggatgcgagctgaggtcatcgttgtgaccatgaagtcgatggaagcgcactctgagatcagccctaacgctaagaaggatccccaggaagagtacgcgagcgcccaggatagaatcagagcgtacctgtcgcagatgaaggaggatgcgcagagggaaggtcggccattgatggaggacggcaggcaggtcgtggttaacgaagagaaggtcgagaagttcctctacacgatgctgaagctgaatacaaccatcgtcaagtactccatgatggcagccgtggtgctggtgagcctcccgccgccgccgct

SEQ ID NO: 200261 - DNA, 339 bp, Zea Mays
gacgaagagcagcctatccttccaaccctgcacgatatcatccttcagggactgtacaaggtaaagatcgtctacaaaggcgggtgtgtacagaatctagcatcactgttcatctggtattgccatgggctggaagagctgattactgttagtgaagaacaagacatggcggcaagcggtggcggaggacaaggttcggcagcgtttagagtcatcacacccttccccaacctcaaggaactgtacctccatggcttggcaaagttcaggaggctcagcagcagcacatgtacactgcacttccccgcgctggagagcctgaaagttatcgagtgcccg

SEQ ID NO: 200262 - DNA, 1218 bp, Zea Mays
tggggatattgatctaactgtccttggaaatacatcttatgatagtactttggttaatgatgttttctgcattcttgagtctgaggagcagaatagtgatgctgaatttgtagtgaaggacttggaacgaattgatgccgaggtttattctcctatatacacatcctataccttcctagtgattcgttttggatggttgtttaggcaatctatgatattgtaatccgagttcttacttggcattttcattctgctcgcatgatagttaaactgaaagctatctgtccctcatctttctctttgacatgttattcttattgtttttcacacccatctaattatctgaaattcatgtccatccaggtcaggctcattaaatgcactattggaaatattatagttgatatctcattcaaccaaactggtgggatctgcgcactctgcttccttgagctggtgattaacacattttattttgtggaaatcatatttcaagaacacactcttcttcactaaaagcccttctggttaaataagcacttagctcattgaatgtgtgggttgttcaacattggtttcttgtgctgtctaggtgtactttcattttattatcataccaagtcatagcaaataaatgatgattccttcgtcaggttgatcggaaagttggaaaaaaccatctatttaaaaggagcatcatattgatcaaggcatggtgctattatgaaagccgcctactaggagctcatcatggacttatatcaacctatgcactggaagtacttatcctttatgtattcaatctattccacaaatctctccacagccctgtggaggtatgtcttaaaagatttacttatttcagatatattttctcattatataatagaaaagctcatgtcttgccgtttccctgtgtttttattaataggttctttataggtttctggaatattttagcaagtttgactgggacaactattgcataagtttaaatggccctgttgctttgtcgtctttgccaaacttaattggtgggctacctttcatattttcattggcagattaatgtattgaggcatattctctaagttatctcgaaattttatcctgcttgcagttgaagctacagttacacataccagtgacttattgtttgacaaagaattcctcaagagctccatggataaagcaactgtacctccaaaaaattccgat

SEQ ID NO: 200263 - DNA, 529 bp, Zea Mays
gaaagatcgttatcatggcatgtcagaacgatggtggatcattgttgaggtgtgtgattacatgtattgtacttatatcagaaagatggtgcaaaatttatttcacctgtctttcactaaatttattatcttgttgccatgccttttttgaggggtcaagagactgtttcctcttttctaatcttctttatggggtcttttggtatgtaactgaacaatgcaattatatttgctttgcttctaactttgtgaggagacacatatagacctagaaagattggtagtaaatgcatagaaatgtcattattttcaggaacctcttatataaaatgcgatgtgcatgcaattcttttaatggtcatataaatttgcacctttttaaagattaccaatttaaactttttgtagttgattcctatcgcaggcatgcagtggtcagtactcagtaacattaacattttattttacaggattctgaaaatgataccatttatcattcagagctattcacattaacgaagaagatggc

SEQ ID NO: 200264 - DNA, 328 bp, Zea Mays
gtcatctcataatctgttggtgctactggaaacacctggggcctgctggaaggaggcaacaggctagaaccagatgtgtgaccttgaaaagcataactaggcgcagcctcctcagatccatggagaagttgtgatcctgatgtgagagaaggtatcctggaatttgaagcttccactggagtgtcatagtagtgaggacttgccctctcatatgtatcacttggttgctcaggaaggaactggtactcatggacagcccgtgatccaacatgaggttggactacgggagaattaccaacagttgattttctcttcccggtaaacgaat

SEQ ID NO: 200265 - DNA, 308 bp, Zea Mays
taatgggttgatgcccttcacactgtgacatatcttgtgaatcggctccccactaaaacacacgccttctcgacaccacatacctccctctacaacacccaaccctcctatggtcatcttcgagtttttgggtgcacttgttatcccaacatatcctccacaacgcctcagaaactcgccccgcctatgcgtctttctcggctattcctctcaacacaaatgctatcggtgtctcgagcttcagtcgatctacatcatcgtttctatacatgttgttttttatgaatctttctttcctttatctgaca

SEQ ID NO: 200266 - DNA, 302 bp, Zea Mays
cttttcttttgtctttctctcccctagattgctcttcttccctagactggagtatatatgtcgaaaacatggggcatagtttggcatggtggtgcttctggtcacttgcatgcgtacctgcctgttactcgctcgcatggcaagaaagctcttctgaatggatcgcgaaagatcgaggtgtgatggcgacatgttgcacgcccagaacgcccggcctcttacggaacatcctgtagtgtaccgtgtacgtacggactacggagtcacatgaatgagccggtttttcttctgctgcttccttg

SEQ ID NO: 200267 - DNA, 683 bp, Zea Mays
tgcaagtcaaattcagtctcaaatatcattttcttttcgtgttcaccttgttgaagaatggggaaaatgtccaattgccatctacaattttagcagcaagacttcagcatgtttcttctgattcagttgtcacaaatagattcaagcaagtatctgttgcaattcatgtaagtattggtccctctgcaattttgtgtttcagtgcaaaaatgcatgtaactagattattggctggaacgaaatttgcagttttggacttattttttatttacacattggagttcatgatgacagtgtacctgctgccatgtcgtcaccaccactgaggctgattattaggaacttgcttactgtcttatataatttgcatgcattaacaattatttacatgttcaatcatttgtacatgtaattgttttctctgttgaaagccattgcaatgcatgagcagttttggtagtatgtaaataatgaagcatttttccccaaaacaactgcagtcattgaatgtggatgaaaaatgggaaggggcttcaattgggacaattcttaggaggaacaagcttcaggatgctactctcgatgaaaatattcttcgtatgatctttgtactgaattcaactgactccagtgtcaaacaaatacagtattgtgccatcatcctacaggtaacttaaatggcg

SEQ ID NO: 200268 - DNA, 282 bp, Zea Mays
gagtttcactaaaacattgaaaactaaaacaaatgattatgcgtgtagagcttcactaatgttatctattcatcactaatgcatccgggacatacattatacatgaaaatggacattaattttaccttaatgtttttacacacgatttagccttttcatgaatataatcttcattttttccttgcagacagcgagtgtggagtaatctatagtttattttctggtatactggttccattgaagaaagatccccgtgctccatttcaccatatccagatgcca

SEQ ID NO: 200269 - DNA, 361 bp, Zea Mays
ataatattgccaaccagcacctcgctggcgagacccctcgctgtcaatattatccccccagggccgcggcaatggcacgcgtggtcggggccgaggacgggcgcagcagtcgcacagaatttacttcctgtttcacggcgaagactgcacgcacccaacgagggattgcccggaaacgaaagccaccagggacaggatgtcccgggtaccacccgccgacaacccaagagttgtcgcgcacacatatcaacaccacctcccacaaccatacaaccacagccccgcccagcatctacccaaccacgcataccaacaccactaggaggtacaagtcgtaccacccccacttccgcctctgcac

SEQ ID NO: 200270 - DNA, 388 bp, Zea Mays
tcagccaccatccttgtggagacactggaacagagtccctctgcgcctctgctcctagtaggcaggtccaaggagcagcagtgggactccagccccatttctatcccccgacagcgtccctaagccacccactatcgagcaagtgagacacaccgttgaggacgatccagggggcaaatttacgtgagtcgttgagctcgctgccggtacctccgaacgttgcggcaacctaggctctcgacaccagaagacctctgagggaagtgtttcaactgtttctcaagagatcaccgagttggcgcctgctgtcagcgcacctagtgcttccggtgctgcaaggcgagccactgtgttgttgtctgtccgctccatgcacccctagaaaggc

SEQ ID NO: 200271 - DNA, 290 bp, Zea Mays
caaagcgatggcagcttgggactatggagtggcatgtggatgggactagggttagtgctgatgtcgtgatggtcctttatatgagcgtacttctggtgctagttttttagactgaaaactaaattcggatattcgccggatacctgcggggagtcggtggagacttaggggctagggtagacctgctcggagaagagttgcctactcccctagctccttcgaagtggacgtactcgatggtgaagtcgtcgtacgtaagagtcatatgtcgtcgtccaccgccttgtccc

SEQ ID NO: 200272 - DNA, 322 bp, Zea Mays
ccaccacgtactgcgcaaactctaaacaacccgttcggatcgtccacgtgtagcgccggacagtccgaatacaacaccagacggtccgatggagagtatatatagccttatgaggaaaattattatccgcatctgcatccatcctagctaaacttcccatcacattatacagtgcaccaacaccataatataacatcccaaacctgtggggttgagtactttccggctcctagaaggtcataagggaatggtcagtcctatgagctgcatagggcaagtattaatgcaccacaaaacccaaaccaatggagaggaagacaac

SEQ ID NO: 200273 - DNA, 370 bp, Zea Mays
gtgaattacctctaaaagagtacccatctatgagtgaaccaagttctgcttctgcttctcaagatgccacacaaactgcatcatcaactgcacgaccagcacaaaatccacaaccgatgtctatgagatcaaggaggacaccaacatgggcaaaatctcgtaattcggatgattcttcaaggtagtaatagtcttctatttgacccactcgagcaatatgaaaccttttaacatatcttgttttggtcaactaataaccgctttattaccatggtaaattggattggcagtgattcttcagtcctgagacacgcatcaggtgacttcaagaggctaggcaaccggatttttgtcttcatgattggtggag

SEQ ID NO: 200274 - DNA, 277 bp, Zea Mays
ctgcgttctctgctatctaaatatggatgtgagttatcctctgttgtagatttatgatagagcactggctctaatcctgttgcctctgtggatgtggatgcaaacacatatgaccctatggctgatccaaaactgatgaggacatcctccactattacccgttggcaaagacgcaattggcccagttggcccaattgtagtcggatgacgaccgtgtgagcctcagaattatcccacctcgcttaacttgggaggaggaagccactttaaaagggag

SEQ ID NO: 200275 - DNA, 327 bp, Zea Mays
ccatccattcgaattaggaaacaaacagtacatcattacaagagaacaaatagattaaacatgcatagagtataacctacgatattgcatatgccatggctagaaagagaagaaaggtctcgcagtggttaaagctatactcagggcgtattacgggtagacgcataactagtcgttacgtgctctagttccacttagccctaacgaaaaggattagtcacatgcactaatagaatcataaccattttcaattgatcaacattaaataaggtagatgattaactacatgaattaactaacgtaaccaatttccaacttgagtttcca

SEQ ID NO: 200276 - DNA, 432 bp, Zea Mays
ggaaaatggagataaacgtgtacacggccaacaacataccgacgagattgtggcgcgggagtgtaggcgcggccgagccggagacgacgcggagctaaaatccggcggagagttgccgctgtcgaggtccggagacgaggcgaagctgcaatccgtcggaggaaacccgtggccgaggcgctgacgacacggagatccaatccgccgggccgccgagccggatacgaggttgacgacggtggagttgatttgggcgaccgctgtcgaggtccggagacgaggcgaagctgcaatccgtcggaggaaacccgtggtcgaggcgctgacacggagatccaatccgccgggccgccgagccggagacgaggttgacgacggtggagttgatttgggcgaccgctgtcttcggccaggggcaacatttcagcggaa

SEQ ID NO: 200277 - DNA, 311 bp, Zea Mays
gggaacgaggaaaggtaagtatgggtagttctaaataggaaagagcatatagaaagggggagaaagagtgactaagggttacctatctatgggggatgactacataactatgactacataactcttggaggggtgagatccacctatagtacttaccacctaggccaatagtggggcagcatgtggtgtctactacaagtgatatgaggaaaggacaaggtggatgatagaagggaagatttgtaccatctacatttgtccaaccatgaggcaccatgtgggcatggtgtggctcgcttggcgatgacgtg

SEQ ID NO: 200278 - DNA, 277 bp, Zea Mays
gcatgagtccagatgcaacgtctctctctcctttgctggctcaatggtggcttctttgctctcggcggcagcagcactaacgataatggcacagggagggggccgacgatgcccacatatatatacatgaggaaggttggatgggaggagaggagggatcgaatcctcccaagattcatgcaacagaataacagaatctgttgggtacaaagcttatggtggtctagtcccaccgacgtgactgacgaccgtgttttatgttactcttcaccgttgc

SEQ ID NO: 200279 - DNA, 5060 bp, Zea Mays
ttgttgctgaacaagtccttcctcgatacttgtagttctgcatatggagttgtgcctcacacccaggagaaccagggtcaaccatttgtttcaaaacattttaatgttattgatcctttacgtacaaacaacaatcttggaagaagtgtcagtaaaggtaactataaagtaggaacatcctttaagattgaccttaccggtgaattgaacagagtaaatgttctttggtagtttggcttcacttatttccacacaattgattgcgtgttgttttttatttaatgatttctactgtcattctgtggtatttgtaatgctaggtgattatatcatgcactgtatatgtgataatcgattactagtttgctacctcaatgtttggttgttccagtttttttgcttttgtttggggattttttgtggcagtattcttttgctgtcacagtagctgtttgattgttagcataattatgaaactatattttgaaatttaatcaacttttgttatgacatattttctattagcagaagtatctggtcaaaactcaaaagtccacataattgcaactttcgagcttgtggcctggtggaatgtcgctattctccagatatacacatatacattttctagtaaaccaacctaatactggcaataagaatttcattcttttcttatgctgcaacatgtcctctgtagctatagtttactttgttctctggtctattctgttctatctagctatgacaagatgtcgggtacttaaaatagcaatctcatgttgacgcatgtatgttgggtgaaccctccgtgttcattttagcatggcctcatcttaggtttggtacggttttattttgctgttacaaactattgtaatttcattgctttcaagtatagaaattcggttcgtccgtggcggaaaaaatgtcgaagctatatgttctaccagtccttgttccaggttaatcattatgagtatatcatttgaatgttgtgtcagaggaggtattgctgcagaattaggtgcatatattcatgtgtaggggagtatatatatgatcgtagaggtgggcggctagggaaaccctatgcgccaatgagctagacccaacctcacgcacgagattggtcgggcccaatatatataaaccctaatacacatataggcaacaattagtattctaacacccccgcagtcaaaaatctagtcacaagagatgttgagctagatcgaagctccgaaaacatcgttgaggggaggccattcgtgaaaatattggcaaattgtgatgatgttgacaacaccctcctaacgcacaacgcacaaatccagcatgcccatcattgcttcattggcgagcatgacaacatgctaggctgcgtgccagcgtctgcctcctccggatgttggtttgtgcgacgacgaccgactttcccagtttccctaccctattctcggtgcggcaacagagactaagcgaccagcttgagttatgatctagtttactaattgtattatgtgtatgttcaattatatgctatgaaactacttctataggacatcgattcgctcgacgatgctatatggtgctgaatgttggtcgacaaaaaggcgacatgtccaacaactgagtgtagcagagatgcgcatgttacattggtttggtcggcacacaagaagggatagagtccgaaacgtagatattcaggatagccgatagggtcgtggtggcaccaattgaggagaaattgattcaacatcggttgagatggtttggacatgtctaaaggagacctcttgaggcgccggtgcgtagagggattttggagcgggtcgataatgtaaaaagaggtaggggtcgacctaaaataacttgggacaagggagttaagagagcttaaggagtggaatatctccaaggaattagctaaggataggtgctcttggagactagcaatcaatgtgcccgaaccatgatctttgccttttttcccttaactctaccgtctttcttttaccctttcggtttttttctatccttgtttcttgtgggtttcatctctagcctaccccaacttgctatgttgttgttgttgtatgaaactacttctatgtgatactataatcaactatacatgccaaaaggctactaagataggttttaaaccgatttttttgtgttctagtaaaatttgaatgcccattctctaaatccagggcacgtccctgctggatggaggtgcagaaggtggcgttgagatggagggtgtgggtctcatgattcctgagagagcgagctagaggtggcacgtcgtgccattgtgctctgctccctaatgatccaacacaactcaggggagatggtgctggagatctagcagatgatgatgatgtccatccgatcgcaacatgaatcagtgtttgacggagggttagacaagacgcggccgacgagggtgttccgtgtgagagcaagtagcacctgatcataccagcaggattaattgtcggaggaggatgatcgtcaccaacaatcagacgccgggaacatcggttgcatggctgtggagattggcgatggtggcaacctcgtaagttgcaagacgtcctgtggggacgccctagggtgggggccggtggtcgtggggtgttgtaggcccaaaccttatcgggtggcgacagcctttgcttgagggagcagcagcggcctttctcctattcgagaagggtggctgcctagacgtgagcgtgtgctttggcagcctttttttggcaacctgagctgtgacgagcatgtcgtcgatcttcttgtggaaggccacaacctcatcaacatgggcatggggcacgatcctcgacagttgacgaggtccttgccatgggtgcagaggtggggtgaaatgcgtgtgcgttgctgtggcgacacagcacaagggtggcagcgtccctagaggggtggttgccaggggaggagcagaaatgagattggacttggatgctaagttagaggcagttttgcgacagaaatagatgcatctattatgtgttcgggaacacatatatagtcgtagaggtgggtggctagggaaacactaggcaccaatgggctggtcccagcctcatgcaggagatgggccaggcccaatatgtataaatcataatacacatatctgcagcaattagtattctaacattgtgatccaatcttgttagtgccaacttgacaaaaatcttttggcctaaataatctctgctcagccagcaattttaagctccgtgcatccctccttggtagatttcattaactagaaatttcttgtctaattggtatgaggtccaaacaagccttaaacaactaggtgcacttacttcattttgggtttgttacaatttatgtcaatactgacagcatcttgtaaggatgtgacccatagtagattctccttgagcagttttgtgattgtcacacttacactagtagagaacagatctttgattcaacacattagtcatagctagagttgggcccatgactaatgtgagcattagttctgggtccaagtttcatgtgcattggacgacctttagtccggtgggctaaagggtctacattagtcttggttggtgttaccaacctggattaaagagctttgagccattagttccggttgataacatcaacctagactaaaagggtcattcacgaattagttcaaaaggaaagtatcccattcccatccaaagtcacatgtgctgtaagatcttgggtgagtcccatgaatcgcatgggtgggagtttgtgccaattttttttaaggccttgcagagacgcagaccctttagtccctgttcaggcatccgggactaacagaccatgccctttagtcccagatccctagtcctggttggaaatcaggactatagccagtttttgtactggtgttatattcactcttgcatgtatattggccttttgagtatgctaattaagggcagcatacttgattatttaatacttaaatatgacaattcttccttgtgctctttacatgcaaaagaactcttgtcattactttgtcttcttatccttttgttgctaactacgtccagtcttttaagaagatgcgttcagtgaaaagttgcggttttgcaggaaatttctttagaatacgcagtgcttttgcgtatggggcgaaaaggctcggaaagttacttgaatgtccaaaagaagctttaattcctgaattaaaccagttcttcacaaatacatggataagacatgggagtggaagtcgtcctgatgtgcctatcccaagtctggttgatgtgcggcctatgaaggttgtttcttctgtagtgtcaagcagccagagaagtttagcggcattcaagaaaaaagttgaaaatcctaaacttcatgttaatcaggataatcttcgtccgaatcaagataatctcactggagttggtgacatacattaccgtaatctaccaagaacagttaatccttcagtttctcatgttcagcaccaaaaaagttatacaccacaaggcaatgctaaggtctctgaacagcttgaaagaaataactcagacggattgatgcaaagtgcaagggataagagagtgccaaatggtctctttgtcaatgacagaaatgggcagaacaggtccagatttgcaaggacccgatcaagtcctgaactcacagactcgtctactgaaggatttcgtggtaggcggactaatgcagttggtatggaaaaatcttttggtgttgattacagcagaagaaacatcttgattccagaagtgtctagcaaccacagcactaagtcttcacaagatgaatcagtgtcttccatgaatggttcatctcaccctagtgcattggcagcttctgactcaaatagcgtttcaagcagctttcgtgatgataatggttttgtgatgaatgaagaactcccttctgtttctgaatcatcggatatgcaccacgatgaacaagttctggctaatttaatggaatccatgaagttgcatggattcaacggacag

SEQ ID NO: 200280 - DNA, 822 bp, Zea Mays
ccaaccagccgtcggtctgataaaaccaggtgaaacggtggaaattacactacatcatgaagatttttacacgcaggaagaattcgtagacggaataccacagaactggtggtgcgaagacaccagggacaaggaagctgttctcagaataaatataacaggcagcagctcaaccgaaaccaagacgcacaccatcaacgtccaacatcgctgcccaccatcatcggcgccaccgccgatgatgaaccaaccggtagccaccgtgcctccgagcaatgtccttgccagcgaggggcactcgaagcgctcctccaagaagagccagtccaagcaccgggaacagcaacaacagcagcaggattacccgcagtttgggagctcggaggtacatgacctgtgccgcatgcggtgcccttgagacctgtacaagctactcctacatcacttcaaaggagtatggatactgaagttgtgtctatgaggtgggaattacgagttttaggtttctcacatcgaatccaagtcccggagggccccgcagaagggagagagaagcctgggagaggagttgctccggctctgtacatatgcttcactcgatcagctgcctctcatgtagcccaagcaaagagtctagagtcctgagatgacagtgctaataacttgttgttttattcttgttccttgttaagggctgttgtctagatagttgaagccaaggatatttgaacaatgcttgatgtaatatgttccatagaattaccttaggtttgttctctcttcacgcagcagttctaatgatcttgtacttcttgactgttg

SEQ ID NO: 200281 - DNA, 441 bp, Zea Mays
gtgaagccgtgcaagcgcgagcagcctgtcaccagctcgtccaggcgggctatcatggtgctcgccacgttgcttctctcggccttcgtgatggtcatcgccctgcacttgtgcagcagccagcctagcagcagccgccgtgcccgcaagctcgacatggagggcctcgaggagaagtcgcccgagtacgtggccgtcaagaaggcgtcgtcgacaccgcagaagagctcctcgtggctcgggaggagggcagggtcgtcgcttggtgggcttggacacagacgggccgcttctgccgcgaaggtggacgatctaagcagcagatccgcgggggatctggtcatggtgaacgaaagcaagggcgtctttgggctcacggacctcatgaaggcggcggccgaggtgatcgggagcggtgggctcgggtcggcatacaaggcg

SEQ ID NO: 200282 - DNA, 349 bp, Zea Mays
gataatcgtaatagggtgccatgagaagcaaggaaggagttggtggcattgatgcattttaccaaattctctactattatcagcctgagaacacttgatggccgagttgaactgggtacaaatgaactgaaagaagttagtgattagctattgcacttcagacttgtgttgcatggaaacgtccaagaaaaatgagtaaaatcatctagaatgacaagatagtaaagacaacccgaaatactaggaactggagaagtccatacttcacaatggaggagctcgaagggatgggaagtgcatgagttcgaaatagcaaaaggtaaccacatacgttcactaggttggcagg

SEQ ID NO: 200283 - DNA, 272 bp, Zea Mays
gtctctgcagggttgcatcccttcattccacaaatttcaagtatcttcttagcataagcactctggcagattttgatttctcctggtttttgctttacctcaattccaagataataactcaggagtcccagatcactcatactgaaacttttcttcatctgctgcttgaacacagagacatctcttgtattaggcccacaaattatgagatcatccacatatacacctactagcagcagtgatccaccaatcccctttctatacactgcatg

SEQ ID NO: 200284 - DNA, 368 bp, Zea Mays
tttcctgttacttccttgtttaatttagttctgtagttacttacatctttttttttgtacggcaatgcggtcgtacctcctctcagataagacaatatagcaatcatctttcgagtaggtatgttgttgtggttcaatgttcgtataactcctttttccatttcagtcatgtatttatgtccgctaaacatgttgttgctgtcggctggtctgagatcatgattgtgttccaagtctaacctatcgatcacccacttctgttgatgttcttttataaccatgactactctgcagtctgttttaacctagacatttgtattcctttttggccctttctcgcacccctgatgttctatgcaattatcttg

SEQ ID NO: 200285 - DNA, 922 bp, Zea Mays
ctcccatctctgaaaatatttgccaggatgaaaactacaacaagaggtctagcacacattcagtgtcaagcgaggaagcaccttcccctgactatccattcttaagggtatccaacatcaaccttccagcagcacccatcaaagtacaaccaccaccgatgcccccatctaaattgcttaataaaaagggaagcaacgaaaatggagattctgatgtcaatcctaactcagttgctgctgctgctgctatgaaggaagcaatgcaatttgctgaagccagattaaaagctgcaaaagaattgatggagataaaaggtgtcagctctaaattccgtaagcggccagttcatcacaaaagcacaaaatcaactgaaattaaggaatacaatgcacctgaaaaagcacatctatttgaagaaaagctggatatgagaagattggtaaaagaggaaaatcaaagcaatgatatagctttgctggataaaaacacgggcagtgttgcacttgagcacagtgatcatgacaaaaaagggattatatcaccagggaagcctaaggagatgatgcaaaacgacagtgaactagaacaattaggagagtggacatcagatgctgatttttatgaattggttagcaatgatcagaaatgcagaactaatggagctgaatgcagagacaatggtctgatgacaaattccttagccaagcttgaccggtctgagaatgaaaaattaggaggctttgcaggtgagtcaaaaaggtctaggaaattgtgggattgtaacaacagaacatgtctgcggactgaacatgtaaatcagggaaaagatggtataggttcattggaggttgaacaaaagaatactaggtctccagaagttacagaacatgtaaatcagcaaaaagatgctatagattctgt

SEQ ID NO: 200286 - DNA, 438 bp, Zea Mays
gcttccaagtctcttgttcgtatgaacaagataaaggaaaaggacaccactcgaaaagatatactagcaagaaaagtgacctctaatgaatcgatcaatgatgagacaatggatgataatgagacacgaggaagagaacctattgatagtacttccaagtggcttgttcctgtgaacaagctagatgctactccaaatgatataccagtagggaaagtggtatcttgtgactcgagcaatgatgaggcaatggatgacaatgatggcattatcttggaagatgatgacaactctagggcgctagttgtgtatggacaaaaacaagaaatgtgtctcacggttcttccggttgttccttccgggtcacaccacaagcaatctcgggaccatgatatagatgctcgaagcaaagttaggaagttgctccagttattccag

SEQ ID NO: 200287 - DNA, 336 bp, Zea Mays
tgctctgcgccaattccgcctctgcgcgcgatgagatgacttccccttgccatgtcttgtaccgcactgatgttacggttatgcgggtatcacgtagggctccgtcgctatccaaattgctcgtcggagattgaattggtgtccccgcaacccacctcgtcgtggccggggcgtgtcccagcctgagggaccaagtggataccctcatcgcgttcgccataggctctgcatggttcgagcaatagggatttgggttcggcgtcgtccttctcgggtttgcctcacgacggtgagtgcgccgccgcatgggtgaccggcgtgtggtgtttgggtagc

SEQ ID NO: 200288 - DNA, 385 bp, Zea Mays
ggcaaaaccaaaatttccatttcagttgtttgtgatttcttgctacctggcacctctggatctgttgtatcatacaatgcctccaagatcattcttgtggttccagatcctccccttgcacttgcgctaccgatgacttggttattcccacccttctataccactatgagccttttgcctagatcagcaaattcccttggggaaccaaactcacttgacctggagagctccgttgggtattctctgctaaggggcaatggtaggataattgatggaagtaaaattcagactggagaaagcaatacagttgattgtattcaagcaaaagatcactcagctgggagaacggaaatagcagcatgtctacgagttgctcaggttggac

SEQ ID NO: 200289 - DNA, 438 bp, Zea Mays
gaagtgccggaactggacgtcgaggtggagggcgcgagtctctcgattttcgagaaactggttctcgagagttagccatgcagtgcgggcagtggcgcgcgtaccatggccacctcagcaagctccggggagatggaactagagatctaggacttgacaacgcagtccatgcgtgcccagtcggggaagcgaggcgcgggagtgtcgtcgacgatgtggctttccagggaatatttgccgagggcgagtaggaactcatcacaccatcgggtgtagttgttgacgaggtcgaggatgacgtggacgaaactccgaatgttctagacagcgacggcccgggagtggaggttgacgatagcagcagcctcgtgaaggaggatggtgtcgtgtaggtccttgccagcatcaccccctggatcagagaggtgagactgagcg

SEQ ID NO: 200290 - DNA, 540 bp, Zea Mays
ggtgttaaatgtctatgcatgtgtctttattcggtgtcatatatagtcattgttgtacacactgttttgtattgctgtatgagtgctgtttataacagttttgacttcgtaaaaattagtatttcactagatgacaatgcttctaacatatttcagcattctctttgggatccattgatgtattattgcagttactagctttgttagttatcaaaattgctgtttcgtttcagtgtcctggtcatttctgttgagttgctgcagcatcttggttttggccgcaagtggtgtaatatggtcagtctgctgttgtccacatccactactagaattctggtcaatggtgaaccgggcagttctatactccatcatcgaggccttcgccatagggatcccttgtcacctatgcttttcatcctagtcatggaagttttgaactctatggtaaattttgcaactcaggagcatctcttacagccaatcgcatatccacaggccatacatcgcatttccgtatatgctgatgatgttgtgttgttc

SEQ ID NO: 200291 - DNA, 293 bp, Zea Mays
ctttggtcttccctgcttctcttcccattactatcatgcattatgatttcactacatattggtgcctttaaatgtccctattggacatgtccaaaccatctcaatcgacaatcggtattgaacaaacttttctttggttggtgctactcctagcccatcacatatatcatcattacggactcgaacccttattgtatggccacaaacccagtgaaacatatgcattcccaccacaactacagtttcctatttactcatgcgcggctttcatcaactagcactacatcgtttgc

SEQ ID NO: 200292 - DNA, 302 bp, Zea Mays
ggccgctaggttccaaaaaatgcgtgaagaagggaagaactttgatcctttggttcttgaagattttgattaggacaatgagtgggttgatccattagctaattcatctgttgttggggatgaccctcttttcacatgggagcttgttgatcatgccatcggtgcatctacacaacttcaaggccgctactttcctaggagagctcatggtactcaagtgccaattcttgaggatggtgaagatggtgttgatgagggtgatgagaatgaagacgatgacaattttgtgcttgacgaccttg

SEQ ID NO: 200293 - DNA, 1241 bp, Zea Mays
atgtccaggatcaaatttgttgtacgcagtcgaagtgcttgtgactgaggttagtgaaattgctacaatatgacaaaaagtctattttttcatgcagtatattgtctgttatgcaacgttaattaaagcatgctattaatagtatgaaggagcaagagacatctgttttctgagttctgacacaattaatatccaagtgtattggggctgtcgggtggttcatgaataaaaaattgcttagctatggtcttgcttgctgatattatattttgtattaaatatgaaacacaatttaccaaatgtttaaactttaaactaacaagcatctcttgtcatgtttacagacaaatgataggcaacctctgttggactctggtattttgtgctgccttatatatatcctcaattctctattgagccccaatgagaactccacagataccttgcctgttcaccaagaaggatccagaaatgagaaaaacaaaaatttggatcctatgcaatcacgacggcttgaggtaatctcagtcttctggttctcatagaaacagggccctatttgcaagattactgttgaaatacacaaaatcgtaaattgtttaacattgagttgctgctttgtctgtattattacatgtttttttcctttgtgtcatatatgtatatggtgactatttcttcccttcattttctcctggtcaacttggtttttgatttttattcttttttctgtctatggagattgagggaagtgtaatacatattatgaaagcactggcgagccatcaatctgctgcaccaagtttaattgaagatgatgccttacaagttcttttccacatggttgcaaatggttcactatctgtgttgtcacagttcagggatggtattgttccccttcacacaattcagctccatcgccatgcaatgcaggtaatttgaaactatgtaacattacgttttggagggtcatgtttctctgctgcatcaatagttgctaaatatattaagttcataactggacaggtccttggtcttcttcttgcaaatgacaatgggacttctgcaaaatacatcaggaagcaccagctggtacattattatctgttctttattgtggatgaaatgctgtcctgttcttgagtctagttaggatttcttcacactaaagaactaaacagcacatagcaatgtgttcttagttatttaatcttcacaaagaatatctgttttcacttggc

SEQ ID NO: 200294 - DNA, 498 bp, Zea Mays
catgctcggcgaggacagttgttatattatatcctccttcccttcttgtgcccttgcttggaccatatacctgaagtagcagcttcccttctccgtggaagaacaacagaagaaaagggggtaggtaatcttcggcgccggcggccgccggtccccgcgatggacgcggagaccggagatacccggtctcccctgctgccgcatccccctcccagccagacgcaggtaaccgaatccccaatcccctgcgccctcctcctcctgcttcgcatctctcgattcgatctatatccaaccctcgctacagttctcgtgttctgctgctgctttgcttggccgaacgaagaaagaaagctcgagacttgttgttttctttcaccaatacatgctttttctcctcgtttcagtcccacagcagtcagcatgatgattttctttttgtccctgcaggtttcctcagcgaatcagcactataacaaacccttcagctggaaggcc

SEQ ID NO: 200295 - DNA, 431 bp, Zea Mays
caattcccgagctaatgctaaaggctcatctgttagggatgcgattgcctctacagaaactgagttccgtgacgttagtttgcagcggaatcgtctaccacggaagtcagaagatgtagggaaaaaggttacagctggttctgattcagattgctctggtcgtcagggaaaaaatttgagcaggcaatcatccattaccgatcaggaactaaacttgcaggctagagtgacaagaccaggaaaagggaaccaagatcggcatggtgaattgcaaatgaaggccaatgagttggagaaattatttgctgaacacaagttaacatcctcccgacgaggtaaacctacagatgtgcaggttgaaagcacacctatggtgagtgaggtaaagccgacaatggttcttcatgagacaattcatacaaaacaagttg

SEQ ID NO: 200296 - DNA, 292 bp, Zea Mays
gtccgcgccgattctgcccattttggccggaaatagcttccgaagcgaagttgctgatgtacctctagtgttttactccactgcgtcgtagtttaaggacttgcggactgtattggggttaatgtatattgtgtggatgggctgagtcaccgtgagacttttgtttgtttgtttgttggaggttttactgcggtgctcaattgacgtggacatcaggctcgatctagatcacagaatacacggtgttatgatttatgaaccaattgcccacgttccacagatagtccccagt

SEQ ID NO: 200297 - DNA, 271 bp, Zea Mays
gcgcccgtgctgcggggtgcactgtgtccatcatcacttatacgagaagcttcccctgcacgccgatattacgcagatctcagatgtcaggacgcaagaagattgctccagcagcgaacattagtagctccaagcactacatccgttatgttcctgggcccacatgtcggggctcagtacccttgtacgtgcccccttagttataaaaggggaggcatgcaacttcacaagaggacacacagactgaactgggacttagactctcagctct

SEQ ID NO: 200298 - DNA, 279 bp, Zea Mays
cccgaattcgcgccggtcatcatgattcatgctcgacgcaaagtggataaccgaggggagtaaaagatcttggcgcccagataagctcggacctggtcactggatggttcaccgtacccacttgctctatggccggtcgtgataatcctcgccggcattggtcgcctgccacccatgcgccacgtgcctaggagctttaccacgttgcagtgaagcgtagtagggagtccatccatcgccggaggctttgccatggtgaaagccacggtagtgcttgcg

SEQ ID NO: 200299 - DNA, 326 bp, Zea Mays
tggtatcactcgaaattcccccgaattgcaaatagatttacagtttagttattctcaggttggtgcgcggagtgtagaaaccaactaaactacagttttcctaaacccaaccgagtggcagtgaaactcgtgtagcaaaacataacatagaaaacatgtgctatactcttgtaaaagcgacgaagcacatgcctagaaactcgattttttccccttctcctagtgtttggatttcgtagtatagaggactggacttggggtcaacataataatgaggcaaacaaattcatggactcatcaacctctcactgcatacatgactaaaa

SEQ ID NO: 200300 - DNA, 282 bp, Zea Mays
gttggtctttgaaagcatagcagaagccgaagctactaggctagaggatattgatgtactcgaagaagaatgactgaacacagtaattcaatcagcacgatactagcaaactctgagacactatcataacaaggcagtgcgacgacgatcctttgcagtgggagatctcgtcctccgccgaattctaacgggggagggacggcatagtttgtcacccttatgggaaggaccattcatagtagcagaagtcactcggccgggatcatatcgtctcactcagat

SEQ ID NO: 200301 - DNA, 315 bp, Zea Mays
caggaatggtctgcaactgctgtgcaggtaaatgttgttgctttgataagaattggcaagcttcacatctctggactaactcggtagcatcactcttcgctgttggccaatagaaaccagatctgaaagccttcccgaccagagttctggatgctgcatgtactccgcactgcccggcatggatttcatctaacagctgcttcccaataaccgagtgaatgcatttcatgagaactcccgtcgcacctcttctgtacagtgtgccccctatgagggtgtagtgggctgactgccttgcgatgcgttctgctgcgg

SEQ ID NO: 200302 - DNA, 890 bp, Zea Mays
atcatatcgattttgtagcaatgcacgggcatatacctattctctactattctatatgagcctaacgagggcgtccacaactacaccgtgcccccacccccgtcaaccacgcgcgtcatgcccccgcccatgctctcccgcgatcttcgccgccgcgtcttcaccacccaagcccgtgatctccgccgccgtccgcactagggtcatgtcagatctgcatttggtggcccatccccatactcatcctcatctgcacgcccccgcccatgctcgccccggatctccgccgccgtgtcttaaccatcctcgcccgtgatctccaccgttgtacgcacttgggtcaggtcagatctgcgtttggtggctcgtccccatcctcatactcttctgcgcacccacgcccgcttcttcatccctgcccactcctgcggtacgatgtggtggtgtgcctggacatactacttcatccccgtccacttcatcaagaggaggccactgcacttgggtagtacgatgtgctggtgtccctggatttttatttgtgtgtggtcgagctgttcccaggcccgttcaaggccatgcgtgcctatctgtgtgccgagggtaacacagaggacaccgtccgccaggctggctggcaagtcgtccccgtagcttcatctccattaaggggattgggaacaagaggaggccactgcacttgggacttcgaatagatagttatgtaagtttctaattgtttaatttctaattgatatactaatcttctactgttgattcatacaacacagggaacctgagagtcatggggcttcaccttctatccgtgtttttactaaacacagttggacatacttggtgtctatttttttctgcttaacatcatatgt

SEQ ID NO: 200303 - DNA, 342 bp, Zea Mays
aattagggcacccgatgctcatcttttgttaacctctccgttttgctcgcttcaacgatccttgcctgcttcgtggcacccgatgctaatcttttgttaacctctctgtcttgctcgcttcaacgacttcgtgcgactgcctgctatctcaagaacctttgaggtcatgctacgtttcttctctattgaatgactcatcactcatgcatgggttaattttaccatgcaaattgcaaaatgctcgccgcgtgaatggagtttaaacacttgaaatccatattagccaccaactcaccgaccctatgtccactactccactgtaaagaatccttccatcctcac

SEQ ID NO: 200304 - DNA, 384 bp, Zea Mays
agaaatctgccaaaaccacatggtagataagttccttacaggtcctagaacgaattcaactagctcaaacacccttaaaaatatggaacgagaaagccaccaaaatctcaagtgagggagaccaatagaggaaaaatcaaaactaatagaaacaaatgacaccgacacaaaaaattcagaggacaacttatttattgtagcaagaacaagtttgcacaaggtttggtcttacactgatgtacatagatatatgcatgaggctctcatgtgtgaatatcttgcagtatagaaaactagatctagtaacacctaaacaaaagcatagaaaataaaataataaagaggtagctagcttgggggcgattctcctcttatttataaagc

SEQ ID NO: 200305 - DNA, 599 bp, Zea Mays
ccgatccatctcccctggctgagatgatatttggcttcctccgcatctgttgaagaatccgaagagtcagaagttcttgaaggaccatgaaggcttcactatcgtggaaagtcgccgcgtgcagaagatgagaagacgtctcgagtgccaaccaatcaggcaatcaggcacgttccggaagctctgaaggcagaggagttggctcgtgccattgtgatcaatgtaacagtggataatcagtcagatgttgaatgggccattttggccaattttgcccggcgtctcgagatagaagaagtgatgtccctgcaagctttcttctcggcctgccatgtgtggaaatggcagatagggcttacgacaagggcatgattgttgacatttcaccctccctcagagctcatgtcatgagatggagtagacttttgaattcctctgcagcagccttgcaatatcaagttgaagttgaattaagaggtatcccaattcatgcctgggatctggcatctatggaaactcttctgaatgaatggtgttggatcactgagatccatccagtctctgcccatcagcgtgaggtattcagggtgatcgcctgg

SEQ ID NO: 200306 - DNA, 286 bp, Zea Mays
ggtaaactatgttgaacctttgctaagttctccaatagtaagcgatgctgcattttgtacaatgttgaggctagcacgttgcacagcccctcctctttgcaattgggcgctcgacattgctgctgcgattcgtgtgatatctgttggtgattttgaaatggttttggatcttacacctgtgatcatggaagatgatagtaagaagccatcatctggcatctttgaacaaatagtaaatgggctgactattgcgtgcaaagcgggtcctcttccagcagattcattt

SEQ ID NO: 200307 - DNA, 368 bp, Zea Mays
gcgatttgaagcttcagttctgctaactcggtgggagccatgcggtatggtctcttcgcgatgggtgccgtcctagggatcagatctatgtataactccacttctctttctggtggcattcctggtaactcttctggaaacacatccatgaattcttctaccactgatacacttcctgttgctagactgaacatcattggatcattggcgggtggctgggcctgacaagagactgactttccttggtggtctgtgaggaggactgtcttgtctacgcaactgatgatgcctttgtgtttagttaacaaatccatccctaagatcacatcaattcctttggatggcaagacagttaagtctgccaagaa

SEQ ID NO: 200308 - DNA, 436 bp, Zea Mays
ccgggttgcactgcaaaatgttacaactgtcctgaacagtttgatcatcacaactgagagggatagcacaactttttcgcaaattcacaactaagcccgaggcctctccaaagcaatccaggatcattttgacacaaataagatcgtcaactgcaggcttgacaaaaagaaccaaaacatctgcgtaaatcgagagtctagatttcacgtttctgatggccaggtcatgcagcaatcctctttcctcagcatgcttgaataagctactaagcacatccatcacgattatgaaaagcataggagataaggggtcgccttggcgcagccccctccgatgacgaatataatcccccggagttctgttcaatagcacttgtgtggaagaagtggataacaaattgaacacgagaccgcaccacctgggcccgaagccaag

SEQ ID NO: 200309 - DNA, 465 bp, Zea Mays
ctcgagtatcatgtagcctaagtcgtgataaaagtgcaccagtcaagcattttgtgtcgcacatcacacatttaatgtgttgtacctaagacattttataagccagtgctttggacttgccagtaggccctagaccctagacatggggtccctactttggggtcgtaatgccctcaataggaccaggcacatccttctatttcgtggataggattacacttagtcgtagtaagtcccttgttcccacgggaggccttggaccctaaagaggttggggaccgacaattcatattatgcaaggtcgagggccttggggaccccaaagaggttggggaccgacaattcatattatgcaaggtcgagggcctcggaccccaaagaggttgggtaggtcatttgttctaaacatgaactgctttcacaccgaacatctggtcccaaatttacctgcattgttaggctgct

SEQ ID NO: 200310 - DNA, 339 bp, Zea Mays
ctcatgatcggcgacctggttccggccaagcgcggtgtcgctcggtgacttgtctacagctgagaccttcgagcagagaccccccatcccctttcccaagacgaataccctgatccccacgccgtccttttccaatttcttgccgccgtcgcagcccgtgatccccacctcgtcctattccaattccttgccgccgtcgcagcaagtgacagagtccatccaataatgtttgggctctatgggcaagaaataaaagaaggaaccgatcaagtccggatggatctgcgaaccagctttagtgtacgggggtaggagaggagggcaacgactccgggagaa

SEQ ID NO: 200311 - DNA, 560 bp, Zea Mays
gtgagttttcactggctattctcatggagtcatcaaaaaggttgtccagaaaagacatttcattatatttggtatcaactccaatagaatccattctggtgctcgtcatgttcttgcttcctgacatttcagatggcttactaaggttgccggcactaaagccctctgctgctgcatcatcattaccggtattaaacttattcagaccaatatgaggtgatgtactcctgtagtcaagatttgtttcaatgtcaatttgttcatcatcaacatcgagtcttttcaaatctcttggcgatgaagacaaattaaggtcatccactacttttgtgtgtgctatatttgctttgtcatcatcactcgtaatatcaacagctgcatcagatccttccttgctgcttgatgagccatcactgtcactattgctgctgcttccactaccagtttctgcagcacttctgctttggctcccactatcacttccactgttactgctgtcactatcgctatcgcttccactgtcactggaagttccagccttaccttcactgtcattactg

SEQ ID NO: 200312 - DNA, 482 bp, Zea Mays
cccaatctcagaagtaatgagacgttctgagttggttgcccaagaggaagaaggatctgttcccgagaaacatgacgtcattgccgaagctgaacaaactgttgtcgaagctgctagtgatgatgaagaggatgatcacatcttgagtccaagcaatcctaaccatattgaatttggaaaatccactttaaaggcaaaagatttgattttaatgaagaagcttggatattttggaaaaaatgatgatgaattgataaggttcgctgggacgaagtagttctagagccaagagatgatgaagttgttgttttaagagcttaagagcgggacttcggtaccctctgcatgaaatgatcggtgaagttatgaagaagtttgaaatctatcttcatcaactaaatccaaacgcgatagtcaggcttggcgtgtagatatgggctctccaaagccagagaaggagtgtcaatgctgtaatacccaac

SEQ ID NO: 200313 - DNA, 314 bp, Zea Mays
gggtcggcgaccaatagaggtaaaaagaggggagaatcagcggagatggatcctcatcgccatcaagaaacggtcagcttccctaccaccacaccctttgccgaggaatcgaatacgtcaatcagcactcaaaaggaaaagggaggggagcatcccatccccatcactggatgcaccatgccgattcccaaccgacggggaaaaaaatcttggttttgcgcaccagattacggccggtcagagaacagatcgccacacgcccgcaactaaccccaaatcccgacccgaaacccagcgaaaaccgcacctctcac

SEQ ID NO: 200314 - DNA, 343 bp, Zea Mays
gcatgcctacattttacagcctgtatctggcaaagcaaaatatacaaagatacaacttactgaggcaaagaaaacaggacaagcattgcaaaatactgcagtggatttggatgatgttactctgtcgttgtcgaaggtttgtactcctgtcttttctctttcagttttgtcaaaagcactgtgaaaagtaataccttttccctcaaccaggatggctacagggacatgttaaagttggctgataatttctctacattcaatcaacggctgagatatgctcatctccgaccatcttcaccattaaaatcggatccacgagcttggtggaagtatgcatacaagg

SEQ ID NO: 200315 - DNA, 487 bp, Zea Mays
cgccccggcctcgattcaaacggttatcaccgaaagaactagcagcgaagcgtgcaaagggggaatgctatcactgcacagagaagtactcagtggaccacaaatgtgctgctcgaggggttttcttgctggaattagaagatgacactggagaagaggagtcagtgaccgagctaggcatatcattgcacgccctgacaggaattgatgtgggggagactatgaagcttacagttctaatcaaaggagtgccactcacagccctggtagacaccggttccacacacacattcatcacagaagcaaaggtgtctgagctgcagcttccactggaaaggcgccaaggagcagtaagggtcgccaatggggacaaggtcaccagcctaggattctgcacaggattatccgtacaaattgctgaagagcggtttgccctgacttgctatgctctaccactagaaggctttgatgtggtgttgggagtcca

SEQ ID NO: 200316 - DNA, 331 bp, Zea Mays
aagggggctaaggaggtcctgtatattttgaatgctttgatatgctgccttccccttatggcctccaaaccttccaatactatcttgaaatattttaaaccactattagatttgcatcaaccaattttgataaggagtcttctggacattctgcatgctgtttgtgagagtccaaccgtacagctcaaatctgatgtgttattggaccttctgtgctcgttgggtctgtcagtgtcttcagaaaggaaatcaggagatgaaatggcttcaattgcacgacttctacatgttggcactaaaaaaatttacaagcaaaacagggacatttgtg

SEQ ID NO: 200317 - DNA, 446 bp, Zea Mays
ttgctgtgcaaaaggcttatgagcgattgcaggtgcaccttgtttgtatgactagttgccccatttatgcatgatatcttttcatgccttcttttgttgcttagactgttttacttagttctcccttgtattcattgaaatgagcagcattttattattctatgtgcctattgagtttcttttcttacaaattgttagtagaatatatgcaaactagcgagacccattaaggtatattttcacattgttggctatttacagtgtctatcgtctctatatgcaggctagtatgcagggattgcagggaccacaagtctggaggctgctactcttgctgaaggcacaacgcatcttgtacaagagatatggagatgtcttgggaccattcaaatatgctggttatcctatgttgctaaatgcagttactgtagataaagatgacagca

SEQ ID NO: 200318 - DNA, 355 bp, Zea Mays
gcttgggagagacgagggtggctttcaagctgcggaaagacatgtaagccatagttactgtttttcttcttgttcattgaatgtctgaaactctctaaatgctgctgtaatcgcaggtttcattacatggcattggctgacgacaggcagagaattatgccaatgcccgatgaccggttgcctcctcgaggacagccattagcataccctgaggctgtgctccttgtggacccaatcaaccctgaacttagaggggaggtaagcttccctgacagagataaatataatacatgtctgttatccattgtaagtgtctgagtgcattctgattctgaacgttgcttataatgtttgt

SEQ ID NO: 200319 - DNA, 420 bp, Zea Mays
ctattaaaagacagagacatttttctctcggatgttcgagaaagattactgcaagcacaggcatatgcaaaacgacactatgatgaacaccatcgtgagctggaattccaggtgggtgactgggtatggctgcgacttctacacagccaggcacgagcactagttggcaacaagaagagcaaactgggtccaagatatgcaggtccgtttcaggtgctggaaaaggtgggcacggtggcttatcggctgcaacttccagatgacgctcgcatccataatgttttccatgttggcttgctcaaacccttcaaaggtgatacgccaagtgctcctccagccctcccagagatgcaccaggggagggtcctgccaacacctgagcgcgtgctgcgcgcacgactacgccgccaagaatggcac

SEQ ID NO: 200320 - DNA, 281 bp, Zea Mays
gtgagagcacaatacatgcaaacacattattccatgcgtccagggtatgtgaaaccatatccatcggaagttgacatggtacccttcccaaacaactatcgccaaccacagttcagtaagttcaatggaactcaatcttcacatgaacatgtggctcatttcttagctgcttgccaagacacctcccataatggcgctctcctcctccgacaatttctacaaacattgtcagggcctgctttcacatggtatagtaagttggcaccgggctccattagaac

SEQ ID NO: 200321 - DNA, 292 bp, Zea Mays
gtgaccaaatctggtccgttcgatgctgatcgatgggctagatttgcgtatcggttcggattgatgtggatctaatccgattcacccatcttctatcggcggtctagaatcaaccataccccttcgttgtggcgaattaccataagagcccctggatttccagtgaataaacctgccgtccacatcggtgagaaagtgattacaactgggtcctggattttatgaagttgacctaggctttcggaaaattatgcgtgcaaccctgggagtaaataaatcgaataaaatgata

SEQ ID NO: 200322 - DNA, 318 bp, Zea Mays
cgtgaacatccatggaagtgcaagagggagaacccgctcggacaccctcgggggctgggtcatagtttgcgctacccattcgagccagatcgtctccggcaacaccctcgaggctgggtcgcagcttgcgctacccatccgagccgaatcatccccggcaacaccctcgggggctgggtgagcgccaacaccatccttgagggccaagttctctgcagcagccacctctaaggctgaaggtccctcagtcacttccatgtgagcagggcaatccaagtcagcttcctgaccctcaagaccgcgctccaaggtcgatga

SEQ ID NO: 200323 - DNA, 795 bp, Zea Mays
atctgagagatagtccaagaagatgaggctgcaacagcaagtaaggctcggacagtagtcagatgggccacaggtgcaaaagtctcatcataatcaataccctgtgtctgttgaaaacctctggcgacaagacgagctttatatcgctcaatagacccatcagatttggttttaaccttgaagacccatttgcacgtgataggtaccgcaccagcaggtaacggaacaacatcccatgtacacgtgcgatgaagggcatttaattcatcagtcatagcaagctgccactcaggtataccagaagcctctttataagatgatggttcagcaatgactgccccaacacgggaaaacccataacggtctggagctgcaatagtgccacgatcacgaagatgatatccctgattaaaaacaacatgagagtcatcattgttagtacaagtatcaacaacaggatcatcatcaggactggtcgtgggagtagagcgaggacgacgaatgtaagtctgagtgacaggtggtttggaagagtaagactgagagggtgtggaagtggaaggtggtgtgatgggaataaggacatctggggtagaaacagtaggtggtgatactgatgaagtttcagaaatgggaggaaggctcatgaaggaggtagactctgtggaataaaacgaagaatgagtggaagaattgtaaaagaagggacgattttcgttgaaactcacatctcgagaaatgcgcatgcgacgagaagatgaatcataacatcgatagcctttatgttcagggctg

SEQ ID NO: 200324 - DNA, 285 bp, Zea Mays
atctagctcagctatatgccttacggacagtcgataatatatgtagccaaggaactgaatggacatcccgttttgcatctcaggatgcgattggacatctgtgctacatctataaagcaactggaaagcaggagagtacgaggctcattgcaggatcttgtttggcccgtctctctcgcttcagtccatcatgcattcatttaatattggaaaagatatcattcaaggatatagcatgcacacttatcaagggaaatacacgtgaacagcagattagtcttaata

SEQ ID NO: 200325 - DNA, 537 bp, Zea Mays
attttccttggctgttttgctgtcgagcatgttcatctacaaccaggtacatttctaaatgaacgaattagtcacatttggaagtttgaataaggagggtattgtagactacttagggtgcttcagtttttttgtctgaaggacgctaacctacgagcgtgctgctatttcttctagatgggaggtatagatgaatctgcgttggatcgtctctcgctggtcacagagatgacaaagcacatacgtgtccgggcctcaggtggaaggtccactgcatccgaacttgggcagttctcgcctgtctttgtttggttgttgcgagtaatatatttcatcccttttctcctatactaattatgtatactgaacgttgaacgctttgactgttccctagctgcacatcatcttataaaccgtcaaacataaacctcaggccctgttatgcatcagacacctttggtgtgcgacgagccgatgacaccgtgcttcctttactacaggacttttatctggatttggcagaagacaacagaaaaa

SEQ ID NO: 200326 - DNA, 296 bp, Zea Mays
ggaactcaagtcgccgccgtcaatttgatagtgctcaactctcccggcgccgtgggtgttgctgccgcatccgcgcacagagtgagaagcaagcgtcgtcctaagaaccgtcgtgactcaacaccactccgcgcgctcctgattacccctcggagcaaaactccaccgaacccgcgcctcggcaattgccttgcgattagtgccgtcgcgccgtcctattggcccggggtgcctcggttcaactcgccgtcagtgctcccaggctcgccgggcagagtcgacgaccgtcagggcgc

SEQ ID NO: 200327 - DNA, 339 bp, Zea Mays
gttggacgccttatttccttggttcgaactgagagtttcgtagttcgaaatgctgcacgggatgctttactgcgtattaatgtttgtatctatactcttttctttatttttacattttccagaagatcactacatctgttctgttgcttaagtgttttttgtgtcccagaattaattatgctcgtatttaatgtttactgttatataccctttttacatttttgcttgtggcaggttcattcttccactttagtaaaatttattgaattaatttcaacacttggtgatgcaagaggacattcaaaaaggataaagagaaatgaagatcgggaccttaat

SEQ ID NO: 200328 - DNA, 333 bp, Zea Mays
ccggtctgaaataagagttcatacttaggttatataagagtaagaagatcaagttctaaacataagcacatatatctttgggttatcacctttctagcttcacatgacaccttttgagcgaatgatttacttagaggaactgaaccactaaagacaacacaactacctaaagtttttgggtagagtagaacactcgctttggccagggcacttgtaaaaatggggacacaagttgtattggtatcatcttatgaccttgaatactaaacgcaaattaagctcagtgatttacctcatactcaattcatgcacataatcaatagctttaaggac

SEQ ID NO: 200329 - DNA, 500 bp, Zea Mays
gtggaccaggatggccacttgagatttatgacaaattctagagctgtagacatttccgtaagtgcttcaataggaaaggagatagatcattgtggaaagaatgataagatagatgtcctcagccctctcgagagaagggttatgaactggcactttgcacatttagagtatggttgtgctgcaacgctgaaatctgtatcccttccatactggaaccaggacgatgtatacggaggattcggaggtgctcattgcatgatcaaaggtggctatgacactgttctacggagccttgctaaaggacttgatattaggttaaatcatgttgtcactgaagtactgtatggatctgaggagttaggtgatagctgtaaggatgggaaatatgtcaaggtttccacttcaactggaagtgaatttactggagatgctgtgttgataactatccctcttggttgcttgaaagcagataccatcaatttttcaccttcgttgccaga

SEQ ID NO: 200330 - DNA, 828 bp, Zea Mays
ttagtttctaatgtatcaagttttaacatgcatcttccatgagatagagggagaactgcacaaactgaatttagtccatcgagcccatgtgggatgcgtcatggctcaagtaatggtttctgaaatcagctcatgctatgactggtgaatgctctgctgatatctctatctgcaggtttactctttctgtaatctacaaacagtaaactatattatggtcatcaggatttttgtcggtgttaaattccttcatgtcctttcatcatccattatgattaattatgtggttagtatagtgtaagcctgattcaccaacaatctcgacgtaaacatgctaatatcaacaacactagctgagacggagagagaagcagcaatcagtcgtactaatgttgtatcagcattgaaatgtagtcgacagcctcgctccagctgtcccaccaacgcacagccatgcccgcccgcctactcggcatccacgcgcccatgtatcgcacgctaaaccaaagaatgccagaaaaaggacaagcaaaaaaggtaactggaacaggggtggattcggagcagggagaagagacaggcacctgacgcggcaggcgacattgttggccgcattggccgatgggcgttggagggctgaaggtgccagacacgtggtcgactgatcacgtgcagccgtgtaggggcgatggagcactggagtcactgtggcgccgctgtggaggtgtggaagtggagccgtccgcgctcaacgagtcggcgagggtggacgacggcatgatgcagatccgtgcagactgcggttcgctgcgtcggatccgtgaagcg

SEQ ID NO: 200331 - DNA, 400 bp, Zea Mays
atggatctttggttgtctgctcgggcggctttggccattcggtcattggttactttagtctccaggcagttcattgttgggtgatctgagtcttcaccgtggaaaacatagtaaaatgttcttggctatagatggccctggcctctgcctcttcccctggttgggttgctgttgcggccttgttgcagagggtagttttggcatctggatggacctctcctggttgttgctggtttgcaatgttgttgacttgtacctggccgtgctcgtggttggctatgtcttgctgcgggggcctggtccatttcctgctggtctgcggagtctcttttggcttctaaagtggctcgactttgctttggtggagctcctctagacgggcatatttctcgaagagttg

SEQ ID NO: 200332 - DNA, 362 bp, Zea Mays
tttcgctttcggcctttggccaccaccatgcaagaagcgtcacgaatcatgagccaagggaccgacggggaggttgccggcgttgtaaacagccatgacgacaaggaccatgtccatggcacgatcagacgcgtggccgaagccgattccgagaaagacgaagtgcatggtggtggccaggagccaatattctttcagtgccttgatcaggagcaaccccccgatccggtgcatttggaggacgctagggtcgaatttccctccgacgaggatggtgacggtgatgacgtccgcgtctcctttgcaaccgccgatggtgatcgcctcctcgaggagcaggcggagctggacctggacgtgga

SEQ ID NO: 200333 - DNA, 1221 bp, Zea Mays
tctgagcttgatattcctgaacatgtatattttctcataccctttctcacggtggtcgtctatgtattacccacctatggataaatttaacttcaactggttgcaactaagggtgaagttaggtacagaacattagcccagcatttcacatgcaacaagatacaaggcgttttaagtgtgcccaccttattaacatgttgaccatgaagatgttatatccatgatctaagtatttctgttctttccatgcactcaaacattgcacttgggaaacatcttggtcacaatatctgaaaaaaattattttcaacttttcttcagtatacatagggataacaataggcttaagcagtaaattttatatagtaatatattgttcaaaggaaagatagatttctagaacttttgtcctgatagattactatttagtcttttttgatttccaaacagttatttgattagaaatcaacttctctggcagctgtcaattattatagtagtaggttttgttacctaaacgttccatacttattgacaggaccttgcacaaaaactttcaaaacttacatccctactcgttttgtattttctctgttgctaataaccagcattacaattgtgctaaagaggaatttttttctaggttaggcctgaaaagttcagttctctacgccagaggttgagttctattgaagcacacaaggtgaccttggagactctactgccttctggacacaaaattaatgacttgttaataaacatctggagagtttgcaaagcaggctatcaaccaaataacaaacacattctgggtgttcttggtaatatgggatccggtggctcccttctgggccagcttactggagctgggaggcctgcctgctggataatatttgatatatatgtggagaatgcaattgatgggaagcatctaagtgttacatcagctatcgggattataaaaggtacccctgactctcatttttgagttgtgatgactataatgcaagtttacatgttggtccaactatgtagacaaaaatgatctgcgtgtttgcaatcaaattattcagttcttgcaagaatgacatgattttgttactaaatagtgttccttttattcagaaatgaccaagacaatgcaagtgcttaatgaagcaagctggcaggaaacatttaaagctctttggatttccacccttcgtcttgtacaacgggtaa

SEQ ID NO: 200334 - DNA, 322 bp, Zea Mays
tgatgagtgaactacattttacatttttgagtttgttgagttatattgtccgtggacaagctgtatctggatgtggccaaccggcttcaggggctcatgcggctagcacaaggagcaaacaagcaacaaccttattctgagttgctatcattatttgttagttagctactagatccatttggtagtattttatcatcttgctgctagtatgtggttagagagggcatgtgatcattagttggaacttggcagactagaagaatatcaatcaatattgtcctagtcccattctcctacccttacccttgtggtgtggttgccg

SEQ ID NO: 200335 - DNA, 503 bp, Zea Mays
ggtagttctgtactatggtggtgaaagagagttgtgccaattcgaagaggcaattagtacggatggtcgggtcgaagcgtagtttgcagagctctgtgaagcgctcctaggaaggcatgccctcatcctgttcaagggtgtagtaccacgttcgcggtccgtcgtgtaggtggtataatgcgagccaaacacgatcagatgtgagcgtgtgttgcccttaaaaaaactgctcacaatgagtcatcataggaggtgaaatcgtgcttgtcgaatttggtggccgcaccaagggttactagtggcagcgctggagcggggttggtggtgtcgagaagttgggcagcagttacagtgatggtgggaaatcgataaggttgatgggaatgaatgagtcaacaggggttgggtggcgggcagcgtggtggtgggggtatggtggtggtggataagtaaatatgaagtgccgtcgtgttgtccctcggcacctcgtaggaaaagccttg

SEQ ID NO: 200336 - DNA, 500 bp, Zea Mays
caggcactagaactgaccagcacactggtaattgaatttcgtaatgaaatcgagaaggctatgtggatgaaagcacttgtccaggcaacataccgagcttctgtatgccttttttaacttaaaagtactcgacatatgacctaaagcttgtaatggtttgttttatatttcgtatcttgtttcttgtaggctcctcctgacgtgaacatattaggagatcctgttagccctcccccagaatcaagtacaccacggcttaatagcttgggattagtggatcttgttgtgaatggctctgttattgaaactaaactttcactgtatgggaaggtaaaacattacataaatttcggtaatttttctcaaatgagacctattatactcaagaagcatctgactttcatattgattactgtgtttccccatttatctcactatcgtagctggacagaaagagcagtgattcgcaagagcttctaatgctagagctccttgggaat

SEQ ID NO: 200337 - DNA, 277 bp, Zea Mays
tactggaatgggaaacgaatcttttgctgtcttgctgttgagctcgcggtagtcgatgcagaacctccacgacccatctgccttccgtaccaggaggactggagaggagaatcccgatgaacactccctgatgatgccttgctgcagcatagcctcgcattgcttctcgatctcatctttcagcagttgcgggtaacgatacggtttcaccgcaatcagtgttgtacccgacagtactgtaatgcgatgatcatggcgtcgaggtgggaggccacgt

SEQ ID NO: 200338 - DNA, 454 bp, Zea Mays
tggatgaagcacacactagtgttgccaatatttgacgtacgaggtagagggccccaaccatgcatcagcgtttgagggaacattagaggtcttggcgatggttgctgtgcgctgaacgatggggtagaaggtgctgatgcaactcacggatgtcgaagtagacaaagtagttggggaagagacgatgacattaaagacgtggttgtgctggacgaataagaagccatacgaagtcggacgtgtctaaccgaaagattagtccaaacggatgtgtctgcccaatggcagcagttcggacgcaaggtatggtggtgatggtagcactcgatgttcgtgatggaggactcaaatagcttgacaaagattgggtattgatacgtgctgcgtaaggggcacaacatggttgtcgttgcaaatgagacaacgatgtagatgtagcgacaaatgccatgtg

SEQ ID NO: 200339 - DNA, 526 bp, Zea Mays
aacgcgcttggaagctttccgacacaattttcatttactgcctgtaagttattcctgatttgtttgccattatttttctgcaattgctgctcacagcatttgacttctgttaaatatcgtgcagagatcatgaaatagacaaggatactggcacaactagtaggaaccatataaaatttccagctacacctgaatacaccaaaacaaaagggcttggtaacagcaaaggaaggatgactggcaaaaggagaaagaacaaaaggagaaagaacactgaccaatcaacaaaacctacagatttgccaaacaggttgtgtggagcagaaagtgagcaagctgacaatgtaggtgcaaaaagcacattgccccagattgttgtagagcctcactgtgcagcaaagcacttgaagggtgatccacaaattgccaaacagggtgttgctgctcgtcaaaatggtgcagaaactatgaaagggcatgaaaatcaatttggcatttcattttgtgttgcaagtactgaaacaga

SEQ ID NO: 200340 - DNA, 308 bp, Zea Mays
cttagcggaaacccaaggacactccgcaatccagcagaacatgggttagaccggcgtagtccgaaaccggcaggcctaaccgcaaccagcaacaagtcaacactatcactaaccaacaccccaccggagacatagctcgtcactaggagtatcccacacaacagagctgctgcgctaacaccagaggaagaggcagaggctgagcttcacaaccacgaaggttctactgcctctttcatggcgaagactgcgcataccccaccaggggttaccctgaaaccaaggccaccaaagataggatgaccaga

SEQ ID NO: 200341 - DNA, 276 bp, Zea Mays
cgaggggcaagtcctgagatccgaagagcgagcatgagggagaggggagggtgccgggatggagatcgtgggggtgcggttgaggtcgacgccacgacagtggcgaggttggagggagcgacgcatgacagagatgttaggatgagaaggtaatcgagaatcgcgatctgcgggtgtgagagagaaagcagagagagtgaggagacgagcgggcgtgggcagcgaccgacggatgacacagacggtgtagattgaccggaggcagaataggccgag

SEQ ID NO: 200342 - DNA, 271 bp, Zea Mays
gagaattttggctattataattttgcctaccgcaaagacatgaagacaccggtggttagctaccgcaccaaatggccaaccggttggaaaactaagtggttttatgttaaggttgatgagaaaaaggggaagctagttcagagcccactggtcctaaccttcgggttgattaggccctagtgccgcatgacaccggggacatcatgcccagatgctgtgggcgaatttagagttgtggctgaacatattggtactagggatttggttcagg

SEQ ID NO: 200343 - DNA, 290 bp, Zea Mays
caggatgggagattttctaagactcaagcctcccacattcgctggatccagcaatccgctcgacgctgatgactggctgcgcatgataaaaaggaagttagaagccattggatgccctgagaaccagcgtgtccatctagctgctcatcaactttctgggatggccctatcctggtgggataccttcagcactgccgtcagagatgctacctgggcagaatttgaagctgctttccgagaacatcatgtgccccaagggatcgttcagctcaaggaagatgaattccagg

SEQ ID NO: 200344 - DNA, 271 bp, Zea Mays
cggcagtcagcccattggtttcgtcgacaccactcgcctgggtatggtctgtaagcttaaccgctctttgtatggcctcaagcaggtgttgtggggttggtacaatcgctttgcctcctatgtctccctcggcttcgttgagggcaagttggacacatccatgtttatccttcggcgcggtgacaacatcatgtaccttttgctctacgttgacaacatcgtgctcacgacatccaatgccgcccttcaccacacgatcgcttagctgcag

SEQ ID NO: 200345 - DNA, 370 bp, Zea Mays
gagatattgaggatgttgttggagatgaacgagatatagagagaatcttttagaaaagactttaaaggatggatatacaggatggatataaaggacgctataggaatgcttccaacacgccatgtcgccattagagttccttagcgtagatttttaaattcgcttttggcaagcgcacatttcctaggcttctacttgactcctctagtccttatgagatcttcctcttgcacgacttgccaaataaatccatcagaatactgtcgaatgcaataaaaacttcctaccataacaattggtccctttcacactgatcaacgcagtaaccaaacatctcaatgcgcatacaatcgccacaagtgtgccactg

SEQ ID NO: 200346 - DNA, 341 bp, Zea Mays
gttcaggtgggctctctttcccacgcctccatggacatccacgttgggtcatccccacctcggtccgatggggcgacggcggtacgtgcttccacagttttaactggacaagtcaccttagaggtcggtgagctagatgcaaggagcctactgtctgctggtggggctgaggttgccccggatagtgctcttcagatcattcctgctgaccttccctcatcgagccatgactcagctcctcctgccctgggtctaccattgtttctctccaatctccaggtgagtcgacctcttgctctatgttgttcatattagtgaattatctttcttctgctcatctg

SEQ ID NO: 200347 - DNA, 381 bp, Zea Mays
gtgcgattgagattggttttgggaggtggtgcagcaggggcagcatgtaatgggagcagaagcgaataccataagcgccttgctaggaagatctgcacgttccttgtgcagatcggctccatgactctcaaggaggagactggaatagatcttgatgatgtctgttgcttgctccagacggcattggtcggaagaagcatgctgatcctacttgatgatgtttgggagcaagacattgttgatcgcttcacaagactttatgataatgattgccggtatctcgtgacaacaagggatgaagctatctacgagatagcagaagctgaaaaggtagaaatatgtaaagacgacatcaaggagatcagcacggaaattcttctc

SEQ ID NO: 200348 - DNA, 276 bp, Zea Mays
ccggccctctggctccgtccgtccttggcgcctgcacgatcccgttcccgtctccccttcgccgtggtcgctgtggtggtgctagcgccgtttccgtccgtccctgactgcaacatcaaacgggatgctccgtcacgtgcaggtgtatcagccgagtcaaatgcagcagccaatcatcgaggcgttaacgccgtgctcacctgctgtactgcaacacccaacgaccaaccaaaccttcgcaggtccgatcgataggacaacatccttgttggctgc

SEQ ID NO: 200349 - DNA, 359 bp, Zea Mays
ataccacaagtagcaatggagcttcgaagtcggagcctctttagagggagccagcccagatctgtgcattctgtttcccacttggggctgatgggtatattcggagtgacctggagattactactaatactactactagttaattgcttcctgccaaagctaccgcccttccttctcacctttcggccgctacacactcatctacaatcactgctaatccatgcatgcatcacagtaattaatcatcatccctgcctctgcctctgccttgtaaaaaaaactagactcactgtcataacaatcgtcgtcgtcatcatcatcatctacatgcatgatcggcatctgatctactacttttt

SEQ ID NO: 200350 - DNA, 283 bp, Zea Mays
cacgccacgcgccgccctctcggggtcaaacggtagggtgagcgagggacaagatatggcaatttttccatcgcccattctccccagtcctcaccccccacagaaaaggaagatgatctcccctcttgcctcacaagatcgacggcacccaaatacacaaggatcggatcaccaccgccctcacccaaatagaaatagggtgctggaggctgaggttgtgatgtatcacccaaatagaaatagtgcgttggtggattggtttggttgccggtatggcgatacg

SEQ ID NO: 200351 - DNA, 367 bp, Zea Mays
tggaaatcggcgtacaccccggattgccacgacggcttgctctttacccgtaggaatccggtgctggagacccctgccttgccctggctaggagctagggccggacgccatggctagggagatcgacggtcggctagaatggatcgagaggagcgtggggatttgctagaggtgggagacggctggaaggggcttggttgacttggcggctgcgagctgaggttaaatggatgatggggcacgattatatattcagagcaaacaaacgaggaaagattggtcgatccatagatgacggcctggtttgttgcagcgaccacgaaaatcccggaagggatctcaacggactaggaacgaagagcttgag

SEQ ID NO: 200352 - DNA, 295 bp, Zea Mays
gtgccgctaccttgcgtcatagtccgcaccagtagatgggtaggctatcggtaggatctttccttggcaccatgatgccatctacgctcactacctcactgggtctcactatgtcgttgcaacgcggcaatggctgccgctgccatgtaccgacgcatcatcgcctgccctcgttaaccctcgcatgttgtcagctcaccgtcaccgtttcgcgttggattcattgacacgtaacacgccacactgacgcactgaagcggccgctctgccctagcacaccgccaccgccggccta

SEQ ID NO: 200353 - DNA, 280 bp, Zea Mays
cctttgattctttagtggctgcccttgatacacgtggcacccgggaagcacagctgcgttcaatgttgcaaatgatcgagacaacctttaaggaagctattaaaaggagaagtgcaagtatagaattatctgctacagtgtatccaaagaatggagctactgacatgataagggcaaattatcatagagaggttggaagctcaagcagtactccttttaatgatacatctgatagtgtaacagcatattctgattcttttaaagtagagcttgggcgtaa

SEQ ID NO: 200354 - DNA, 327 bp, Zea Mays
atcacgaacatgctgcttgagttcttgtttcttctgattgacaactatgatgtgcagaggaaggaggcgattgcacgctgtgtgaggagtgcgtttggggtgctggtgaagaaaggagtggttccgtcattggagccattgacaggttgtgacaagttatcaccactgctgaggcaaaagcttctggcatttttatctgatacttgtgaggcagctgaagaagcttgtgggaagacaatcaatgaggtttctaaaggaacagagttgaacaagagaatttgctgaagcatgcacacaatttatggttgtcacaaccatctctacgag

SEQ ID NO: 200355 - DNA, 278 bp, Zea Mays
caagatcttgctcctgctatttttgctattatccctaagaggtttaccaagaggagactggttaaagatgctttgcagaattcgaattaggtaaaggatgtttcaggagctctctcctaaaatttcttgctacgtcttcttgatttggctgaaagtttggaggggatcttattacaaaccgaggtgcaagatcatcatgtttggaggtttgtggtttcggtgaatatacgttgaaattagcctatacaatgatgttccgatgctcgattatgttcaag

SEQ ID NO: 200356 - DNA, 807 bp, Zea Mays
cagtgactcacaaacaggttcagatgtagtatcagaggatagcgacgattcacacgccaagtccagaaagaaaaagaataatagctcaagttcaaagaaaaaagatgctaggaagatggttttcgagtctgcagatgaatatagcaagaatggaatgtcatatgggcaagatggagaccaagggagctggaatgttttccagagtttcctgctaagagctgatgagaaaagagataatgacgcggacctattcgccagtgagaaaaaagcacccccagcaaggatgaaggagagcacaagcgttgatgttgattcaattctcttggtggagcaaaattctgctggggccaatgaacataatacaacaggtttcagtatggaaaatgagaggattagaccccagcagatgctgtctggtgatgaacttatgatgtatggggaaggtgaaggcatgagctttggatgtgatgacataaaggagattgaagctggaggtgtgagatacagaagaggaacaagtgatgacttcatgatatatggacaggaaaagtcaatggacagagggagttctttggatcctcttgcagaagcacagtacaagagccccaccctggttgacaaaaatgtgcacagcttggcagatgaatcgtttatgatacctcttaggtctacctcagaggataaccatgaaccagaatgtcgtactgccattgacattgatgttgagcttccctcaactgttcagaagatatcagatgctaaagctggtagtcagcttttctatgagccagctgaattgatgccgga

SEQ ID NO: 200357 - DNA, 405 bp, Zea Mays
ctgaaccgcttatccgcgtttaacgctcgcgcgcgagggtataaattgtgggcatcgtgatcgccttgccctctccctatcctagccgccagggacaagagttttagcgccaccagagagctcgcgatggagagagagcgtgcggtgtgtggagtggggcgtcggtgctagcctcgcccgctactggcgttcagggatccgtggtgagccacggtgcttcgtgtggattaccggtggatcgccgtagcttgattggggggaatcgaccctgtggcgctggaatttgtcactgtgccagtttgttcgtcgagccgcgtgggtggatcggagtattcctaggatcacggtgagcaacctttttcctgcatcgcatggttatcctctacgcattaccgcgattagttc

SEQ ID NO: 200358 - DNA, 521 bp, Zea Mays
acgaattaggaaggagcttgagaaacaagattttttgaatagaaaggtattactggttctatataattgtagatgccttccccttcctcttcaaattcgtttacaatgtgatgtctgtgcagagagaggagcaaaggcacaaggaaatggagagacttgagcgtgagagaagaaaagaagaggagagattactgcgtgagaggcagagagaagaagagaggttccaaagagagcaaagacgtgaaaatgagcgcatggagaagtttttgcagaagcaatctagacgagtttgtttctgggttcctagaatgttaattgtaaatgtagtgtagtaaataccttatttatgctgcctacacttgtgcaggaagagaaacaaagacaaaaggagcaactccgaaaagagaaagaggcagcaaggcaaaaggctgccaatgaaagggctgctgcacgtagaattgcacgggactatatggaactggtggaagatgagcgtttggaattaatggaattagctgcac

SEQ ID NO: 200359 - DNA, 634 bp, Zea Mays
gagggatcccagcgcacgcgtggggtctgaccatagccaagaagcttctccacgactcctgtcaaattattgagttgaatcccacctctgcaagcaagtctgatctctcctctctgaagcttcgggcatggtgtttggatccactgatgcttcacaaggatatggatctccacatcattgagcggggggcatatgatcaggaggcgagatgcctaacctacaagattagcattgctattcttccatctccccttcagtttctctcatagagcagtcagtccccttcggctgaggatgagctgcatggtgaggaggacaactaggatccgaccaacccccagacccgacagttgggtccttctctacagcgtcagtctgtccatctttgcttcggttcccattagagattgggcagagaacggactgcatgtgtgcatggggataagagagaggcgcctcttttagctctagaggatggtgttgtattatgtgttggtgatgggccacagatctccccaagcccttctttgactcagtgcaggattatggctgtgccactggagaaggttgggttgagctcgccccgtcatgccactcaagctcctagcaagacaaccttgaattctaatcttca

SEQ ID NO: 200360 - DNA, 557 bp, Zea Mays
attcttagctgatggcgatgcgggacctactggagatgtctctgctccatgcctccattacttcatgccgtcctccctccttccacgctccttcccgcaagaggagcttccctcctccctttcccccaaacgctcccctcctcttctctcgcgctgaactcgacctggcgtccgactccctcgcggccccgtcgcagggtgtcgtcatgggtgatggtgtcgtcgtccctgccacagtccgtcggggtcggcttgtcctcagatctcgcatgatttaggagcagcgacatcagatgttacggacgcgaggccatcaacgtcgccgccaccagcaccgatgtcggccccggcccggcggacccctccccggtggccctggctgttcttggctgatggcgatgcgggatctactggcatggagcacagacgtacagtgcaggcatggtcgcggctgttcttagtttgtttttctaaatgagagtttcagttttaggattaaatacgaattcctatctgcaggacttaccggagatgtgctcatggagctgccatatgcg

SEQ ID NO: 200361 - DNA, 611 bp, Zea Mays
tttggtttatgggtgagcactcccatatgtctgcagagcttgataatgtaagtgtgttattttgccttccccttgtgcttcttagttgaataagaagtaaagcaaacagttgttagcccaacgaaagccttcacgtttggcgattctgaataattcagtaactcatagaactttccagtaattcatgctgtaaatagatctagagttctagataggatgccttagggtggtcttggacatgtcctgggtggttcatatacctgtaaattgtccaaatcacgcaagataaagcttttggtcattccctttagctgtaaacttgtaatatccaattgcttctggcatcatatagcaggaagcctggaagggtagaatgacatgtcattataatttccaccgctcctttattctcagctactactgttcaatgatttcacaggttgtttctgcagttctggaaaattatgagagcccatatgcaaatgctgataatgatgctgctgttgaggatattcgaactcagtgggtggatgaagtgctcaaagccgaaggtcatgaacctcctgctgttaccattttgaccagggttccttcatggaaagttattagag

SEQ ID NO: 200362 - DNA, 341 bp, Zea Mays
ctcggatgtggctagacctttaagtttaattccgcaattatttcggtcagccaacgttaagttttagaaaagactattcgccccctctagtccaccatatagaccctacagcagcgaccgatgacacccataagtaatggttataactagtgcttcatatatattgtatgcatctcgttcattttttattaatcatatcctagaaatgatgttcgtacctaggacgatcggatcaaaagttgctgcggcattaatccatgatcggaatgctcgacaccaatattgggaaccatccacaagtgtgtcaagtattgctcaccaatttctaaaatataattgcg

SEQ ID NO: 200363 - DNA, 1623 bp, Zea Mays
caagaagaggcaaggatcgaagggaaagaaaagcctgagaagaagatgacaagggagatggcagtgagggagtctacccgacatttggcaatactggaatccatgtctgcttcctcagtcccagtcgctcccgaaaccccaacctcggcggcgatgacagcagcgacagtgatgcaggataaggagtgcaagagggagaatcaggaggcactgccggcagctccattaattgaggaccctgtgccgaaggtagaaaagaggcacaagaaaagaaaagtggcacaaatcacgcagatggaaaacaaggtgatgacagagggtgcgacggtaaggaagaaacataggcggcagaaggtgaagcaggagcaatctggccaaacaccatttctcaatgatgtctattcaaaggcaggggaagaagctgctgctggtggcgtcatgggcagtcagtgtgtcaagaggatcgaccgcagcaagaattccaaggttttgaagaagcagcagacactgccccaaggctttttccctcccatagccaatcccgatttcattgatcaggaccccaattattgttctccttttggtgcattttttgcccaattcgcctacaaacctgagcgccggcaagatgggaatggttcgccacttcctagtaccactggtcgcacagcgaggctgcctcctcgaggccacccgttatctgggtcttctctgcttactgcaaaagaggtctccaaggctgcccggacaacaaccttgaacaccaagcaaccatgcccagcctcagaatcaacctcagattcacaagaagaggcaaggatcgaagggaaagaaaagcctgagaagaagatgacaagggagatggcagcgagggagtctccccgacatttggcaatactggaatccatgtctgcttcctcagtcccagtcgctcccgaaaccctaacctcggcgatgacagcagcgacagtgatgcaggataaggagcgcaagagggagaatcaggaggcgctgccggcagctccattaattgaggaccctgtgccgaaggtagaaaagaggcacaagaaaaggaaggatagggaggctgcaatgattataccatcggtgcccactgctgctgtggcacaaatcacgcagatggaaaagaaggtgatgacagagggtgcgacggtaaggaagaaacataggcggcggaaggtggagcaggagcaatctggcgaaacaccatttctcaatgatgtctattcaagggcaggggaagaagctgctgctggtggcgtcatgggcagacagtgtgtcaagaggatcaaccgcagcaagaattccaaggttttgaagaagcagcagacactgccccaaggctttttccctcccatagctaatcccgatttcattgatcaggaccccaattattgttcaccttttggtgcattttttgcccaattcgcctacaaacctgagcgccggcaagatgggaatggttcgccacttcctagtaccactggtcgcacagcgaggctgcctcctcgaggccacccgtcatctgggtcttctctgcttactgcaaaagaggtctccaaggctgcccggacaacaaccttgaacaccaagcaagcatgc

SEQ ID NO: 200364 - DNA, 590 bp, Zea Mays
gtctagcgatttctcactggtgtggtgctcggtcgtggatccgcgggccaccgtggatactcgcccacgatgacgttcgggactcatgtgggggtacaatggctccacgacgcccagtgaatggtgaccattgtcgtcgtgggcggggtggtgccacgaggcttcacctattgctcactagagtttgggcaaactgcggattcgccttactacgacgtcaaaccaacctgctgcatatctcatggtgagactcatctccacgacttcacctatttgtccttcacgtgtagcatgggtataatcagggtttatagctcgaggcacagaatgtttttttcgtcggggtctccgccataggagccggtggcaccgctagcggctgtccgaggatgggagatgaccttgttaccgtcgatttcatatgaacgatgaagatttcttgatgccatacccacttgcattggtgtgtgagagccgttcgatccgaatgagcgtacaagattagaagactgcgtaccgcttcacgaataaaatctgaaccattaattccgatctggactgtccgatggggtcacggttctttaaaatct

SEQ ID NO: 200365 - DNA, 460 bp, Zea Mays
ccggatatctccacactctcgataaccactatgacgacctttcctcccactgcacccacctaaactcccgggtggaaagcttagagcaacaggtcaaggaacttaaaaaggagaaggtgtccctccaagaaagtctcgaaatagcagaaggtgaagaggccaacactcgtgaagcctaccgaaccctgaagatggattacgataagaagctaaagaagctcgcccccacgaagaaaatccggaagaagaccaagaaccaaggatgccagactgagcggaagaaggaagcccctccagcactacctccctccaggatagagaacttgtccgacgtcgaggatatgtccctagctagccttgacgaccttctcaaggaatttggggacactttagaaagggagttcagaagtaccttagaaagcgctcgcgtgtagtgcgacttgtggtaactgtatgcttg

SEQ ID NO: 200366 - DNA, 283 bp, Zea Mays
aggaatagcacaagcctaattattgttacacgatagggaattaaacacctagcggcgaggcacctaataacatttaaaagcaatcactaggtactgagatattactaaatacaaccatcacatttttctagcttaaacggatctaactcaaacatcaagaacaatattgcaagataatattacgattttacacagtaaagaattaaacacttaatgagaaggcatcacgacatttcataagcaaacgctagctatcgccatataaccaagcacaataatcacg

SEQ ID NO: 200367 - DNA, 350 bp, Zea Mays
aaaaatattagacttacttctcgctttgtcactacaacaccctttagtcacatgaccatcggaagcatccttcacacggttatacgacagcaatctaacgttgtgttacacaagacatacatcttccttcgttgcgagtataaccatattacggcatatacccgcacacctcaatccattatcttacgccaccactattataatacaccacggcgcacacacacatacgtgtactaattcaattctcacataacttgtattttcaaacttactcatcacataaatttccatcgatgcatttctcacaacataaccggcattttaaaaattatcctcacagcaaaccacac

SEQ ID NO: 200368 - DNA, 404 bp, Zea Mays
accgaacccgccgcgcggcacgctcgatcctcgctgggttgttgcgatccccggatataaaaccaaaacgatcccgcgacccccttcgacgatcccatcctcttctcacctcatccagtccgccgtcatcgccgttgtccgagagagagggcagtggggagctcgaatcgcgccgccgtgaagagaagctctacccgaccaccaaaatcagccggtgaacccgtcgttgtggtgcattgggtgttggggagggtgcgcgaagcctcgccttgggcgaattgtaatccgggactccggaattcctcgccgtgtccgctgcgccgccgtgaacccgcccttcgccgtgggatcgagcccctgcgtcggccggaacatcaaggtatgcaccgacctcttcgttggag

SEQ ID NO: 200369 - DNA, 485 bp, Zea Mays
tgattctgtgtctaagtgttttgagtctgatgattctgggagttcgattgtgtggacagaggagtcttcggatgaggacttggattattttacagcattggatgtggctgcggcggagacttctccgcgtgtgatgggtggtgaggatcttccgggtgcgagtgctgggcgtaggcggcgaagggcggtggcgaaacggagagtgggtgagttgtcgcgaagtgataggcgtcatcgtggtgagatggagggtggtcgtcttcgtgtggacgggactggcaaacgggaattgttgtcctcgccggctgggacgagtgtaggtgagggggagctgtgaagtctgtttgatggtgaggaattgaggataatgttgttcaactgtagggagatgggtatcatcccgaaggttgagccaatgtaatgtgtgatgccctcgctgtatgtatgtaaccatattttttgtgtgatgaagctgcgcgctttcg

SEQ ID NO: 200370 - DNA, 302 bp, Zea Mays
cccagatggtcccaacaaacagcactgctcctccttcctgtcatgcctagaatctgaccgaagtgatgttgtacctcgttcattttgtcttcctggctcattaacagcatgtcatctcgagttagcgatctgattaaatttttccttcttctattattggccgctaagtgaaagaacttagtgttagcatcgcccaatcgcatccaagtaagtctggaatgttgtcttgctcgtgacctctgagcggaggcaatatccagaatcttgattttaagggtcctcctgaattccatagtttgaat

SEQ ID NO: 200371 - DNA, 309 bp, Zea Mays
tgcctgggagccggtgcagagcgcgagcgcgtgggggatcgatgttggggaatgaggcgagcagagaggagacatggggaggattctagagacaacgagtgtgttgagacttgagagggccctgggcgtccgcgtgagggagcctggctgggtagaataaggagcccgacgtgtgagagcattccatagaaacatatgtgcttatcacaatggaatggactcgatggtgccagctcaaagtgaatacggatacgtggccacaacggaatgacgcacagatagactggcttctgttaagcggcaaaaccc

SEQ ID NO: 200372 - DNA, 446 bp, Zea Mays
cctgcctgtgtccttgcgttagaggcactactgtgtagaccatgtcgttgtttttgcaccacaccattggaggaaggtggctccttggtggtctgctttttttcaaaaataaaataattcacactcaggccacaacaaagattagtctgcaatgtattcttacatgcatgtgtctctgaacctgaactgaaagaaaaaagatgtcattctatactgactgaaaaggtttctcatttgattcttcttcctttatctcttcttatcttgacctgaagtttatatgttgcctcaatctactatcaaatttaaacatagggaacatatgactaatataagcaactgaacaagagatggaggtgctcgagggctctacaagtctgaaatatttgcaacgtcatcttctcaatcagcgttgaggccaagatctcgtggatgggcatgatttg

SEQ ID NO: 200373 - DNA, 422 bp, Zea Mays
ctggactgcccttggttgggggtccggatggcgctcaggggaggtcctgtctcctccggtgttggccatcacgtggcagcactgggccccttaggccagaggtccgggtggcctgtcatgagggtcagagccgttcccggaggtctggccatcgagcataggtttcgagagccctcgtcttcaagacacgtggttgacccggaccccctctactggggttctagggcgctgatcacaactaccggtcttcacccgagctcagtgggcttactgggtaggtcgagccattgggctaggacggaccaccgttagcatggtggctaagggtagtgccggagggttcgccttgacccagcagtagtgggtacactaatcttgaagtaccgacataactgttacagaaagagtggaaccatttccag

SEQ ID NO: 200374 - DNA, 421 bp, Zea Mays
aaataatgtcagttccaaaacgtttgtcaacattttcctgccccacatccttttctcacttccctgacacaacttttatgacgagtactaaacgatgtaaaagtttatggaaacttcatagaattaaaagacatgtaacagagtctctcattagtagaaatatagaattatagacctgtaagtacttttacttgctttctgtataaactgggttgatcctgcatcatagaaagtagatatacagaactctgtccttagtttaatgtaaacattatcctaggtgatacaactactaactaaaatccaagatgttctaatcatcgcacttttctgcaatggtcccatgctctgccaacgtcaagtgatatgatttttcatcgttcatagcaaacatatacaagactaatggatctaactatgg

SEQ ID NO: 200375 - DNA, 3123 bp, Zea Mays
gatcaaacctctggtacagccaaccaaagatataatgagagaacctatcaggacattccagtggcacgagtttttccctcatggtatttgtcatgagatccctaatttacattttttataacttttttggcttcttatcgaggttcaatttgcaggaactaacaatattggtgttgttatatcactctgggctccaataatcctggtatgtcttgattcctcttgttgctcctaagtaggaagtctttctattactttgagtttaattagttacaatacaggtatatttcatggacacccaaatttggtatgcactgttctctactctgattggtggcatctacggggcttatcgtcgtcttggtgaggttggtaattattttagtatcttgtgtatttttaatgcacttttctttggccttcgaagcagttccttgtccaacaaaaagcattgcatctagtagcaattagaaaattagtcctaggattgtgtccgctccctatttttaagcaaccgtttctagttttccatattggtagcataaataagaatgctgttattttttttttaccattttctttacccaattctgcttgttttattatgcatctttactttattaaaatttctctagtattgtggatcataatttatcatgattgatgagacttacatttggtatttgcggggggaaggcttcttcagtttatccctttcccagaccctgctcttgtgggagcctccggcactgggtttgccctttccttttttcatgagactcacactagactccttttctggttccattatatcagatacgtacattaggaatgttgagatctcgctttgaatctttgcctgaggccttcaatgaacgcttgattccttctgatgcaaataagagtaaaggtcttcgtgctgctttttcgagtagacccaaggtatttgtttctattgtaagactgtgcattatgagtagaccattggctgtttacctatgtgatcttacaaagtcttggtttttaggcttctggtgacgaaagtgagagagagaaaagagctgcaaggtttgctcaaatgtggaacgccattattacaagtttccgcgaagaggatctcatagacaatagggagaaggatctgctactggttccagactgtaaagaccgtgaacttgatatattccaatggccgcctttcctacttgctagcaaggttgatcttgctctttctgtaatttctctactcactatatttgtcgattcagcagtttattgtttatctgctgaattgtagatcccaatagcactggatatggcagcagacagtggtggaaaagaccgtgatctgacgaagaggataaagtcagatccatacttttcctttgctatcagagaatgctatgcttcattcaagaacatcatcaataccttagtatttggtcagcgggagaaagagtatgtcttctcttaccaagattattatttattagggaaatatggtacccattgttggtacttgctaggccagggctaaaactaaaataataccaattctgctctgaacacaccatcccaaatcaagggctcaaatataagtgatgcatttagtgtgaaagaatgaagatatgataaactgaaactctggccttgagtcttcaactgtcatgcatgcagcttttaatgaatttgtggagttactctattgaacttaccctccatattagtgaggtggttccttgaagcttccacatactttattctcatatgatatcagccattttgaatgggtaatagtttcaagatgctgaaactggaaagagttgtttaatatgaattggagggtgtgattatcacaagggatggaaggggggtgggggctttctaggattttctttttgtatatttaaccttggtgtgtaacatctgtttgactgaagttcctttaagcctcgttgattttctttccgaataaccatgtgatgcctatttcagtgtcctagtacagattttcacagttgttgataagcatatagaagaggaaactctgataacgggtctcaatatgaagaaccttcctgcactgagcaagaagtttgttgaattacttgagttactggtataaatcttatcattgttgttttaggtcatgttcatggtggataccttctaactgtatctatttcttgagtgcagcaaaaaaacaaggaggaagacttgggtcaggtagttattttgttccaagatatgctcgaggtggtcacgagggatataatggaggaacaggacctgctcgagacgtgagtagcttggtttccttctgttacattacttgatattcttcttcggatattaacatgcatagcatgccacttatgcagatctgcgtgcattctctgtcatagctaccgtgttatttctttttgtttgttagtaacaaaaactgaagctggagttcaattttgtttgtacatacaatttggtgatttatctagttactttttgcgatgatattgagtgattatgggactgattgtctagtctactgaaatgttgtggtagcttgtgttatatatttttattcttctgccaggttggattctttacatggtgccaatagtagaaaacatgaaggaattacaccgctagatcagcaagaccagttgtttgctaaagctattaagtttcctgtggtggaatcaaatgcatggactgaaaaggtctgattttcatctccatcctttatatataggggattctgttatggtgcttatgtattttctttctgttgctgcaatgacatgaacttttatgcttgtttcagataaagaggcttcatcttctgttaactgtgaaagagtctgctatggatgttcctattaatcttgatgctaggcggcggatatcgttcttcgcaaattctctatttatggatatgcccaatgctccaaaagttcggaacatgttgcccttctcgtaagtttttactactaattatctatttgtgttgtattatgcactaatttagcgctactccttggtattcctagatatgtcatgttatagtttgctcaatgtgcaatcattttgttggcaattttcatctatgaaaggagatatggc

SEQ ID NO: 200376 - DNA, 271 bp, Zea Mays
caaagattgtgagatggagatacattatcacccatgtaaagcaattatggttgcggatgctttaactagaaaaagtcaagtcaatatgatggtcgctcatccgatgccatatgaactagcaagggaatttgacagatgagtctcggatttctgaacaacacctaaggagtgacagttgagctagagcccactctagagcgagagatcaaggatgggcagaaagatgatgagaagatcaatgaaatttggcaactggtcttatatgggaaag

SEQ ID NO: 200377 - DNA, 568 bp, Zea Mays
agatgggtggtgggatgggcacatcggttggcatcgaggtggggggtatgcctccataccctggcaagccataggagcagcttgccggaagggacgatgtcgatgatgcaggcggagtctccactgctgcaatgggtgaggacatggaggacatctgcgttgggaaagccccaagttggcgctggactttggaaagggcgtggtgatcgcctccaatgacaaggctgggcggcggacacgacactgtcgtcggcgttggaccccggtgttggggcgaaggctgaccgcccccctcgctcggttcatttataacgagagcaggataaatcatgacggagggaaagcgaagtctactccaaccaagcgaaggccctaagacggagggagcatccaaggcaagcgaaggctttgccggttcctggtgcggccagtaatggcgaaggccttgccaatttccgaagacccagcacacgcaacacgaaggctactgtcacaacccgcacactgttgttaaagcgggcccgtgtggaaccgccctgagtcgcctggccccacttgtaagtcacag

SEQ ID NO: 200378 - DNA, 378 bp, Zea Mays
gttgtcaccacccgcagtgctctcaagacttgctccttcgccatccaaactagcaggacatgagggagttgaacccaacactgcggcttccccttctgcattgcaatcatcactagacaaacctggcacacggccatcatcgttggtggatagtcctaggcggcaaaatagcattctaattagagggctgggcgttgctgctgagccgtttgggtctagaaaatattttaaagagaagggaagcagtaccatccaaaggggaagtagtcgatggcgacaacggcggcgttgctgcacggatggaggcaggagcaggaggagtaggacgtagtgccgcgggagacacaagggagcgccgaacccgctccctctgctgag

SEQ ID NO: 200379 - DNA, 1906 bp, Zea Mays
cagaaagcagcgtgcggttcttggctctacttgctggtccattttatcctatccttcaccttataaatgaaaggtgtggcttccttgttcaacttgtaatcgtgtatcagttcgatttgtgatacatgctatgttgccttccatcatatattgcgcttgagttgttgtgaatacgtgtttgcacttgcctgcctgtatgtgggcaatggtaactgaaatgtcctaaatttgcagagatcctaccaaatctttgtttggttctgctgattcagatgccctcagaactagtccagcttctactccaacagtttcttcaaactttgaggcatgtaacttcagattatgtcctttttcccttcctgagcgaactttggataatgttagtgccgattgacagtatatacgctgagctcctttgtgaagttcaaaaatactaatgtaaattcagcccacattacagcttgccttgattaatgggtgactgctaaaagttgcagcatgggatgcaaaaatatactctgtaggcaacttgaatagctcaaatcaaatttgttactacagaatggctgctgaagatctgtcactgtgcttaggttgatgttaccggggatattcctgttacagtgttacccttcaccattacacgttaaaagtttcaattgggctgtgtggggcatttaaataccaaaaatactatttttctgatcacgttgttaatttcttccaagcattcatgacaaatggttggtgtgtcttttgtctgaccatcccattcaaggtcacatttttcagaacagtaaatagttttcacagctgggccagtcctgctttctgatgaaacttctagctaactagcttagtttgctatttgaaatttggccgtaaatgtttagaaatgaggactaaatggttaagcgtgtaactttttcttggtgttttcttgaagtgtgaaacctaatgcattaaatgactgtctcaaacttttttttgggttcaaaatgatattgccatcaacctatcattcacataaggattttgaccttggccctgttatctccatagttccatgcaagcaccaattttatttcaccaatcctttcaattcaatgaaagattgccatcgtaacaaacctattactctgcaaaaatcatagtatggagtcggacatccttttatgttccactctctgagtggacctactacaaatcgtttcttttagttccttgcaagcaccaattttctttcaccagtcctttcaatccaatgaaaggttgccattgtaaaaaacctattgcgctgcaaaaatcatagtacggacatccttttatgttccactctctgagtaaacctactacaattcgtttcttttattttagaaaaagcatggccatcatacaagtatgtaggctgaaaaaaatgtatctggatctcttgctcgagcttgcctcacccctccaggcaaaaactggaacatacaatgtttttggtttatttgcttgcttgcttgtgtcgtttccttgctggcttgagagagccaatttggtttgcccatgctggcaaggctaaccttgctagtagaggtgaggcgaggaaattcagcaaggcaaccgaatagccccaaaatgtcccatgcaaaatgcccctttgttccttgaatgaaaagtgccgcataagccaattagagaagttgagggggttgtcatttaggacatcaaatacagatattttaggtgtctgttattctcttggggaacatagaggcactctgttcagtttgtccaccgatgtaatgttctaaactctttcttctaggcacaaccaaggagatcacggagtccatctgttcagcctgcttcatatttgctggcatttcgatctgaaacaactatgctcctcttaaggaaa

SEQ ID NO: 200380 - DNA, 324 bp, Zea Mays
cttcggacggtctagctccaccatcgtccgcccatcgccacggtaagactttctccccctgtgccagttgattttttctcgtcgtgccctctgtttggtcgccatctgacatccgccttctccatcggatgctctttctgctagaccttcgcgttgttaccaaggtcaatcgccgccattttgccggcatgacacatttcgtctcctccattacgtcgtcttgttcgtccttgcttttgctctaactgctcgttcgttggccttgcaggtgaatccaaggttgcattttcgcgatacgcttcgaatccgttcgttgatcccgat

SEQ ID NO: 200381 - DNA, 285 bp, Zea Mays
tttttcttgacaagcaatacagaggaagaaaatgggctcgaactcggttgaatcaacccggactgcaacatctcccgaagttggcgttcgatttcgtctttaatagctggaggatagcgatatggccgcacatgaactggtgtcgctcccggcaacaggggaatggcgtgatcacaagccctcgaaggaggcagccctttcggtggtgcaaatacctcagcaaattccttcaacactgactgcactgacaccggtaaattcaagtcatccaaagaaggagttaca

SEQ ID NO: 200382 - DNA, 320 bp, Zea Mays
gtttttgcgaaggtctgatcgagcccggcgagggtgggtggggtacgatagttggacaaggtgaaggcgcacccaaagagggggagctccatcacacaaatatcattaagggtagagttgaaggaggagcataacctattgttaatacggccaaagatgttctcatcatgggattgaacaaggttgaagtctccaagcaagagccaaggaccttgaaccaaggtgtagaggttagagagttcaacaaggaagaagaggagaggtggtggtaggcaagagcgtagacattcatgatggcaatcgagccatcaaagagtgga

SEQ ID NO: 200383 - DNA, 335 bp, Zea Mays
cccatattgctcataaccttctttctgttcgtcggtttaccaccgacaattcttgttctattgagtttgacccgtttggtttatctattaaggatctagccaacaaggcccttctcgcccgatgtgacagcttgggcccctctacacgctccgaccatcctccactggcacgtcctccctgcttgtcctggcctctatcacctcctccaccacttggcatcgttgcctcgaccatctaggacctgacgtcatgactaagttcaccaatagtccgacatttcttgtagtaggggacattttgagggtccgtgtcatgcttgtcagttaggctgtta

SEQ ID NO: 200384 - DNA, 358 bp, Zea Mays
tggaagttagggtttgaagtagaccaagtacaacggcggaggccgggattgtgcccagcatgggcacatctagaagttttgttatcttatctaggccatgtgggaactcagttctttctattgcaaatagattagctatagttatatgcaattatttgacacttatttcttttgttcctttcttatgttaatccaggagcttaatactgcagaagacttcatctcattttatgaggagatgataccattggtacaaacacttcctcaaattgtcttgcaccgggacaagctcttttccgcacttctacaaagggtaaacatgagtgcaagattgtccctggagccaatactcatgtaa

SEQ ID NO: 200385 - DNA, 482 bp, Zea Mays
atttagggtggaattggtcctgctggtttatctgcagaggatcttcatgttctagaccttacacagcaacgaccacgatggcacaggtaattagtattctcgacttgagtttagaattgcatatggttatttttccatattgttgctaaggttgccgcacatatgcagagtggtggttcaaggacctggtccaggtccacgatacggtcatgtgatggccttggttgggcagagatttttgttgactattggtggaaatgacggtaatgcaaagctctcttcgacatttgtaaaatttcaaataatgtttcccttcactatggcacagcctgaatggttccgaactttggatcctggaaccattttcatgtctttagggaagcggcctctggcggatgtatgggcccttgatactgcagctaagccatatgaatggaggaaacttgaaccagaaggtgaaggaccacccccatgcatgtaag

SEQ ID NO: 200386 - DNA, 283 bp, Zea Mays
cgacggcgacgcaagggctcttccgccatcggtcgccctcttcgtcggcgaacttttctcctatgagttcgtcctttcctttgttctcttctcctcttccaaatctgtgcaaatctggctggacggatctagctccagccgcaccatggtcgagcgagcctgctcctcgcatggttgttggctacatatatttccccacaaagcttttgttgtttgtagttggcgccatggtcgagcgagcctgctcctcgcatggatgaactgatccttatttccaagtcaa

SEQ ID NO: 200387 - DNA, 757 bp, Zea Mays
cttatagagattctgcagtatctaaaggacagccaaattttggtttctcatctgggtcgtccagcattatagtgacaaagttccagaaatcacctgaatttaacaatgtatcctctactgctaaacatagcaaacataaaaatctgtgtgatgaaggatcaagaattgagaaaagttcagcatccagctatgtgcctaccagtacaggatgtgaagaacccctaaatagttctgccaaatctgagctgggtccatcaagagtgaagcgcaaatgtaatcagatttctgagggaaggagactggaagaaacagataatgaggaacattgttctgaactgctaaaaaagactagaacactgaggtgctctgttaaaggttctgaatcagatgattgtactagggctagttcccagtcgtcccagaagggggtttatcaaccacaaaatgaggttaactcattttcttgcagggtgttgagaaccaagcgaaaacatcctattatgcatctaaataagcatgtgaaacagcttcacagacagaccaagttttttgaaggtgatgagcaaccagatgccaagggcaattttcttggtggattagattcctatgatagaaagaggcaagtagaggatatgagcactctggataaaacaagacatcaccaggaagggagtcgagcatttgtccgcaaacttcctaaatatgtgtctctgaattgcattgttaatgaaccgaatactaacagtgaaggtgcttg

SEQ ID NO: 200388 - DNA, 325 bp, Zea Mays
caagtgcgcctgacctaagtcgtcggcctgacgtaagctatcgggcagagcccaacgtaaggctctgatatggggcccactaatatgggggatggatgggatgcttacttgcccatgtcagtggcaggtggcgtacttccccgcattaaatgcgtgcgacgcgtctagtctgcagcatatggtatccactatttccccacacgtttccaaggcaagggcattgactcaatgcgtcgctttggcacccttcattatgacctccattattcctcgtgcattactaaggaatgaagagacaggcaaaggagactgaacaacactgccc

SEQ ID NO: 200389 - DNA, 1308 bp, Zea Mays
tggttatcagcagttgagtttgctcttctgaagggtcgccatccacttatcaaagatgtggacatcacaattaacccgtccaaaggtctagcatttgttgaacctcaagtgaatcaaaggaaatctccaaaaggaaatagttttcgtcaacattctgagcttattttgtataataatgttgcacatggaataaatggactgctagttgattctgcaaataagtactctggtgctcaaaacaaagaaaatgggcagttgaataataatggtgacataggaactgtagacaaagatctggaagaagagttagaagagagttctgaagatgttgagaaaggtcaggcactacaatcagcaagtcttgtgatgaatatgctagatgctacaatgcctggcactctcaatgatgatcagaagaagaaggtatgcagacattaaattggcaaaattggttctacagcatcaaaagttcctgacttaagcaaactagcagtaaaatgttaactttttctagcattttgtcaactactagtagcgtttttcacaatgagaatgagaagtaccagaagtacccatgatcctttttggctactgctatttttcttatttctcgctctgctcatgtctgctcacagacaatgagacaaaggtgactgagcagctcttacgtgccaggcgcccaggcccaaatgtgccgacctcctgtcggtgacccagtggcttgctttctcgttggtgggtccctggtggccttctgctggggtggcactgcctgcccatgcgcccagcaggtagtgtggcctgcagagcaagtcacactgcctccgttgtcttcctccctccctgtcatgcagcaggtcctatggtccacagagcaattgtctgattggtttgtcggtgacgatggctacaagctcttgcagtatgtacactgttcaatcaggcatgagacggagaggcgttgataacaagcaatgccttgttggaattagccttgtggtattttcatcatggataactgcagtggatggaaaaagctaggtgcgctagaaatctgaacattggaaacttttgggtgctattaaagtgtaccaaaaccttttggtgctattttgctgaagtcaggaactttgggtactatagaacatgtatgtcaagctgcttacaagttatatttttgtttcttgttataaggttctggtagctgtggagcaaggggagactcttgtgaaggctctagaagaagctgtacctgaagacgtgcgcggaaaacttacagcttctgtaactgaaattttacattccaaa

SEQ ID NO: 200390 - DNA, 499 bp, Zea Mays
gaaacgctttgttctcttgtctctcgcttggtgagtttgagcgagttggtcatctgactacggctcatcagatctggtctaccctcgagagattccatgagggcaacgatcatgtgaagaccagactgtttgagacgtacaggcgagagtacgagaacttcacacagttggctggagagaccattgattccatgttctccaggttccagtcaattgtgaacaagatgcgtgccaacaaggcacagctaccctatagtgatcatgagagagcgctgaaattactacatgctctagatcggagggtttgggaggtaaaggtctcagcgatcatcgagtcgcccaactacgagactctcaccgtggacgagctctttagtaagctcaagtccacagagattgaccaccagactcgggccaagattgagaaccctagtgcacccaccatggccctggtctctggaggtggttctgcttctaactcctcacctgctatgtttgc

SEQ ID NO: 200391 - DNA, 476 bp, Zea Mays
gtgatcaggaagggtgatcaggtttgggtggcaagcaactctgctctgagaacaaaaattatagatgccctacataacagtgttgtgggggtcattcaggaggccaggccacataccacagagtgagaaggctattctggtggaagggtttgaaggctgatgtggtgtgctttattaagcagtgtgcagtatgtcagcaagctaaagtggagagggttcatccaccaggtattattcagcctttacctatacctaaaggtgcctggcaagatctcacaatgggttttattgaaggactgcccaaatcagaaggggttgacactattctagtggtggtggacagattttctaaatatgctcattttttccctcaaacatccttcctctgcagcaaaggtggcccaagtgtttttggataatgtggttaaactgcatggcacacccagatcactggtttctgacagagacaaagtttt

SEQ ID NO: 200392 - DNA, 521 bp, Zea Mays
aaggaggaggaggacctcatggcggagcaacgaaaagatttgattgtattgttccggagcatttgtcgtgtcgcaccagctgccgctcagctgttcataagagggctgattatgacagctctctcgtctgcagaagctagtgtggaggatgttgaggttgctcttaccctgttcttccggcttggagaagctgtgggtgaagaggagattcggagtggggcagggctcctaggagagcttgtgcccatgctcctttcagcgaggttcttgtgtcacacacatcgcttagttgcattggtgtatctggagacagttacccgctacatgaagtttgtacaggagcatgtgcagtatgtaccacacctgcttggtgtgttcttggataaccgtggaatacaccatcagaatgcccacgtgagccgtcgtgcaggatacttattcatgagggcagtcaagtcattgaaggcaaatctagtgccttacctggataccatattgcaggtctttctttatctctcttt

SEQ ID NO: 200393 - DNA, 635 bp, Zea Mays
gaactagaagaaccaaaaacccttttctcttctgttaggttatgtctcttctgttaacttctttttttggtcacaataggtgataggcggagatctctgttgcgcggccttactgagtcactgtcacaaattctgcctctgttgtattctgtaagtttgcctttacacctttaccatgttcgcatgggagatatggaaacaccgaaatgcctgtgtgtttgagggaagaaggccttctgtccctgctgtttttcaggaagttacttttgaagatgctctttggtgtagggcaggtgccggtgctcttcaggagctcttggcacgccatttcactcctggacactaggatgggttgctagtagtggagtgtagctgtgtggattatgtgggtggtggtttgttggtttggtggtcctgagcccgccatataggtgctcagttcctcggtcaaccattgtacaagggactcaccatttggtagcctcctttatctttctctcttcttaatgaaatgactcgcagatctcctgtgttgttcttaaaaaaatagatgccaatgattctgttgggttgccttggttcatgatattctgaatcatactaaacatgggtatcatgtaatgtcttgttttgta

SEQ ID NO: 200394 - DNA, 451 bp, Zea Mays
ccaggatcgcctccaagcatccgaattcaacagttggtaacaatctgctcggccatctctagaacgtttcctcaagatccacgagaatgtttctgatgctacatcacgcgtgcaggtgtgttctactgcggcgcaccgacgcttgccaaggagctgaaggctctggcgcacgagatgagccacaggacgggcactcgcttccatttccacaaggagtacttctgagtttcgacggatagaatgggcagtcgatgctcgttctaacgtgatctggtcttttctgatctgatctcgatagcgttaggtaccggtaaagaagacagaattttgcacagatgcaagacaaaccaagctgacctctcctcctgatctggaactgtacatagcataaaagaagcaccacagggttagcttagtatacgtagcacaattcaaataaatatattgacaa

SEQ ID NO: 200395 - DNA, 367 bp, Zea Mays
ctaccaccacaaacatggagaacaaaacagagaatagcctttctatgaatgagcttttgctgcacctagtttcttcctggatagccacttaaacttttctgtccctcacctaggttggactgaatatttcattgtgaaaattaatgagggtcagagccggcgtgtcagatgcatggctccaaagtgcaatgctatttgtgatgaagcaataattcggaaactagtcattgcgagacacccagatattgcagaacgttttgaaagatttttgctggaatcatatattgaggataatgatacagttaagtggtgcccaagcacaccacattgtggaaatgctatacgcgtcaaaggtgatatttattgt

SEQ ID NO: 200396 - DNA, 540 bp, Zea Mays
tatgctcagaactagcaacttgatatgcaagagatggtgctgacaaaaggatctgactgaaagaggtgcgccagagtctctgacatgacatacctggacacttctagtagcaagatttgtatagggcagagtagcttttccatcactgaaagactgtaatgactccctatcataatcagtagaagcaatgctagatgtttcacatgctgatgccatatcttccaaagctgttgaagtgtggtacacttgagcaccttcggctggtttagtgtagggtgatctcacaccagatgtcaactctctcaatttctgctccaacaggagtcccaaaaattttccatctatgacatcaagtttagtgtttgatgtattgcttgaagttgacacagtgttctgattccctaatatttgtttttccactgaatgattggggaagtgggtgccatgtagtgacttatgaactggcgaggtaaatgtgaatgaaacaatctcagtgctgactttctttttgtttgttgaaaaagatgactgctcatcaat

SEQ ID NO: 200397 - DNA, 274 bp, Zea Mays
gaacgtcggcgcgctgtcgctcggctcctgcccatggagagtcgttcgcccgggttcatgctgcctgctcgtctcctcgtagtgaagccacctcactgtatgtttccctgccgtggctcgtcctcttcctcccactacagtgtttcttcttctgctcgccattaatggcgatgtttgcaacagtttctcttccttgcgcgattcaatcgtctgccagtctttcttctaccattagcaaacttcattaatggtgtgattgtttcttcgaatacag

SEQ ID NO: 200398 - DNA, 606 bp, Zea Mays
gtgatggacgcgcggccccaggcgagtgtgaacagttgcgcggtccgatgaagactgggaattgaaacgccgcttctgcagacctctggaattctggtcactttcttcattcttacgctctggatctggtggcgtcggcgaaaaatggagaggaggaagcacttccggcgagttcccggggcgggaaataaggattgaaattgggtaaaccaccgtgcgtggggggagacgggtcgtcgccaatcaggaccgaaggttcctccacgtgaagatccaataatgaaggcaggtcttcaggattatcacaccaaacactcaatttgaacgtagacagatcagaaccgccaacagagtcaaggtgcagttcatgaacaaggcaatgtccaacgagaagctgctcggctgtatgcaaaccccacaaatgaaacggaagtccgcggagctcaatatcaagccgatgaggcagcgtccctcccccattagccatgaattgacgggaccacctcttgatgtgcatccgaagaggaggaacgtagaatgactgacctccactgagccaccgatcagccatctccacgttgggaagcaaggcgatgaaggtgttcg

SEQ ID NO: 200399 - DNA, 368 bp, Zea Mays
ggagagttacccctcgaccatatctttcctcaaattgatcaatgcacttattgtggaagaaagaaacataagtgacaaaggccggaggtgcatacttttaactgattgtgttgtttcatatcctcaccttcaacatatttgagagtaagatactttttctaacaggttcatgggtatctttaagtttgtttatgaggatgtctttggtccttttcctcaaagagcttatgctgaccccctggaaaaatgggagcttgctcttgcttgcttggagcattttcgcatgtgagtagaatgattttgtttgaaaatttgattgcttatcttttttattgtggacggggaaccatgcaacacgaaccctgatg

SEQ ID NO: 200400 - DNA, 384 bp, Zea Mays
tgccatggttttgaaacgacgacaataatcggagacaggtagatcaccttggacgaagtgccggaactgagcgtcgaggtggagggcgcaggtttcccgattcccgagaaactggttctcgagagtcagccaagtggtgtgggcagtggcgccgcgttccatggccatttcagcaaggtccggggagatggagccggagatctaggacttgacaacgcagtccatgcgtgcccagtcagggaagtgaggcgcgggagtgtcgtcgaggatgtggctgtccagggagtatttgacagtgacgagaaggaactcatcacgccagcgggtgtagttgttgttggcgaggtcgaggacgacgtgaacgagactccggatgttttgcac

SEQ ID NO: 200401 - DNA, 942 bp, Zea Mays
gcagtctctattgactacaggaacatttccctcccctgaaaatgtggaacccagacgagtccctgaccgagatcactttaccggtggcagcagaggcgtgctccaagaaagagtgacagtccccacacatgcggatgttcttcacgacgcggattgtctgcccagggcctgccatcagaagaccgtacattgatgctagcttcatgctgtggtacatcaggaagtgcctcttctggtactcctcgacgtcgtgcagaacaaaggtggtgtctggctcgtacccggccttgatgcactcgaggattagcacatccaggccagcgtatatgtccctggactgtgggtgtgatttatcccgtgcgaaaaatgagtggaccatgttgccatgaaacgtccagctcctggccgggatcttgcgcatacccttttcatacatctctagccttgtgttctcagaggagcgccaccttgctgattcagatagtaggtttgaagtcagcacgtacgtggacgggtcttgtggttccaatgccagcagatgcttcatggcccgcctccgcacagccatgttggagtgcttgctgcagctgtctagcaaagaccgccaaactaatgcaccaggctgcaatggcataccacctataagctgctctgcctcgtcaaaacggccccagcagccaaggacataaacaaaggctgcatagtgctccatggctggttcaatgccatatgtgcttggcatagaaagaaagagttttctgcatttgtctgtggagtctgagcttgtgtgactgcaagcagatatgaccagaagaaaggtaatggaatcaggcctgaccattgatctctccatctcagaccatatcttcaatatatcatccccctgatgaagaagaagatgggcagtgatcattgcattccatgacaccaagtctcgacaac

SEQ ID NO: 200402 - DNA, 410 bp, Zea Mays
gggcgggcctccctcctctctcagcctaggttttgagagcgaggtgcctgtctgaataggctgcgcgcgagcgcatgaacgcccgacgctggtgatggtgggctttggcggactggcccagtgggtgcgttacaaatggtatcggagcccacattgccgctgctgcctgggagagctttgggcctcttaggggggtgggatgtaaggggccggtatgcatgccctgggttagtaccacctcgcctagccaagggggccgtgttgcacttataagggcgggcctccctcctctctcagcctaggttttgagagcgaggtgcctgtctgaataggctgcgcgcgagcgcatgaacgcccgacgctggtgatggtgggctttggcggactggcccagtgggtgcgttacaaat

SEQ ID NO: 200403 - DNA, 279 bp, Zea Mays
gtgctcagctcgggaaggttatcaccgcgaacgtgaaaagatcagaggggaagtggatcgagccggccttaccgtacccactagcaccggcaacgtggtcgtgtgaccatcgccgtggttaccaccattcacttcggtcgcaccacgccataggccattttaccacgtcgtcgtgagtcatggagagtaaccagtgatggccgtaaacctttgcccagtgaatgccacgataagcgaactccgatggctcacctttgctccggccaccagcttatcttc

SEQ ID NO: 200404 - DNA, 393 bp, Zea Mays
cacagagatagcgagggacatttgaataggccagtacgtattgttgtgaagccatgttttctggtcttggcgtgattgcgtatgtatgaaatagttacgtcgtgtgaagtctaggttgagatggagattgtgtgagttattggatggatatatatgcatagtataattaaaaaaagagagttcttcgatgggatgatataatgtatagaatgtgcttgaatggatatatgggcagacatagtatggttaaatcgattcttgcttgcatgatgtgagatcaggcttaaaatgatttaaaaagttagcatattgcttctatccttatgttggatctaagtgtctcgtaatgaagatcctaaagttattagtcctttgatgaacgcttaatcttag

SEQ ID NO: 200405 - DNA, 279 bp, Zea Mays
ggtgtacccaaactgctactgatcccaatgtaggtgctccacctgttgctgatcccaatgggggtgctgtttgtgttgtcggtgtggatgacgagggggaagagaatgaggttcctttgactcgaaagaacagttggcagttcatcgccagtggtgagagtagtggagttccttctcctgctttgtctgccctcattggtctacaagaactgtctctggccaactttgatcaaacccttgaggatatggtctcagaggacttgttatcggagccagtgg

SEQ ID NO: 200406 - DNA, 487 bp, Zea Mays
ggcccttctgtcaactattaatcaaatgtctggatggagtgttagatacatggcatcagggcgtaattgtggtttgcaacatcagagtaggaataagcatgtggaaatcgttgattcatttcggagtggaaaggtctgctgcttatgttgccctgctgttgttgtgtccgataaatatttgtactgatgataaaatgatacattgtaggtgcatctgattattgccacacaaattttggaggagggactagatgtgccaagttgtaacttgataatccgttttgatcaggcagcaactgtacgcagctttatacagtcacgtggtcgagctaggatgcaacattctgactatgttttactagttagaaggcatgttttccagttttgtaggtgttgtttcctcagcaaatttttatttatcctttcatcttcattttttggtccaaagtaaactttgtggaattgctcctttggttgctcaccctgg

SEQ ID NO: 200407 - DNA, 286 bp, Zea Mays
ttcccaagctttcaatgataccagatatgtaacaactttgcataattcggggctggattagaccttgtttgtgagtcattatgtgagaggattgaagcctaagatccagtcccaagttatggcacagatgcccaaaacggtggacaaggctatgaggttagcgaagttatatcaggagattgctgagaagaataggatgagaaatcagaaggcagttctgggaagcaagactcaggctatgggtagtagaggtgatggtagaggtggagcactgaaccctgaactg

SEQ ID NO: 200408 - DNA, 469 bp, Zea Mays
atactgggagtaaagagcgtatatgggagagcgacagggaaaagtactatgaaactgttgttgcactgatgtcagacaaaactgacggggaactgctccttgatcagttaaagatacttacgtcgaaagaatcaaaaacagaaaacacacaatattacttgcagacttggccagaaaagaatcaagttaagataacaaatttcccccacccatatcctcagcttgcttcattgtataaggaaatgataagataccagcgaaaggatggagttcaacttacagcaaacttatacctgcccccagggtatgattcatcaaaagatggacctttgccatgtctagtttggtcctaccctggtgaatttaaaagcaaagatgctgctggtcaagttcgtggttcccctaatgaatttccagggattggtgctacatctcctcttctttggttagctagagggtattttctctt

SEQ ID NO: 200409 - DNA, 431 bp, Zea Mays
aagcgatcccaaccgttcaccagggatggacagcgcacacatcgtcttcctccactggttccgtcgctattttctccccagccaaccctccgcgaccgagcgccatagccgcgtcagcatgctggtcagtgctcgccatccgagcctgaaatacagtccgaacgccactactcaaatcctacacggccacgatcaataggtaggaacactcacccatggtaaagttgtacaccaagcagacctcgacttctgctcatcgagggaccccacgtctagaccccaatctggactggcacacccacttctcctcccaccgatgacaccacaagcttcaaggcccgccgccgatcccgcatgccactgctgagcccccagcgcagtcgttttacgaacggtcgacgacgcagatcggagttcacgcgccacagggc

SEQ ID NO: 200410 - DNA, 596 bp, Zea Mays
gtctgatcctatcgtggcttcacctggtttcaaggcaggaggatctgatagcgcaagcacacaaagaagtatttcatatgcttcttttagcgctcaattagttgcctcacgactgactgccactcgtacccggacccctctaaaagtgacttcatctggttggaagcctcttactcaacctgttgctctgaacgaagagaggaaatgtgcaaaccttacaatcaaccctactgctaagcgttccagagttacttcctccagagctgtcaaagattcaatcaacaattcagcttcaaaagccaactcaagtgttcccagtggtgtttacttgatgcttttatcaacataattttagtagccatgcactgaatcttaacccttaattattttatcttattgcagacaaaaagtacagaaatgaagataatgtgagcctgggcgatcagtcagatggggccgtcatgccatctcccacaaagaagctgcaaatatgcaaaggcccttcagatgcaccttcaattaggaaatcaactatcagaatcctgggtgttaagggagctgctctaccacccacagggaaatctcaagttgaaact

SEQ ID NO: 200411 - DNA, 342 bp, Zea Mays
ggcccacaatcctctgggataggccatgtcatctcccatgttgttaatgagctacatgtacctcttctatcatttgcggctacagatccaactctttctgcatcagagtatccgtacttcatcaggacaaccataagtgactacttccaaatgaatgctattgctagcattgttgattattatcaatggaaaagggtgactgctatattcgttgatgatgattatgggcgaggtggtgtagaagccctcggtgatgcgcttgcattaaagagggcaaagatttcatataaagcagctattcctccaaattcaaatacagacgtgatcaacgatgtactattt

SEQ ID NO: 200412 - DNA, 537 bp, Zea Mays
aagggatctcagtggatatggggatcgaccagaggtggagctgattctgtcagctggcgcaaggtgcgccaggatgaccaaggaagctccaccggccaggtaaaactttctttgatgagccctaatacaaactacagcagctccttttatagacttaggtgccactttaatctcaaccacctctaacaactaggagctaatctctccactaaaataggagggctaactgactccctctttatctcttcttatcttctaaacaaacagagctaatctctccactaaaataggagggctaaccgactccctctttatctcttcttatcttctaaacaaacagcccagctagaacttatcctttgtggcgcctggcatactgccggcccacaaaggtgtctacaacatttcccccctcgtcgacgaagagctcgtcctcgagcgtcatggctggatatctaagcttgaagtcttccaggtgctcccaagaagtatccgtctctgctcggcctgtccacttgaccagaacttcccacaccc

SEQ ID NO: 200413 - DNA, 383 bp, Zea Mays
aggcttcgaattgttacctaagggacatgaatttgccatgtgtcccctttcccgacatgtgtagcaagtctctttgtttgagccttctctttctttctcaaattttgcttcacatagtcttgcctcttctcatttgcttgagccttcttctcaagattgtcgggacaccttgaggcaaagtgacccatatcatcacacatgtagcacttgatttgagccaaaccatccttcttcttttgatttgtgctcatcatgttatcttgattatatattgaatgtcttcttcttgttttctttttcttccccacatcaccattatattcatggttaatcttgatttgcttttggggatccttcctttgctcaactcgtggctttggttg

SEQ ID NO: 200414 - DNA, 630 bp, Zea Mays
aaacaatcaaatgaggaccaacaagtcaacttacaaattttattcaagtcatttagtgcactaaaactattacaaccaatcaacggcacattctccccgataatcacccaaccatttgtggtttcaattagaccccacatgagcactactactttttacccgtgcccataaccatacacatttagaccacaacaagccattcgctgtgattacgagcttaaccaagttatctaaccattcgattaactagagcaacgacatcgccgctaaataacatacacgtcaacttgccttttattgccgcaatccgagacacaacatatactacaacatttttataaacccacagattcacaagtatattcgcacaccgaccaaatcagatgaatcgtaaactactagtctccaactcacaatcaccatgcatttacttcccaatcatgaacacatacatgtttatcatacgaacagagcatttcaataattatcctaaaacaattaactccattacacaactcataccaccaacctacttgacttgcttgaagtgtctactcgaatccgtgagcacaatcacacattatatgcgaagcataatttaacgaacacaaaatacgcatcgactcgatt

SEQ ID NO: 200415 - DNA, 885 bp, Zea Mays
caagcttctcttcttgatctgaatgtagagccagaagatccacagaatgggtaatcaacattatgtatatttccctaaatgttgcagtttccttctggctggttcagtagtattttcacatcaaaagtggaaataattagttcttggaatcttattagccaatgatcagaatgacattacaattggccaacagcccatgctatcgatgcatcagcaattccatgttaatgcctgctcaaagagtcttggtcactctgcattaagatagtttctcttctaaagaatgaagactgaaggtccaaagtataacctataaatattttacttgtccactgagatatgaaattgccctcaaaactatggatgaatacttttttctttttgctttttggtagtcaaatgaagttgccgcttaaccggctctctgtagtccaaccttgtggttagtgtgtgtgtgtgtgcgcgcgcccgcgccttagcctttggttgggcgaatgtaccttttttcccttcatccttttaatgaaatgatatgctcctgcgtattcgagaaacaaaggtagtcaaatgaagttgcagctttgttttatttatagcagatttaactggtctgtacctcactaatcaatttacaggcactcgctttcctcacgcttgttctaacactatacgctcctatctccctgtcagagtccacttaattattcatcagaaacttcaagccagccaaatatgaattcaaatagatgtattggcaaaataactggtagtatttttttaatcttcaaatctttaactccacataacatgatgttttctaatttctattgcagttgtcagcctgcctgttacctatggactgacaagtaccgacctgaaactgtg

SEQ ID NO: 200416 - DNA, 499 bp, Zea Mays
caggaactcatgggactaggtatgattggtcccaagactttgcctatctcatctgaattgaaattggaactcgttccaaatgatgtgaagctagaagggagcaagaattacttgagttggtctaggagagtccgagtgctcttaggaggtaaaggagtggagcactatctggaagagggttgtgttgaacctgttgataggctcagccctgaatggagagtttggtataccaccaactcagttattgtggcatggttgttagcatccatgtcttcgtctgtaagtaagatggttgaagccatgcgcactgctacacaaatttggaagaccttgagcaatatgtattcaagaaaagggaatgtgatgatgatgatggagatccaaagtaaggcagatgcggtgaaacagactgggagaccagtggaacaatatgctagtgaacttcagtacttgtggggagaactagatcactacgctcctctgcaaatgatttgtcctc

SEQ ID NO: 200417 - DNA, 427 bp, Zea Mays
ttgatactcaacttgatgggatgcattctcaatttgatggtatccgctctcatattcagaatactatgcatggtcccataatgagcaaaataaacaatatgcaacagagctttcaagacaatatgggtgatctgtctagttagtttgagactctgtccaccagtgacatcatccattcgcttgatgagaggtagcagcaacttcagaatgatttcagccaattcacttccatctttgacagcttcaactctcaatactataacatgtatccacgtcctccactaggtgcgcagtgaagcccctcctgtctgccaattgatgccaaagggggagagagatgtggatggagatgtttcatacaatcagggggagcttgcacatgtggacatttagacatttgcatatgcatgtttattatgtctatgtt

SEQ ID NO: 200418 - DNA, 509 bp, Zea Mays
tgtatctttgctatgtgagattgaatattgtaaataatcataaacctttgtattttcatagtcttttttttgtccgagaccttagcagaatctagtaatcgccttaagcattctgaagttgaaacaaatttatagctagcatttgcttgttctcattgatggccacaggtaaaaatccttttgccctgtccatcctgaagcaagtggagcataagttacatggacagaatatagatggcaccaggtcggtaattaagaggaaaggattttagcagtcaattttacttatgtacatttctggttttattgatctcatgttattctgtcaaggtccttgaatatttctgagcaagttgactatcttcttaaacaagcaacaagcattgacaacttatgcaatatgtacgagggatggacaccttggatatgattcaaagatgtgactttccttcattgtgcatggacaaatagtccaggtaataacttgatattatgcgcaagcttacaat

SEQ ID NO: 200419 - DNA, 367 bp, Zea Mays
gtggtgcatagcaccacacttcctacaccaaatccaacatcaggtaaagcactgctctgctacactggtagttgtgtgtgttcagtatataatggtagttgtatgtacatgtatataatggtagaaacatctattgaattgttgttaggatctaagcgagcaaggtcagaaaatatgtgccaaaaccttagtggtttgtgtctacatcaaaatgatggcagtggtagtggttctggtgcagcagcaacaaatgatggctgtggtagtggttgtggtgcagctgatgtaggtagggatactttgccaagtggaggtggcagcggtagtgttgctgctgcagcggatggaggcggcaatagtgaacaag

SEQ ID NO: 200420 - DNA, 370 bp, Zea Mays
ggttggataagggaactcttggagatgctcccagtctcaggctcttgttctatctactagcaattgtactcactggcagcactactgcagtgtcgagactattacactaggtgataagaggatcggcatccgaactagtctactagaggagaaagctacagcatgtaacatgctgtgttgctacgctgatgagctcaaggaaggatttttcccatggattgatcaggtcatatcactatttcaaccccttctcctttcttgttgggttctagtttcatgaaagagctacagctatacctggatctgtacaggtcacgactacgcttgtacctctcattaagttctattttcatgaggaagttaggaaggc

SEQ ID NO: 200421 - DNA, 320 bp, Zea Mays
ccattggttgatcactgccgtgcgccgcgtgtgtaggctctgtaccatgtcgcaattagttatgttaagggatccagtgatcgccggaggaagcgccacggtgaaagtcacccatcccgagcaccagtatccctgtttccctccggccgccagcacaacctcgaaaaattggacaccaccgacgatgggaactataaattgccacctccgcccgctccgctaggtaactgcgcagccggtgaagcaatctgcaccttgaatcctcccctagaattcaccaatttcggatttccccaaatccgctcaagaacaccgtaaca

SEQ ID NO: 200422 - DNA, 371 bp, Zea Mays
ccttccttccttgtgctattggcgtgtgatcctagctagcgctctcttgatttcatccttatccacgtgaatcctggatcacactgcatgcagatcggattactggaaggccaaaccagctgctcgcattcactggtgcacggtgtgggagctgagagctccgttcctatggtcgggccccacctctcttgggcccttgtgcagatacgcagaggtagtgtcccctaatttatttgtcatatcccctaatttgtttgtcagagctacttgaggatgtcaatgaggtatggctccactggttcatcagtattcagtaattacaaggcattatgagttaccatgctccctcctgctaagctagctaaatgtgg

SEQ ID NO: 200423 - DNA, 310 bp, Zea Mays
ctcgtttcgtgtttgcaatactgacaagacttgcaccattgcttgcttggactaggaagaaggagagggagggagggagtgactgcccaccgattaagctacatacatgcatggcgagactaatagattacacatacagtcgcactcatcacactcccctctaaggctctaacatacaatactcagacaagtccacaaattaataaaatagctaaagaaacgactgaaagggttgttgacataagaccccatgcattcacgcattcagacaagttattagttactcctcgctgcctagctagctagtagg

SEQ ID NO: 200424 - DNA, 353 bp, Zea Mays
tctcgaggaccaaatgggccgcaatgtcttcacatatgtctacgatattgttgttgcgagtaaaaacaaagaagatcacctatcaaacctcgcagaaacattagccaagatgcatgaagcccgactccggctgaacccagaaaaatgcatctttggtgtatggcaaggaacaatcctcgattacctcatatcacacagaggaattgaagccaatccgaacaaaattcaagctatcatggacatggcaccaccataatccactaaggacatccaacggttgacatgcagactggctgcactgaacaaattatttcgaggtccaccgagcgaagccttccatttctcaaaacatt

SEQ ID NO: 200425 - DNA, 692 bp, Zea Mays
gccaagacttcttcaagttgttccgaaaagaaaaatcaatacaaggacagtgcaagaagctataactggaagagcatggatgtcggatattcaaggggccctatctgtgggggcaattgttgattatcttcacctctggaacttactgttaactgctgaattaaggccgaatgttgaagataagcacatttttaggctggctgtcaatggaaaatattcagcaaaatctgcctacgaggggtttttcattggctcgattccttttgaaccgtatgagaggatatggaaaacctgggcgcctcctaaatgtcggttttttctgtggttagttgctcaaaaaaggtgttggacagctgatcgtcttgcaaaaagaggattggatcaccctgatagctgccctctttgtgaacaagaaagtgaaacaatagaccatcttctggtctcttgtgttttctcaagggagtgctggttccttttgttgagacaatttggactgcatactctgtcccctcaaccagaaaatgatagtttcctggactggtggaagacaataagtgaaatggcagctggacaaatgaagatggggattaactcccttgttttgcttggtgcatggaccttatggaagcaccgtaatcagtgtgtcttcgagggcggcaatccgagtgttgctgctgttctggagcaggttg

SEQ ID NO: 200426 - DNA, 749 bp, Zea Mays
gatttatttgcaatgctgggcattttggtccatatgaagcaacaactgcccatagtgacaatgatgtgcttgggtctggggtatcaagttcatttgatgagctatcggtcagcacatatgcatgtgaaaacatacctattattcatgaatctaatacagatcataccatgactgaaaaaagcaaagataagtcgatcacatcaaataattcgtcatcatgttcgcctccatcttctgagataggcagtactcctgctgtacgaaggaaaaaggtcaaagacgtctcggagtatatgattagtgctgcaaaagagaaccctcagatagcagaaaggatccatgctgtgttacttgaaagtggtgttgtgccaccacctgacttgttttcagaagaatctaaggaacaaccaaaggacctgattgtttacgacacatctctgtttcaaacaacagatgaaatgataaggacaatgaatgagcttgaatccacagcacacgatggttgtgctggtcttggtccttcattgccacctgatcctggacatgagctccaaacaaagattgttccttatcggatgcctcctgacctcaagcctgtccagggattaggtgtttaccataagtttgatttccgggataacatcaatccctctatacctctctatgaaccaagtccagctcctcaggaaaatccattacaacttataaagcaaatgcctgttacagctgctgctgttgcaacagctgca

SEQ ID NO: 200427 - DNA, 519 bp, Zea Mays
tggtccttcccacggtggtgacagtttgtgtcgtccctcccccatcagcactcggcggaggaccaagtctcccattgcgaaggatcaatgtcgcactgctttgtcgtggtagcgcctcagggtctgctggtatctagccgactaaattaccacatttagccgttcttcctccagtacattgatgtcctccaacctggttgcttctgcttcgactatgctttcaaatggtaatctgggtgctccaaagatcagatctgctggtagcactgcctctgatccatacatcatgaagaatggggtgtttccgtgtaaagctcagctcggctgggttcgcaggctccagactacatatggcagttccctgatccacttccctgcgagcttctcgcttttgtcgaacacctttttcctgagtgcatcgagtatcatcccattggatctttccaccttcccattagctcttgggtgtgccacagatgcatacttgatctggatgctcctctactcgcagaagtcaaa

SEQ ID NO: 200428 - DNA, 375 bp, Zea Mays
gttgtgtttagtagtcccgccgatgtagccttcctgacgtcgtctccgagattgtgcgtagttgttcgccaggcatggtgtaccgtcttatacgttcggtatacgggtccctatagcgagtccgacgctaaggtccccatagtgacgcccgactggccccacagggcagagtcagggcatgtctcgaggtcgtgcttggcgtggccctgccttctgtcagaaaccctgcgtcaccctcctagcatgcgtacactcgatatggtgtattgctccgtcctgcccgacatgtgggttactgtggcgacttcgatacttaggttctccacgactggggttgatcggtcccacaaggcagagactgtatgcggtggcata

SEQ ID NO: 200429 - DNA, 408 bp, Zea Mays
gattgacctagttctgtagaattaggagttctattgccttttttcatgcagctaatccatttctatatccctttgaaagatgcaatgtcaagaagagtgtaagcttgcaagtaatgatacacacattaacaattttgcattaggaagctgtagccttctcagaacatgggcatctaccaaagctattaattcttcccatgaaactatttgataagtaattgtgcggtcatggtgattggataaagacatttcatcaatacaatcatgctgaaactcattcttgttcagagatccgcgttctgaataggatagctgtttcagttgctaggcacattctgcctaagacaccgattctggtctttgtaagtttccccgtactcggttgcactcccctttcctcaaaaagaa

SEQ ID NO: 200430 - DNA, 292 bp, Zea Mays
ggccgccgcggtagacctgcatactccgatccgctttgcttcaaccgctggcctggacgtgtcgccggagtgcctttgagttgcccgcagctcaatcgggggaaagggagggacctggtggccgggaattgataaacggagcagtagtcgccgccgtggtccacacttcactgtgggcggggcttggtgtgccgcgatccgaggtatgaagccccccatgcttttcgtctttctcctctcaacgtattgcatgcgctagtggtgggtttgaataccggggcactgggttggg

SEQ ID NO: 200431 - DNA, 1863 bp, Zea Mays
caaaagtattgcttcaaacagtaatgctgcaagtgcctccgctgacaaacaaaagcccaagattgttgaccgtggttctatgcaatggacagaaaaatatcggccaaaagttccaaatgacatagttggcaatcaatcaatggtgagtagttctgcttttggttatgttagttaattcatatatgtagcgatactttattacaaacttcatatataggtcaaacaacttcatgattggttaaaaagttgggatgcactattccttcattctggccaaaagggtaagggaaagaaacaaactgacagtgcagccaaaaaggctgtgttgctgagtggacctcctggtatcggtaagactacaactgctaaagttgttagtcagatgcttggtttgcaggccattgaggtattagtctttccactatttattccccatttttacttggcaggcctgaattcaaacaatattttttttgtgataggtaaatgcgagtgatagccgtggtaaggcagactccaagatcgagaagggtgttggggggagtacatcaaattctatcaaagagcttatcaacaacgcgactctgaattatagtgacaatcggttggtgttgcagcatgaatcatgaacttttttgactttgtattttgattattatatattaagtgggcaacaattccataggttaaaacatcccaaagctgtactagttatggatgaagttgatggtatgtctgctggagatagaggtggtgttgctgatcttattgctagcatcaagatatccaagatccctattatctgcatttgtaatgaccgttatagtcagaaattgaagaatcttgtgaattactgccttatgctcaacttcagaaagccaacaaaacaacaggttatttttttttgccatgttcagtcctagtgaagcaatgagcttcagaattactaatgtttccttgaattacaagaacccagcaccacattctttacttttgttgtatctaggcatgcacaatttagttagcctggtgcaattcatgtcatgtatgaaatgaatctgtatttggtttgtttctgattctaaaatttgctgtttgtaaactatggttttattgtggactctgaacttctgaacattgctgtttgtgtacacttgcacctaattgataaaaaaccctggccattggttgtcacaagctaccaactacaatgctctttctgttgcaattcttctcatcttacatgatgtatacagttgcatgtgttaaaaagagagaactattaattttctacctggacgtggatgactggatgttcattttcttttcttggttctaacttctttacttgacagatgggtaaaagattgatggaaattgccaaaaaggaaggtattcaagctcaagaggtatgccctattgccctgtatatttcccagactccagtgcttctaaccttgcatgaaatttttgagatttaaattaacagaaacagatcagttaacaaaattaaattagtgtttgttgtctcttatatttctgtgtaggcttctagtatgcttatctctttctgactctgttatgtagacttcaatgttctgctactaatttttttctattatgctagaatgcaatggaagagcttgctgaaagagtgcacggagatattcgcatggcactcaaccatttgcagtatatgagcctctcccagtctgtggtcaaatatgatgatataaaggagcgacttaatagcagttcaaaggatgaagatatttctccttttactgctgttgacaagtattgccatttccttagtatttcttcaacgtcaaataccatcgtggaattatttctatcttttcc

SEQ ID NO: 200432 - DNA, 339 bp, Zea Mays
cccttcatgacgaggagccaactggtgacgaggcacaccctgaggtccagtcgctttccgaagagtggtctttgtgcgtgccatgtctctataaaaggggagaatacttagtattgtttgaacatgatgcatgcatgatcctacaatcatggaatcaactacttattgatcccatacttcttacatataacctagtaatatgcactcttttgcccgacttcttaaaaggtaagttgctataagaagggatcaaggtaaggatgaaagaatattgagaggtaagtagtttaaaaccttttgaagcactaagtaatgtccgaagaaatgggcatcgctctg

SEQ ID NO: 200433 - DNA, 361 bp, Zea Mays
ccgcttcccagacacttgccagggtgttgcccgaaaagcccttaaacagatatgccaaaactacagccgggaaatctctgaaaccccccttcgatattttccacccagcaacaaaaatacccccacctggaggaaaagactccaggctctgtcaggaggaaaccccacagaagatgaccccaccattgtctacatggccggatacctccacaccctagacaaccactacgatgagatctcctcccactgcatccacctaaactcccgagtggaaagcctagagcagcaggtcaaagagcttaagcaagagaaggcatctctccaggagagtctcgacatagcagaaggcgaggaagccaac

SEQ ID NO: 200434 - DNA, 612 bp, Zea Mays
gggggggatgctgaggtcgatgcagttagggtcgatgtagatgaaaggcgataatgcaattgaggctgacagggaatcagggatggaacaggagggttgatgttgacatcgatgcagtcaaatcgcttgaatcgaggcatgggttgggtttgccagacccagcaatgtgttcggaacgaaaacgtgtgccaatgtagccaataccagatgaacgaggtagagggcctcaatcatatatcagcatccgagggaccaacagagaaggtctcaatgacgattgcggtgtgcagaataacaggtagaaggtgctgatgtagcatgcaactgtcgaagtagatgatgttggtatggacgaggcgacgacactaacaacgtggttgtgctggatatagtgtgggagcggacgaccggacgcgtcaaacccgaaggtgagcaatttgtgtgggcatggtcgagtagtccggacgtagggcatggtcgtagtggtgtagcggtggcctcgcggagggcggcgacgttctcatgctcacaggtagcgctctgagttgacaacaaagactcgatgagtaggacgaagaccttgtgcagatagatggtgcaacaaagattgca

SEQ ID NO: 200435 - DNA, 489 bp, Zea Mays
cggaccacacccctctgctcttgcaaggagagataatgcgcaaaacaaacagttccttccgcttcgagaacttctggacacgcattgacggattcaaagaagcggtatattcggcctggaataagccgttaccctctgtccagcaaccactcttgcgcctgcacatcaaactggctcgaacggccaaggccatcaaagcttggaggagagtgaaagtaggagacacgaaacttcagctggccatagtcaaggaagtgattcttcgcttagaaactgctcaggaagcgcgcactctatctcttgtcgaactgaacctcctcagaagattgaaagttaaatccttggggctagcactcgttgagaaatcacgaatcagacaaaggtcccgcttgaccgccgtccgccttggggacgccaactcaagatttttccatctcagggcttgctctagggcaaggaagaacttcatccaagccttgcaaactgaga

SEQ ID NO: 200436 - DNA, 511 bp, Zea Mays
ctgcaaacatctagccgttgtctttaatttcttggccaaggtgataagtgggcaaggccctgcaggaacagacgcccaggcctgagttaccacatcctgaaaaccctccatcttagtccagaaagcttggaagtgaaacctcccttttcctctgctgaaatcatgaagcccaagcagcaaagggcaatggtcggagtcatccgtggctgagctctggagaagagaatctgggaattgttcctcccaatctgttgtgcagaaaaccctatccaatttgaccagggtaggattagagtgcccatttgaccatgtatacttccggccaatcaacggaatttcattaagagccaaatcatttgcccatctcctgaatctacccatcatggcacggtctaaattattattattcttttcttcctcccttaaaatcagattgaagtccccgagcacaagccatggcccattacagagagctctaacttctctaagagattgcaaaaactgaatcttg

SEQ ID NO: 200437 - DNA, 272 bp, Zea Mays
cgattccgtgtccgcatgaagggcggatatggctggagcagagaggcctgcagcgcgcgttgtactggcacattgaggcgcgcgtcgtgttggatctccaggaaatccctgactccgtatgtgctgtcgcagattgaacttccattaactgctagggtgtgaatattcatgtcgaccagtccatgagggtgtgaatgcaacatttgcgttttgtcagcgtgtgttcttcttcttgctgtgtagctgctgtgctattgtgtctctccgacgta

SEQ ID NO: 200438 - DNA, 335 bp, Zea Mays
tgtcgtactgcttgtacgagaccaataagctctctttcatatgctgctaatttgtggtgtcttgctgcaaaaggacgactgaagaatgccatggctcctgttccttgatgaaggactgccccaaagcctgtgccagatgcatcacaatcaaccatgaagtctttggtgaatgatggtagctggagtacaggtgcttctgttaatgctgttttgagggctgcaaaggcagactcggctgcttcagtccatttgaagccttctttgcgcaaaagctgtgtaaggggtgctgctatgactccgaagttatgtataaatttcctgtagtaccctgcgag

SEQ ID NO: 200439 - DNA, 358 bp, Zea Mays
ctttgcgatgaaaccatagctccacccaattcttgcggcttcagagaaccagcgctccctgccgtcgctgtccctcgttctcccagcgcctctcattcagtcatccctcctctccgaactgaccgatgcggttggtgccaaggttccggccctctaatgctgcttgaactccagccttctaatgggcgcggctcagttggtgattctgttcttggcccttgccactgcggtgggggcgccgccgagcgaggtggccgtgggcgctctcttcacgtacgactccacgattggccgcgcagcgaagctcgccatcgagctcgccgtcgatgacgtcaactcggacggcaaggtcctcccg

SEQ ID NO: 200440 - DNA, 276 bp, Zea Mays
ggggaggttacccggtttacatccaaagagttctgtataaagttctaaattctcctgggcagccccaaaacaaaacacttcactcttatggaagttgatctttaggcctgaagcttgttcaaatgcaaatagaagaagcttcatattgcacgctttgtccggatcatgatccataaagagtatagtatcatctgcgtactggagaattgagagcccgccatcaacaaggtgagggatcattcccacaacctgctcatccgttttggccctactaat

SEQ ID NO: 200441 - DNA, 436 bp, Zea Mays
gtaatgctggttttcagctacccaacttaatttgcacaaaagtacttgaagaagaggaagaaaactcttctgaaggcaggagcttgagctttgaagctgttacacctgaacaggatgccccatataatgatgacaatgaagaatctcaaatgcctgttgagaagcatcaccatattctggaagaggttgatggtgagcttgagatggaggatgtagctccaccatctgatattggggcaaccaccaagtgccaaccagagcaaagtgacaccaatcgtgcaccatctgaccaacgcccttcagatgctggccctccacttcctgtggaccggcctccatctcctccgccattgccatcatctcctccacctgtccccgttcctcagagtgcacagatgcagcctaaattacaaatggcatctgatcccatggcgcc

SEQ ID NO: 200442 - DNA, 401 bp, Zea Mays
gggatatgaagtcgacggagggggagcgacaggatggctggtttccaaatccggcgagaaatcgtcgatccatcaaggccacacgcgaactaggaagcctgccaacacgagctccgcacaagggcggatctccaagacccgtcagcgaaggcgtcacgagttcaacggaggcagcggggagcaacagcagcgacccacactgtctctcctatctaactctcgtttgcgctcggcattgattcacctgtatgcggctatgcgtatgcactcgtcggaaagggagggggtgcacaggaggctcgccatggggaatagggaggtctggcagagcagtcctggcaggggccctccgccgtgggatgaacggcgcccgcgcagatgtgggagatattgctggggag

SEQ ID NO: 200443 - DNA, 1248 bp, Zea Mays
atcgctgtgacattgcagaaaaatttggaagacaggttgtctactttgttaccttatccactagtgctatatatagggatgttgtaaataaaatcagtattgcatccatctgtcataattttccactaaattatgtgctgcagcctttgtattcagttttcatgtcttgttattctctaggcatttgagtaaagtttatctagggtattcaatgggaattttctgattgtcaaacattatagtgttgattttttttttccatttgtgcagaatgtctgcaaaatctcgtgaaggagctttacttggatttgagtgcctgtgtgagaagcttggcaaactatttgagccgtaagtgaggcatctcttcacttaactgttgctctgattccaattgattcgttatattttctttcttgtaggtatgtcattcaaatgcttccgttcctacttgtgtgtttctctgatcaagtcctagcagtgcgcgaagctgctgagtgtgctgctcgggcaatgatgtctcagctcactggtcctggtgtgaagcttgttcttccgtcacttcttaaggtatcaatatatcttatttgatgctatcaaatcataacatttattgtgtccaaatgttctggagaatacaagtgtccagttcatctagttatatattgaaatctgacaaccacttaacttctgctgaatatttaggccattggcaccacaaactactagtttgttttcattaacttgaaagagcagaacatcttgaggtccatctattacatttttttttaaaaaaatctacacattctggaaatttgttggcttattttcatttgtgctgttcgtacctttatgttagttgtttaaatgaagataaaataggtattcagatactttacaaaattttaagctagtcacattcactttcaaaaagtgtcatacggtgaatttacttagcttgtctaatacaagtttccttgaagcgcatatttggatgaagatcattaatgttggatagattagaataatgggccaaccctagagagggttggctatatagagttcatacacgggcctcatgggcctagccacatgggcctaatccatatactctaacaattaacatggtttttccagggtctagaagataaagcatggcgtactaagcaaagcagcgttcaacttcttggtgccatggcatattgtgctcctcagcagctatctcagtgtcttccaaagattgttccaaag

SEQ ID NO: 200444 - DNA, 314 bp, Zea Mays
agcgtttcttgcacagctggagcctgccaccgtcgacccgaggttccaccgcacccccgctgttccccaagcatcccgtagttcgcactcgaggtgagcaaccttcccgtgcacttaacttggccgttactgcccttttgcccgcgcaattcctcgctggagttgatctgcaccgccgttagcctgcctctccgtgtctcgcgctctttggtgcccccgtgccggttttgtgccaatggtcgagttcgccagatcgccctgagcgagctcgagctattccccaagcccctggagccccgctgtggccagtcccc

SEQ ID NO: 200445 - DNA, 352 bp, Zea Mays
cagaaacctagttcagatcagcttgactctaggcatacctttcctcagcatcggagcaccgttgagtcagagctggtgaagcaacaggaaaaaatacaagatgcaaaacaagagaagcaataaatagcaaaaggaagctacagacccactaactaaatttggaggactttagatcatctatttgcctctgaagcaggagaggattccactgcatcaaaggcaaaacttgatcgggcacaggagcgccacaagatttcaattggaccgacacagagttgcgaacattctgcaagctcaaaagttagcaagagaacccgtctgtcaacataattaacgcaaggcaaagatcagc

SEQ ID NO: 200446 - DNA, 473 bp, Zea Mays
tttaactgttcactctgacgcaaaaccggttgaaccggttttggtccgctgaccagccgacgccgcctcctttttcttctctccttcctcctttcacttcttacccattcatttcttccagccgtcgttgcctacacttttcctctctctccctctcactttcaccacaaaccaaagcccatttgtgccatcaaatccttgggagtttgttggagattcgttcctcttggcttcctccatcaactccctcactttcgttgggatttctgtggttcaatcttcagatcgaggtattaccttatttcctcatgtttttactcgatctcacttgttcttgattatctagtgtatcgtttcaaggatacattttagtttaggtgcttgcaacacttaaattatcctcttttgtctcgaacattgtttgagtttagttgtttggtattgttcgttgtagttgaaccgctcgcatgaac

SEQ ID NO: 200447 - DNA, 303 bp, Zea Mays
gcgggtctccgtgcgggcttctcgggatccctggcagctctctctactccccttcggactctcttcagtgtataaaataccaccgtgttgccgccgccatgacacatctcaatcgctcgccgctcgtcttttctcctccgcggcgcgcaattgctatccccctgggcctcggcggggagttcgcatggggaatctccgggactccgctgctcgaggtcgacctggtgatgggcgaatcgcttttcggtgtttcctccatccgcagatccgggtgcgtcgtggatggagcacatcaactctcgt

SEQ ID NO: 200448 - DNA, 956 bp, Zea Mays
tgcctcttcaaccgtcgttgaactatactgcaccagaattggttcgaagtggagattctaaagttggctctgcttgtgacatgtttagctttggatgtctagcttaccatctggttgctcgtagaccacttctggactgccataacaatgttaaaatggtatgttttaaacatctgattgatggcatttacccaatatagatttgtccttttagcatcaatcaatggcctcaactgtaattttactttctcgcttcagttttgcatgtagatcatcttgtttgggttgtatccacatcctacagcacctgttctgatgttttcccctatttttgcagtacatgaatgccttgacatatttaacaagtgaagccttttctaatattccttctgatttggtatcggatttgcaaaggatgatatcgatggatgcagtatcgcgtcctagtgctgtggcctttacaggtgtgtaacaccttcctttccctcatttaagggaaaatcaaaggagattttttcactcactgggggtaaatcatgaccaccactgattatttcatgaaatgatttttaaaatgctaaatttttgtgcaggttcttctttcttccgggatgatacgaggttgcgcgctcttcgtttccttgaccatttgcttgtatgtttttgttattcccctttagtttattttcgttaataagtttaaaggttgctatctggtgtgcttctttgctgtctgaaaatcacctttgactagattgtttgagttatacctgtcaacacagcaggaaagagtcttgcctgcttgactagagaatgaaatggcacaatttggtacctaaaatggtcctgatttttaagataacattcctttcaggagagagataatatgcagaagacagagtttttgaaggcattatcagatatgtggaaggattttgattcccgagttcttcgat

SEQ ID NO: 200449 - DNA, 556 bp, Zea Mays
gtttgggtgggtggtgacggaattgtatcgttcctccttcattcttttttgttttccaattatttactaatacgctcccagacttacttataactgctctctttgcaccgttgtagcactgctcagctacgacactagcgttggggcaggcgtcctaatcatgtactgctctttcagtgcagagtgttttaaggtaggcttgccactatgcgttggtcctcatgtgtgttttgcgttgtcaatcctctgctttgtccatgcaagtttgttgtttcaaataaatcaggattcatggttttgtgtttgcctattttttatttcagctggttctcaggtagcataacattgtggcgatttttcgctacggaaggttatgcgtttgtcatcatgtgtgttttacgtctggtgtgtgtactgctagacgcacgcgcttgagccgttgatttacacaacagaagaacgaagctttgctggttgtcacctatggtgtcgttggactgaaatgtgctggcagcctgccaacccgccaatgcacgcgaatgtgctctatatggac

SEQ ID NO: 200450 - DNA, 305 bp, Zea Mays
gtctaggtcgaagaagcagcgtggtttgctaatatcattcagtgtcattgcagtaatagaggtgaacaacactctgaatggagtcctcggagttgatattattgtgagatggtccatggaatctggcagcgttgtgtcaagggacgaacaaggtagattcaagttgttttcaggtgatttgagggagagccaggttggtaaatgtgagtggcttgtaagtcttggccccgggccttgcattagcttttgggctatccattgtttggatgatgtatttccgccaaggtacccacggattactttat

SEQ ID NO: 200451 - DNA, 430 bp, Zea Mays
aattattcaataggcggaatgaataagctagtagctggttataatctgaagattctttagtagggcttaatctttgttttatgtccagattggggtaaccagtcgtataaggtgaatatccaagggtaagataaaatctgtcaagatgagggatatatatgggtgagatagactacaagatgtaggttaaaagtttgtttgttgttaggtgggaatagatcatattcgttagaaggttatgatataagcccaagtggttgggataagtatgcttgttagaacaagacaagtctctacgaataagacataatcttttgagattagttagatctattaagatgagataaaatctttttaagataagatgaatctattaagataagagagaatcttattaagataagatggatctatgaggctttgatatatt

SEQ ID NO: 200452 - DNA, 330 bp, Zea Mays
tggttggcatcgtaccatctcactggggccgcccagacgtggtactacgccctcgagcaagacgaaggcatgccagcctggggccgtttccgcgagctctgcaccctacgtttcgggccagcagtgcgcggcacgaggctgtcggagctcgcccggttgccgttcatctctacggtgcacgactacgccgagcgtttcaatgcggtgttgtgccatgcacacaacctctcggcatcccagaaggcggagctctttgtgggaggactgcccgaccacatacggatcgacgtcgagctacgcgaaccccagaacctgcaaacagccatgcac

SEQ ID NO: 200453 - DNA, 400 bp, Zea Mays
agatagactcgtacttagcaaaaattaaagaccaagtatttgtattatcagaatgtgtaaacaaagttgggcctacagaagcagatttaagggctctactttcttttggactttgtataactgattgttacagattttctgagttagataacagcagtaagggctcaacatgggacagtcgcaccattaggcttcgtttattgcggcacatagacatgttagagacattcttgggcattaatatgggaaggtatgttcttgctattctttctcaagataagaatgcataaccaggaaatgttaattttttggaagcatttacaactatattacagttgttgagtcacattaatcctacacacatctaattaacataattcgttacatgcatagagcatat

SEQ ID NO: 200454 - DNA, 339 bp, Zea Mays
cccacgtgagagccgcaagttctgctgtggacttcgcgcaggatttggacgccttcggtcttggtgacgcatttaagcatgggttggctggcccccttcttgtaaagctggccctcaatgagtgcgaagtcccggctttggtgcttgaggcgcttggcctcgttgatgtcgcttggatggtaatatccctgcaggaacagggtgattggtgctcgccaatcttcggtcatgatgaggttgactatgcggtggccttcggtgtcgttggttatttgtaggccctctgggctgcggacggctggcgtgccgatgacatggtagaacacgtcggagggcaag

SEQ ID NO: 200455 - DNA, 459 bp, Zea Mays
caagctgccactcaggtataccagaagcctctttataagatgatggttcaacaatgactgcaccagcacggggaaacccataacgttctggagctgcaatagtgccacggtcacgaagatgatacccctgattaaaaacaacatgagagtcatcattgttagtacaagtatcagcaacaggatcatcatcaagactggccgtgggagtagagcgaggacgacgaatgtaagtctgagtgacaagtggtttggaagagtaagactgagatggtgtggaagtggaaggtggtgtgatgggaataagaacatctggggtagaaacagtagatggtggtactgatgaagtttgagaaatgggaggaaggctcatgaaggaggtagactctgtggaataaaaagaagaatgggtggaagagttgtaaaagaagggtcagttttcattaaagctcacatctcgag

SEQ ID NO: 200456 - DNA, 285 bp, Zea Mays
catgaagagccatattgtaaagttgttcatgaattctaagttaagttggcagcattcgtgacatatatagtaagtagatgttgatggttcgtaataacagtaagtgaccatgtggtaaaaagtgagaaaacgaaatggaagtttatgtatgcagggtgaacaagattgaggatagtagcaattggtgacttgaaactgtggaaaactggaagtgcatattttgttgaggaagaacagtaacaattagtgacttgaaatttgaaaacaggaagtgtgtgttttaaa

SEQ ID NO: 200457 - DNA, 467 bp, Zea Mays
gcagaaggtttagaaatcccgatgtcccaacgtgtttgatgaagatggcgcctgattattgcacggtacatgtcatccacaaggcaaaagccatccaggtgaaggcagccaaagctcctgcaccctttgctactctccctccaaagcaacactcgcaaccaaacatagagtctgatgcttcaaggtaaatctgatgatgaatagcacttcattagttacattgtgtagctgtgaacataatatggttcccagtaatctgaaccctttcatacttatacataagtgtaaaatgcatggactttcttagtcaggtcactctttgccttcataacttgttaacatccatgttttaaggaagaacttgttaatatcggctaaaaggagtatccggttttttaaacagggcctcaagaggagactggaagaagactcctcctacatcgtctccattggcaagtagaaatgaa

SEQ ID NO: 200458 - DNA, 1243 bp, Zea Mays
ttaatattaactagtatatgaaaatatcgtcatacgtaggtttaattgttccgcgggatttataaattccccgatcgtcatctctacgtcagccaacgacagcttgctctcgcccctgccttctcctctcctctgggtgttcccggcggtttcttcgccgctcaagccgcctccactctccctgccgcgctagcaactacgtttcggacttccccgctcgactttcgacctcccctgccgccaacaccgcccaaccgccgtcctccaccaccctcggccggcggcgccccgccttgccggaggcggagcagacgacgcgtggcagccgattccgcgatggatgcatccactgccggcgatggtacccaccagcttttttaggcggttttttttcttctgggttttgtgtctgttgtaatccctggtgtcccgtcgattgggccatggagattagggcgtgatgaggctggggccattgtaatgcatgctcgattccagttgatactgcttcgatcgcgctaatgcgggtgaactggaggttttgaccaacggttccggatatggtggtacttggatcggggattacgggggttcgtgccttgggttgatggttttgggagggtttgggagctaaagcgcaggaaaattagctatgccattcgtaatgtaatttttttattccctcctttacctgtatatgcttttgattttcggactactagtgatgtgtttctgttgatctcacttgtaaatcgttgttgcattatcatgagacataccctccctttaccctgtgtactttgtgggttatcaacccttatcaccttatgcatttggttttggggagtactgatgatggatttctgttgatctcgcttgacaaagcattgttgcattggcaggagacacgaatactttgaagaggccatgcaaaacatcgcctccagaaggcgaaacagacaagtataaacggcagaagagggaatgccaggatttctctcccagaaggttctgtacatttgtcctaggaattgttatacattcaggggtacatactacagagcatcatatgatggttgtgctttgtgatgtcgaattgatcaggtaccagcttgatgtctatgaggttgctacgaggcacaacacaattgcgatgcttgacacgggagctgggaagacaatgattgctgtcatgctcatcaagcattttgggaagatcaacaaagcaaacaatgatcgaaag

SEQ ID NO: 200459 - DNA, 279 bp, Zea Mays
gaagtacagggggccacacctacgaacatctcacagaggtggacgaagatggctgcctggaggacggagtggggtgtgaggtgttgaagctgaagcccaaactcctccagcagcagcaagaagaagggcgagatcggcaacgccaacccgtagaagatgtaggaggtgaacagcacgaactccccggcggtgagatcgccatgagggacggcgccggcgcggattcttccggcgagccctggcgcgctccatccaagcaggccgcgcaccaggttgagc

SEQ ID NO: 200460 - DNA, 665 bp, Zea Mays
ttgggacaatctgttggccatcaacttggtgacaagtttagcaatgctgtgtaccagactgataggtcgaaagtcttttacctcctcagccccctccttcttagggataagagtaacaaatgcagtgttaagtcttccaaactgctgaaattttctacaccaaattgcagcaataacagccatcacatccgtcttgataattggccaacaaactttataaaatctgcctgtgtaaccatcaggccctggagccttatcagaaggtagttgcattatggattccagaacctcattttcatcaatctgcgcatctaaatcagacatgtcatgagaaggtagacccaggtaatccaaatcaaccgttaaggatctgtccgccttgcagcccaaaagtttgaaataaaactcatctactgctctagccttctcgccgtgatcagtgaaagtgttcacccctgacacaatcttggcaacaaagttcttcctttgcctgtgcctagcatgcatatgaaaaagcttagaattggcatcgccctcctttatccaactgattctggaccgtaggcgggcaatagtgcgtttgagggaggcaagggctaaggagtgttttttaagccctctcaagagccaaacctccaaaggagacaggagccgagagtcttggg

SEQ ID NO: 200461 - DNA, 369 bp, Zea Mays
ctctaattaagcaaaaacaattcctacttatatcgaccgaatattcttgtcgagcacaccttatgttaccttgtctcgcatacaaccatgttgtgacatgcactcgagacactaccgattaacttaacgcaattaccaccacaatgcacttcgatatacacgttcgacatcacagtgctttgacagaccccacacttccaaatctacttgtcacatccaaacacaccacgtgaccactgcattcttataaccaattttagcgcaattatttatgacaacacttagcgactagacgagtgaaacaccaactgattattcgtacattcgcctttgaaacactaatcatatgtgacataatttatattttca

SEQ ID NO: 200462 - DNA, 417 bp, Zea Mays
gagaggtctgacttcaaggctgtggcaggatggatatctgaaaccaaacaagaatcatgcaggaggtgctccgccgttgatcttgcccatgcatgagccgggatcccccaaatctgaacgtcgactagaaatggaagagcccccgccgttgcatgcgtaaaccgcgaccaccgcttgaactgcaagttgaaacgaggccctctgaaaactttgccttcattgaaaacccttgtggcggtgtcttcgttagggaggaatagcagaaagtcctcgggcatggcttgatgaattgccaaagaatcagcatctatgccgaaacaacgtgccacttcctccacaacctcagcgccaagaacctttggtctggtgccaaccaccatgatgtacagagctcgtcggagtgccacttcctcttgg

SEQ ID NO: 200463 - DNA, 518 bp, Zea Mays
tttattctggcccgcactcttttcctcccggggtgaggtttttaacgaggcggagtcatgtaatacacaagtgcaaaatcccctgcaaaatctacgtcgaaaaagaccgcgccgacggtcttcgacattcgaccaacacatagtcaccgcgaggcccagcatcagccaccctcgcgtgcgacaactccgtgcagaagtcgcctaagggtgcagccggactagcacaacaagtgcgaaaaatcgaagtcttccgcgaagactatctgtgcagaagtcgcctaagggtgcagccggactagcacaacaagtgcgaaaaatcgaagtcttccgcgaagactatccgtgcagaagtcgcctaagggtgcagccgggctagcacaacaagtgtgaaaaatcgaattcttccacgaagactatccgtgcagaagtcgcctaagggtgcagccgggctagcacagcaagtgcgaaaaatcgaagtcttccgcgaagactatccgtgcaatggtcgcctaagggtg

SEQ ID NO: 200464 - DNA, 886 bp, Zea Mays
gccatagcattagccgaaagtggcaaaattggggctttaaatcttatattcaagcgtcatccatatactgtctcttcagatattttacgtgttttgtctgctatcccagaaacccttgctgttcagacttatagtcagttgctgccagggaaatcccttcccagtgttgtcatattaagagctggtgattgggttgaatgtgaacagatggcttcatatataaacaattgccctgccgagttggacaaggtcgaagagatcaaaacggaaatacttgtaaagcactcaaaaggcttttcatggccttcagttgctgaactttgtgagtggtataagaacagagcaagggacattgactgcttaagtggacagctggaaaactctctggccatgatagagcttgcatgtcagaagggcattgtagagttgcagccattctttgatgatattaaatgcctctaccaggttgtatattctaatgaattgaatgagtttacaatgaatcttttgacatgggaagatctgcctgattatgaaaagttcaaaatcattctcaaaggagtcaaagaagatacagttgttcaacggctagaagaaaatgctatccgttttatgaagaaattatatgaacacaaacaagaatcctaccttgttagttggctgaaagaggtagctgctaaaaatgagcttttgatttgcttagctgtcattgaaaatggttgtggggaatcaccaatatatggtctcttcaaggatcttgctgagatgatagaaacctctgttcactgcatttatatgtgcagtgcaactaaccagtggaataccatgtcatcaatattatcaaagtcactctataaaacaaagagggagaaatcgttagtggcta

SEQ ID NO: 200465 - DNA, 549 bp, Zea Mays
cttgttggggcattgttctgtgttggtatggttcttaatacttttaccattttattttgttttatcacaatcttcagcatgaacagttgatacttgagttaggtccttggtttgagactttgtccacttctattatttttaatctaaccaccttctcttcacctacaatactcaattattatttatcatgttttacaatagcaaatatctaactgaaacagccatgaaagcatttataattataagtgttgacatgaatctttgtatcaatttcagtgattatgtttctgatctcctggtctttcactgttgtctcccttgcccttgcaagcctcatctattactatgtgagcataaaagggaaggctggagactggggagatgggttcaaaagtgcatactttcaattggcactccgaagtctcagatcactcggaggtgcggctgactatctgctttgcaattacttaatcatacttaacaattttgtaactttggtcctttctgcagcaaaccaagtccatcctaagaattggtaccccattcctc

SEQ ID NO: 200466 - DNA, 349 bp, Zea Mays
ccacaactcttcatatgcctcgataatgttgatgtcgttgacccttgcatgtaggcatacattttcttacaatacttgcactttgcctttaatgtcttctttcaatcctcggatgcatctccaacagtcactttatcaaaaacttcccacactttggatttagagttgttatcctttactttcacccccttactccttttcttggcttttcttttatcatcattatttgattccacaacatcaatctctctcccacctaggacaaccatttcatcctcagacatgtcatcgttcttgtcaaatgaattgctttctgaatctatctcattactttgattcacccccttcc

SEQ ID NO: 200467 - DNA, 277 bp, Zea Mays
aaattacctcaatgtttgtcatctccaacttttggtagtttccttgaattgttggttaaccaaaagaccatgatctgctcggacgcaaaatttcttcctgcatatatttcatctatgctgagcccatgtaaagatattctggttcccgagaatctccatgaaaggttgtcctggtttcattcttctacagatacatttctcttgtgtacttattattaattggggtgtaacactctcttgtttctatcatcagatttgatccgcatacaaaggatac

SEQ ID NO: 200468 - DNA, 380 bp, Zea Mays
gaatgaccagaaatgagagatttaggcagatcaacatccgatacttgagaacgggttatagcagataaccagataacggggcagaataaataggggatcccgagattcggacgataaagcaaacatgattcactagaagaaggattgccagatcccagcgaaaggagaggtaggcaaacaggatcagctaggatgatcgacagaaacgctatgaagttttaggggcaaggatttatggaaagaaacatggcttggtcatggtttgcgcaactagacaccaaacgatgtttttttttgacacaaccagtatacaaggagacttgggctggtctagcggtcaagctacagggtcctacaaactgtgcaggtgtaaattcaag

SEQ ID NO: 200469 - DNA, 282 bp, Zea Mays
ggccattcctctgcaacctgtggatcggccatatcactatgtaacctggtccgacattttgtggccccacatcgctcccactgccgcctcatcctacgctacttgccactctgtctttcggcggtcctgggtgtccgcttgagccctcaccttcggctccatcggcgctgcactggcccttgattctccctcgcacgcggtcgttgcttcacccggctccatcttggacgtcgtgggctagggtttggtaccaacagtctcttgctaactcgtttagcacga

SEQ ID NO: 200470 - DNA, 352 bp, Zea Mays
gcttgatcctggtataatggatggattcaaaaggaaacaatgattgtctttgcttcgagtacacgcctatgtttatccatctgtctctctttttttcccttgagttctgctagaatctaggcgatttcgtgttcagttggcgctaatgaaggtgtagatcaggaggtgatttgaactgttcaataaggcagagttaggtttcttgcattgtacagttaatcttgcatcgtgtcatatatgggcgcctgtaagttaggtggcgccagaatagtaacagcttagttaatgggcccattaggccttagattagatggatctgttatcaaatctttgttagttggatttgttaggg

SEQ ID NO: 200471 - DNA, 311 bp, Zea Mays
gacatttcctggtaactattgagctgatcgaccaactgagcaaaacgttccacatattcccccaccgacccttgctgccggatatgaaataattgacgcactaggctagcatgctgatctttcccaaatctctcacggatcaagttcccaaactctagccaagacaaactagcaagcttatgctcaactgaatttaaccaacgtgcagccgccccagcgaagtgcatggttgcaactttaacccacacacaagggtgcacggcgtacatgtcaaagtagtcttcacaatgtttttgccagagttttgggtt

SEQ ID NO: 200472 - DNA, 332 bp, Zea Mays
tgacctaacttgccggtccatacatgccggatcacaagtaggcgtctcgtgaggggatggcaggtgcagaatgtttgtagatgtgtcgccagatttacgtccgggagagcgaatcgctcgatggattggtagtgtttttgttcatatgtgtaggttttctcacatggaaggaatgtagtatagaggatgggagatgaagattaccgtaggtgaaagatgatgttgtaccatgaggggggaaaacatgcttgtagtagtaaagactgctgcttcagtccacgtatctaaaaagttcttctctgaccatgtgctgtttccaagtgttaatgttc

SEQ ID NO: 200473 - DNA, 485 bp, Zea Mays
gcttgaagacatgtgggcttgtatgaagcagttcaaagatgcagtctgtggtgtgatgaatgaggtttgttttattgtagtttgtgctttatgcatacaatgtgtgcaattgctgctattctgttgtgagaagttgacacatcatggaattacttaaaacttttcaagtgtgaggtcttaattgttttattccccttcgttttatgcaacatctcaagtccctagatgatactattgtactttactgcagtgctacctgagagcataatcaattttacaaaaaaaaatgacatatgtgaacacgtgcaatggttggtgctgtgatttctttgtctatattctttgttaactgttactggtactggctgatactattgtttgtgacatgtaacagccaggccctattgcaactaaactacttgctctaaagtttgtggaaacatggattttgtgttgcacacctcaagccaacagtgaccaagtac

SEQ ID NO: 200474 - DNA, 555 bp, Zea Mays
ttgtcgacgccaccaagccccctctgcccctgcgcagccgcgctttctccgtccgcgccgctcagcagcagcagcagcagcagcaccgcgcccgcccacggccccctcgcaggaacaagccccccggacccgcgcgccgtccgcccagggtccctctggaccaagatgaatacgacggcggctatgatgaccgggaggaggggaggttcgctgggggcacccgggccgccgccatgcccaagccaccggccggcttcgtgctggatgaccagggcaggtgcatcgccgcagcatccaagcgcatcgtcaccatcgtacgtacgcctgccgatcccattcctcctccacttctttcttttctctcgttctgcaccttggttatctggtatggttgggcagcttaatattttctttctttctgtcgtcacaaatgaaatcaagccaaaccaacattgtgatatgcagatcgacgacaccaacaaccgccccttggagtgcataatcaggagagtattccggagctcgcaggaccacgactgcatgcttctctgccca

SEQ ID NO: 200475 - DNA, 289 bp, Zea Mays
aataaatccgtccgctctccagcttggtggcacaatcccatcgaaagctagggtttcaagcctcttccgacttctccttcccttcccttccccaccacaacgcggccgccatagacgcggtaccgcgcgaactcccatagatctgagcgagccaccctgcgaatcatcccctgacgcaccaaatctggtcagaaacggtgaagagttcggacacgatcttaagcgtcgttgatttaagaccacacacaaacacatctgtttgcccttcccccctatttttttcctgttt

SEQ ID NO: 200476 - DNA, 358 bp, Zea Mays
ccacctgcctctcgcgcccgaggaggaccttgtggaggcgaacacacgctggacgaaatcctcgacgcccaatgcccgtaccacaaggacatgcgccacacccttcgaaactgtagagacttcaagcactccgtcgggcacgaccgacccttccaacctctacctcctcctccaccgcggggaggaccaggagaaccacgacaaccccagcaataggaggagggaggaggtggagccttcccgcgtgtcgacagagaggtcaacgtcatcttcggcggacatggatcgcaggagaacaagagacaacaaaagctcaatgatcgccaaatactggtggcgaccaccggtcctcccgccc

SEQ ID NO: 200477 - DNA, 379 bp, Zea Mays
gatttgtgttcggtagggatgctagtgcggactatgtccgaatggtgagccacagggggctcgaaggtggatctgagacatgggttatactagttcaggcttgcgccctagtccagtgtagtgttgttgtattattgcttggagcgtgttacatttgagtgcttgtgtgtagaagatgggggttgtcttgcccttttatagctcaagggtagatcttacagtgagaactcatattcttcttgagaggagtttggcatgttgtcttgggttgccttagccctcctggtgtcgttcgtagggggggtgccttgacgtattcttaatgtggcattccgtcttgtctaaccggcgtttgtgtccctgtagcttgtctgatgcc

SEQ ID NO: 200478 - DNA, 281 bp, Zea Mays
gaatcatggtgtcaggaggtgttgggcaaacccacaataaaatccatgctgaggtcctcccatttccaagatggtatgagaagaggctgtaaggtacccgctaccttcaaatggctagccttgattctttggcatgtatcacattcagatacatacttagcaatttccctcttcattctggtccaccaatacaaggatctgagatcatgatacatcttgttactgccggggtgcatggaaaatttggaaagatgagcttcatccaatattttcttcctgag

SEQ ID NO: 200479 - DNA, 2403 bp, Zea Mays
gacaaaaatgcccttgattcagatcgtctccagaattacactggtatcttccttctcattgggatcttgttaggtttaagagttccttcattagcattttctgaacttctgcttctggttcaagggaatgcttctcagcttctatgataaactgtcgttttctggaaatgtcatttaactgtgtaggttgtggtaccagatgaatgaacagttacaagttgtgcttaactggatgttatctgatcctctcagtctgagtacccttttcatccctttattcttctgttgatagtgaaagggcctttaactgagttggtttctgttgataataataagctactcattttctaattttcttgctgtgcttctaattgagaaataattacttgcatctctgctatggatcctcataaaaactgctaatttggaaggacatttgcaaaatgtagggccccagctccgccaacttctgaactggccacgaccactgccaattgaggaggaaagagtacgccttctccacgaggtaaaactctgtctgtaattgctccgttgaacatctcaggctctgaactttgataatacacaagttatgtggtaccatgagcttttacactgcaacccagtttgttttgactaaatttagttgtctgcttgatttctagaattatctttgttggtaggatttagtttttttctccactgtgctttactttttccagtagaactgtcttacgattaacatatttccaaccagttttttctccaccatgctttactttttattcctttccaacattactttgttttgaatcatttttttcattgtcatggcacctgtgtcaaggttgggcaggaacttaaaagaagctttggaggtcaggctgctaatctagtgaagtctgctggaaactctgctgcgactcttattgaactgattactcgacattttcctggtaaatccacttggtattatgtttatcgtctttggtcaaaagtaggcaaagtccagtttgtcattgtattgcacaaataagttcatcagctgatagtctccttttgtcccctttctgcccatatgctatagcttgctatctgatattagtttcctgtattgggaagcacagcggtgttataaattattggtccaaaaaaatatttcgttcatttgtcaaatggttatggtggtccctgttggctgtaggcacctacagtgaaagtgaaactggaatggcccatccacccactactactgtttgtctgcatatggatttatgttctgcctgctactttggatctgagagtcaggaaacagtgatgattgatgaactggtgcctcatctaggcatatgaacttcgtatgagctgggccattcaaaaccagatgattgtgaatatttgatgcttacacttacacccttacattttttcatttctcgtgcaaaacgttagtggttttcattttttagcagttggccaagaaatctgttcacatgatttcacttgaagttaacatttattctcggtgttggtgctttcgttggatctccattgatttgagacattgaacatggagtttatttcctcaaagaagaacatgaaactgttcccgtagtgtttaactgattatacttgttcgacaaatatgtccagacatgagctaatcatctgaaattccagtgatttaggagtaattgatttcaggcttccagcacattattctatcatatatggacatatttgattgcacagataggttcactgacaaacatgtacaaatcttaactattcaaccggttagtctgaattcagaaacaaggaaggatgctagttttacccctgatctggccatagccaacttcagaatatttcacaattcgttcttcgatcattgaatttaaattgtaccttgcgctcttgcagggaattttagcatgtattgaatcttttgttaataggatagcgttgtgcaacttgatggtaccttttgctaacgttctatgaacacgtacatctgcatgcattcaaaaccaggttatattttttcttgttttgtactgtcctgagtcatgacatgactcatgaccaagtgtacatccatccaccaaatagtattttaagtttccattttggcaggtttccgggaccattcactctacaaggggcaccaggttttcctgtacaagagagcccagatctttgttgctgatttgtggggcgccttcaagggacaaaactatggcgagttccacgatatcaattccatcaccatatttgctgactacattgttccagcggtcctgagggagcttggagtacttaaatatggctcgaatctatcttgctccatcgactcgaacagtgagatagtgcctggaagcgaggaggaagtggagatacgcg

SEQ ID NO: 200480 - DNA, 490 bp, Zea Mays
cttctgtctgcgcgcgaggccccaatttggcgtcaaggacgaccgacgacagggaggacgactttccgccccgccccactctctctgcacacgcgtggtggttggccggagctccaatgactcgatatggggaagggggagcgcttgggaggtcgccagatagactcggtataagtaggcgggggagattggagtagttccgaaggatgcgcgcggtctgttgagctcgacgcgaatttgggggagcagatgaacagagaccgagtccgcgcttctgttgcggtcagacgcggaacggccgcatcgcgaggggaagggagcgcaatccacggaatcccatagttccgagtccgtcactgcacagggaggaggaagctccagctgagccacggcgggcatatacgcgccagggcacggagtccgcccttcaaccgtccgcgcacgaagtggagcagagatagggagaggggatggagctgaccaatgggtc

SEQ ID NO: 200481 - DNA, 484 bp, Zea Mays
tattttaaaatataattccgaatcgagcgcataagtacccgttggaaaggtatgacaaaggtctacatgattctcatattgattaccactaattttctacgaaaaatccccagaaactgctactactactgctgttcgcccacctgcagaaatctgtttttttggacagcaacatactcagattcaaacagcgatatcttttaaaatataattccgaatcgagcgcataagtacccattggaaaggtatgacaaagctctacatgattctcccactgatccccactaatttcccacgaacaattcacagaaatccctaaaactactgctattcgcccacctacaaaatttctggacagcacctataccgattcgcatagataaacatataatcaattggattgcagcacaattaaacaagatacaaacacaaaaatcaccttgaatcctccccctttcctcccttcttcttccctccaccaaaa

SEQ ID NO: 200482 - DNA, 624 bp, Zea Mays
ctttcctttaagatgttcctgaagcttcttcactgcatcctcgaggactctctctgaggcattacatatcttgttggcaagattaagaacactaaaatcatctgacacagttacccactttagtagatggaaatgctccttgacctcagggtccttgtagatgagctgagcgagggtggtcttgcctagtcctggcattccaacaatgggaacgaccatgagatcacgactgttaacatggccattgaccaatatgttaacaattttcttcctctcatcgtctctagacctggcaacaatattttcaggatcaacgataatggaatccatctcacgcaactccttccgtgccgttgttgcctcgggctcaagcttgttgaatctaaaggtgtccatttcttttataaggtccttgaaggtgtcaacaactctgcgaagcctatagcccatcctgatatggaaggcaacacgattgtgggtagggaagagttttacactggtcataacgccaagctcggcgatgtgcccattcttcttggctcgacggcggagcgcctcgtactcgaagtcgtcgaagacctcgttcgcctcgtacaccgctgtcttgagctgctcgagccattt

SEQ ID NO: 200483 - DNA, 313 bp, Zea Mays
gttggcggcaggtccccctttccttggaattggcggcccacggggcacgacgacgtttagcgccacggcacctgatggatgagggtgcgggtctgtttatatagccaacaaagggctaaatcaccgaggacgaggatacgcggtagccggatttctagggcggaatctcgtcgttctgttacgcggaaaacgaagaggaggcgatgcatccgacaggtgggcccccaaggcagtgaacatagtcacatgtgcggcatcggggtgtcaggttcgcgagcgactagggctgggcaaaaaacccgtaaccctaaac

SEQ ID NO: 200484 - DNA, 514 bp, Zea Mays
ggattttgaatttgaacttgaagtcggattgctcttgactgctttgtttgaactggtgcagttaagttgggctgggttggggttgattcacccgcgatgatcgaattcgattccagggctttgcgattgagtgtagtgcagcgcaggagttgcgttcccaccaaggaacgtattcaggaccatccgaattgtcttgctacttgggttggtgggcatagaatgaaattttagtgctgcaaagtttcagacctgaaatattacagcttcctgcctcaaatcaacctaatctggtggtctggattaacttgagacaggagactactgttgttttccaggaatcgtgacttctgttctctgtagcttatcatttgcttggtaggttgtatcaattgctgttaatagggccacactgtagttagggagatctatacaagttgctcaatcctcaattacatacgtgtcgattcttttgtctgagaacttctacttcacgctaggtagtttgtttcataga

SEQ ID NO: 200485 - DNA, 279 bp, Zea Mays
tgcacaatatgcataacctttgcacccatcatagtagcactatgcaaccctaccggcagtatattataaccatgtcatgccacctcatatagcacaggatcgaatattcttcggccacctgatagcttgagagatatggggcaggagggggtagcactaataggacacctaacacgcattttggacatccctgggaagaaagccgacacaataatgcatagtaacctgaggttttcatccctaaacttaatggatggtcactagatgtggtggaaaaac

SEQ ID NO: 200486 - DNA, 602 bp, Zea Mays
ctgccatatgttttgtgtgtcattgattgaggagaacaatacacatatataggcagagcgccttgaggtgtcgggaaccccttccctatggttggccagtgcaactacggctgggaaggtgataggtgcatcttaggctgggccttagacacacaggaatggcccagcccacaccagcggacagaacagacatattgtaacagattcaaccagtccctccgaaggagtaccagccaacgtagccttaggcttcctggttctcgaccgatgacgacaatgtttgctcctcgtctcagaagcagaagtcaccattgctgccattgttgaatgagaaacttgttccgtgggagggctgagccgctgccaaaatgccaattgacgtggtgcggtctgaagaggtccactggcaacgagatcctagatggaggcacgcccaataggctccttaaccaacttcctagcctttacatcaccgccggcgaggcgatcccagattgaaacacccatcttacaccttaaccagcgtcttggtaccaccctttctcgggcaggaggacacccgatgtggcactggactccaccaaacgatagtacttggagcg

SEQ ID NO: 200487 - DNA, 352 bp, Zea Mays
ggcttgtctgccctgtaactaagatggagctcagcaacactgagttaaatccaagcatagctctgaggaacactattgatgaatggatgaaccgcaatgaggtggctaaacttgacgtcgctcggaagtcattgacttctgatagcacggaaagtgatatggtacaagcactccagtatgttgatgagatatgtcagagaagtcgatccagtaggcaggttgtgagaagagatgggttgataatcatgattgctgacttgttgaagaaaagcagtacgaaagtacggcaaatggcactagagactcttcgctccatcgcaaaagatgacaatgacaataaggttcttttctt

SEQ ID NO: 200488 - DNA, 375 bp, Zea Mays
tacggccagcactctgcagaaaagaaaccaaatcagatccaccatactctaaaagctcattttctagaccaagctcaataagtgtcctgtatagatgctcatggaaaactgtgtccggccattggacactaagttgtatgatttgtttgatatacttgcttcgagaagctggatcagcagcagttgctagagcagatgacttgtctgcactttgcattcgactatgcccaacacccttgagagtgcacagcgcatccataacaatcctatagcattgttcacgctgcaacattattgtatcatgatgccttgggtctatttgaccattgataatatcagcattggagtcaagtgcttgagctttctgcagaggca

SEQ ID NO: 200489 - DNA, 391 bp, Zea Mays
tggtaatcttgttgtctccttgtaactccacttggtaattaattttctttacttcaaccattctgttgcaaccttacctatcttacccttgactgttttctccactttaccacctagcgagtcttgcctgaactctatccttatgcttttcattagtatcatctttacctttgacacctctatatcttacttgatgtttgtctcatacctgccctttaaaatcacctctctcccgtcttattctgagagctatactttacctatctttaccttggttgcatcctcttctttggcttgcgagtttgtaacttcgtcctttgctgtgcttttgtttgttactgcctccacctatcccacctctcaatcttaccttggtgattacattattttt

SEQ ID NO: 200490 - DNA, 275 bp, Zea Mays
gatgtgcaccactgaaccactctatccctcatagacccatcactaactataataaacttaacatcctcttgttttgtagttcccagaacagagcaatggtctctagcagcaatcacttattcctgaaatattttgaacacattgtgcgtgtacaatatgcttgcttgtttctccacagcccatggggtacataagacaggtgtgctatgtatgctaatatgatcagctttcaactcctcatgtcgttggcattccaaggccgtatcaaatctaag

SEQ ID NO: 200491 - DNA, 519 bp, Zea Mays
gtttcattttgcctcatgacctcctcccctatatatgtccatgtatttcctgctgagagtcatgttcctgctgagtttccggtggcggcgttcctgctgagcgtcgcgttcctactcagttctttgggaaccacgaggctcgcaccctccaactcgacgcagctttccacggcttcaaccaaggcgacctccctgttcaagactactgccacaagctgaaagagatggctggactccctgaccaatctgggcacccctggcgacgaccggatccttgtcttcaacattatccggggacaagaagtttgagcacgtcggcaccaacatccgacgctactcacccttcccagcctttcttaaggtgcaggatgatcttgttttggaggagctcaacatggagatggcacatgccaccgccacagcttgtcgctgctccaccacccccagcgcccactccacctacttcgaaactaggggctcatccagatccggctccagcacgaaaaaaaggggcgcgac

SEQ ID NO: 200492 - DNA, 302 bp, Zea Mays
aagtggccacaccttgtaagcaatatgctcctgtaccaaatccctggtaccaatgtaagtgcacacaatattgaaaaccaccaaacacgcttgcacttcgtttccacttgcagttaacgaccttctaatgccgaagcgtgaccgtacgacgttggataatacccttcacatcttcccgttcactcagatcattcttgaactagaaccattgtttcatccaagaacccggccacgtctttcggaatgtcggcacgggatacctcgctttagagcggtgcacaaagttgtatcacccaaagttg

SEQ ID NO: 200493 - DNA, 371 bp, Zea Mays
ccagaaactaggtttaattgacgaggtgaaggataaattatcatcgatggaacgcaaacaaggagagcacgagaagacatctgagttcctgcaatctaaattggatctgtcgatgaagtcattggtccaacttcatcaggagcagacgaggcttgtggcggtaatgaaatgtggtgagactggcttccagactacgaagtctggcgtggaggaggggctggattgatgggactcacccttctttccaccctaattcatctaatatacaggtatcttctccagattctaatcatcccaaggattttcacacatggcagcatgggactagcagcaaaccggatcaagttcccatagagcctacttctcacaag

SEQ ID NO: 200494 - DNA, 289 bp, Zea Mays
ggttgaggggcatatttgttagaagcaagcaaagttagactacctgaatgtagatacttttcctctgtcattgatgggtgaagatattgatgtggtggtattaggggaggtttaacatgctcttcatgtttggacgatcgtgaagaatacattgacatatctatgtattcatcaaatgataatgaaggtagagatgaaactgttcttattggtcgtagaggaggatgtactagagaaattttgggtgatgatctcaggggtatgtagagatgagatggtggaagcacag

SEQ ID NO: 200495 - DNA, 338 bp, Zea Mays
tcccaatcgtctccttccatagcgtcataaatagtatcctcagtcactgcagccacattccttgcaatgtcggcttcaaattgttggtttcgacggcctaaggtagctggtcttgtctcagatagcacatgatgtctacgtcttagtggatcagtagacatatcgagtgaaccaacatccttagtctgtgttgaagttggctggaaaggtgtcatgacgaattcagggataacccagtcacaagtggtaactgaggatccatatggttcaattccatatgttgtaggacgtacaacctcaggggtatatactgggtcctccatggcgatggactcctg

SEQ ID NO: 200496 - DNA, 323 bp, Zea Mays
aattcctgcgcatctctgggggattgaggctgctgaagctgttcttggtgctttctgtttgattcatggttttttgcctggcttggtcaaggaggaagatatgtctgttctcagactgaaagtatggtgccggtcacctgtgctgctgccggcggtggtggatctccttgctgaagagccgatggtctgtggagaggatgggagctgggttcctagcacgttggtgttccctgtttctgtggtggttcttcattctgatggaagttcagattccggtgtggatccccctgcgccacccccttcgggctttgtcgacgaagata

SEQ ID NO: 200497 - DNA, 934 bp, Zea Mays
aggagaagagctggggtcggaggccccaggtcggagctgaacgcgcccccatctcccgtcggcgagaagaggtactaccgctccgcggaattcccccgctgcctccttccccagcggccgcatccctcgtctctctcgtgagtgtttcgtaatttcagaccgcgcacagggtagccagcgattccgcgggcgaggcgagaacgatcggttcgatctcccttgatctttggtgtgctcgcgtgctgtgatttcatttcgtctgacactagtaactgctacacgatagtgtgtatcggatgctaggacgggagattacgtgcgtacggtatctcttgatggcgttgctaggaatgggatagtaggatctaggctaagttttttgagtataagcataggatctgctttgctaggaagcaaaaaaaaaatcatgtgatttattgctttctataaaagcagggtgtgtgcctctactcaaaacttttttggagctaagttttggaaactgatggtccttgctttgctccaatgcttcagttattcatgacccaaagctgtagaatgtttggctactcatggagtatttacagcattcagctacaattttaattcttttggggattgggatgaaggggggcagcataccatttttgtttatgcattagcttttatagcattgttcactttttttctttgggtgagctgggtgggtggggggagtatcagacttgtctgcaatgtcaatgaatatagaaatcctatagacaagtagtttcatgaatttcctaggatatgtcacttgttcatgtagctttctctgcaaaagaattcttctcgagctacctatgataaaatatattttttctagtcctgttcccacaatatacaaggctaaccaagtatttattttgtcttcagctttgtctgtttcagcttc

SEQ ID NO: 200498 - DNA, 286 bp, Zea Mays
atttacaatcggagtcaaaggtctcaactctcaatttacatacatggacaacattcaactctactcatttaactttaaattttgcatcatgtgtatatctgatccctccgctgccgcaaggcgagcggctcggtgaccgcgcgccgccactccaccactggccctcggagattgctccctcctcgagactgtcccctccacctcatgcggcacctagacgagcgacctcacgccatagggccagcgcactcgaccgcgacccgagtttcgcttcgatgctatcccg

SEQ ID NO: 200499 - DNA, 275 bp, Zea Mays
aaagaaagttggcacaaaaggaagaagttgggctgaactgggtagcactggatggtccggtgccaaccaccggacagtccgatgtccgtacgaccgaagtggacactcttaggctcagttaggccccgctggctaaaattcaccgaacggtccacgccaagcgctagacagttcggtgtgagaacagccaatggccagcagccaacagtcagatggagcaccggacagttcggtgcccgtctgaaacggaaattaaccaatcagggatctttggg

SEQ ID NO: 200500 - DNA, 504 bp, Zea Mays
catgcaaagagccatcagaatcacatattaggcgttatactcaccagcatggtagcttaacaattagtgttcggaggcttcaatctcgaaagttgcctggtgagcgtgacggaaggatatggatgtggcacaggtgcctcaagtgcaaacctaaggatggtgttccacctgccacacggaggataatcatgtcagatgctgcctggggtctgtcgcttgggaaattcctagagctaagtttctcaaaccatgcttctgccaaccgagttgcaagctgtggacattcactccagagggactgccttcgtttttatgggtacgtgtctgctatattctttacagtatcatattgttctgtgctccagtgagatctcaacaattcaaatacaactccaggtatggaaacatggtggcattcttcagatattctcctgttgacattctctcagttaaccttcctccaccagtactggacttcaattgttgtagtacacaagagtggct

SEQ ID NO: 200501 - DNA, 378 bp, Zea Mays
gattgatcggaagattctctgtattccgagtactgtgtctaacagtagtacttgtttgctcattatttactccttgtcgatacacctgaaaaatgaaaaagaaacgatgttttgtgattcacatacactagacatgtggaataaaacaaaacaaaattaaagatgagttctactaattgcatcctatttcgtcaaactatttctagatgcatgtacctttctccgtaattcagtgttatgttgatgaagaaggttaactttgttgtatagttctatgctttcctggtgcatgaggcttccctataattcaaacaagaagtttttgtagtgaagcgagaccctaaaatatgttattaattgtgaataagtcgtgtggac

SEQ ID NO: 200502 - DNA, 349 bp, Zea Mays
accaactaccgctagctttagattgtatgatatttgttatctagaaggaagacttcaatttatggaataactcaaccatgcggctgttactaaccttagggaatttagaagataattccaataggggaacagagagcctcacatggtatatactttgttcccaaacacctccatgtattcaaaattgtggtattctaaaactgtggtattgaaaactgagatcatgtcatggcatttgtatactgtggtatttgaaataccatggttttgaaaaactgtgtttccaaacacccccttagtacttgtcagtacattttacatgcttcgaattgagatgcataggaattag

SEQ ID NO: 200503 - DNA, 454 bp, Zea Mays
ccagcgagagcagaaacgtggcaaaccgactgtaccaagcccgtggggcctagttcaaaccgtatagagatcggtttagtctgcaaacgaagtctgggtgagcagcatcagcaaaaccagagggctgagagcagtatactgtttctgacaaagtcccatgaaggaaggcgttcttaacgtcgagctgatgaatcagccagttgcgagttagagccaaagcgaggactgtgcgaacagtagcaggcttcacaacaggactaaaagtttcatcaaagtcaattccaggacgctgtgaaaaacaacggagaacccatcgcgccttgtagcgctcaagagagccatcagcattgaacttatgtttgaatatccacttgccagaaacaacattgcaggagggaggacggagaacgaggtcctaggtgttgttactctgtagaccagagaattcctcctc

SEQ ID NO: 200504 - DNA, 346 bp, Zea Mays
aagactcacacctagcgaagacgaggttctgaccaagggcaggataagtaaaacactcccctcgaattgagatgtgagagggaactttaaataacagacatttgatagtcatcaaggtaagatggagagacggcgaaggtaaaggtagtaacagataacaaagggtggagttaaaaactcgcaagcgacacgaaataggatgcaactgagggaaaataggtaaccttcaatgtttaaaattgagacgaaagagagaaggttttggagcataggtataagataggcatcaaggtaagatatagaggtgtcaaagacaaaggtgataataatgaaaggcataacaaag

SEQ ID NO: 200505 - DNA, 603 bp, Zea Mays
attttgggtgagcgcggtgttaatttgttgatgctaaggcaagccagtaacctggcacacaacatgttcgatgatatgtcatttacagaggtggtctgggatgatgaaggggcactattcgatgaaatgcattgcacggatgtcatctgggatgaggagacacatcatggctttgactcacatggcctattgcagcaccatgctgaagcaatggataaccagatgcagggcaaggagaaattggctcaaagtggagattactatgatgagaggaaagtcaatattgaaccagacatcaacaacttgctcattcatgtcaatgaccatttctctatgttggtgattggtgcggattctaggcgaagtgatgttgtgtgggacgaggacatgttatctgacctcgatactcatggtggcttattacagttactggcatgttgtaaagatgatgagctcaaccaggacagagacactccttttctcttgggccttggtatggatcaggtggatgagatgctggccagcccgtccagccttggcatgaatgaggacttgccatctgtacctgagacacatggctcgttattgcagcaagtggcatgg

SEQ ID NO: 200506 - DNA, 352 bp, Zea Mays
gagagggggaactattttgcctcctctttgtagccagaaactatcccccaatttctcgagatttttttcagcgcatttctggaccttttggttgaatccactatatcgctctcgtcctttgcctccaccatgttgccaaatcggtgatttagggacatccaactttttgatcggagatctgcaacgttggtatgttctgaaatgaattccccgttgaatcttaaaaatctggtgcaaatgtgaaacctaaatgtcacatttacagtttctaaaaaatgttacatttatggagttattttataggaaacatcgagttatgtgatcaattggagacctatttgtttgaccctag

SEQ ID NO: 200507 - DNA, 409 bp, Zea Mays
taatttgcattttagcttagacatcatatgaatactactactttttacccgcgatcataaccatgcacaattgggctacaacccgcaattcatcgtgaccatgaacttaactaaagtcatctaacaagttgattaacctgagcaacaacctaggccgctatacaacatactcgtcggctagcctattattatcgaaatctgagacacaacatatgccacaacatttatataaacatacatattcacatgtattttcacacatccaccaaatcatatgacccgtaaatcactattctctaactcgaaaccatcatgtgcttacttcccaattcatgaacacataacgcgtattgaccctactcaagatatagaggaagcgatgactactttggcatgtcaccacctctct

SEQ ID NO: 200508 - DNA, 461 bp, Zea Mays
agaccgtcggtggctagattgacggtacgcgtccgtccccaatctcgggacacagcacccctgcagcgccataacccccacggccgcgctcctctccacggcggagctcccaccggcgacaacgaactagcgacccgagcactagctacaacgtcgaccgagcctatacgaagcggggagtgaaagcgaactcggagggaagagtctcacttacaataccgatggatgcggctcggtctgtgatggtgcgcggcacggcgtcctccggcgagcaattcgtcgcaggtcagccaccgattatgcttggcaagctcccgtacaccaccagtggacttgagggagccacccggaccacccaattaggccccaacagtggcccgcatgcggcaccacggcaacgccccaatcggatcttcctcccctcgccaaatgaacaggtgtgccacagcgcaggttccctg

SEQ ID NO: 200509 - DNA, 304 bp, Zea Mays
ctgaaagcaaacatggcttgttcagtcgggcagcggcagcagaggggatggggccaatgacggaggcggagaggagaacccatcgatttggtggcgtaagtgggagctcatcgaggccggtgcgtttgggcaggtctaccgcatgatttatttgcccttatagggatcagcagatcccacacctattacatgatctgtccttctagaatagaatccgctctctatcttctgaaccggtactgccttcttcaatatcagccaccggccggtccacctcttcaataatcgtccttcatcgcccttc

SEQ ID NO: 200510 - DNA, 438 bp, Zea Mays
gtttgtcaccacagcaactcctttctaccccgatgtcctcttcatcgggggaagagtggaatcatctcccatctccgacgacgagccatccgtgcctggggaagaacctcctcagcgagaagctcgccgacggaggaatcgacgccggaatttttggcgacatcacgaagctggggaacgggacccggcacagcctgtatcccgagttgaaatctcggaggtgagagaaactcccgacgaacgagtcttcagagaaaggaggaactctcgccgatgtgatcgccggcaggctcaagagcaagctgaacaggatgcgaggctacgccgagggaaccctctctttgcgcaaaacctgaaccctgacttcacccgtgcaatgaacacaccgagtgaggttggtggagtataggctcggatagctgatggcctcccccggac

SEQ ID NO: 200511 - DNA, 293 bp, Zea Mays
gaatcacatgcgtatactggaaacaactcaagaaaacagtgctgctttgcttatgggtctcgagtaccttattggaatttcatatgttgatgatacagaggtttttaaggtagggatgctgaaatatatttgccatagaaatatggcataagaccaccgtacaacactggataatttactggccttcttatgaatctttacaggtctgcttggattactggaatgtatttgtcttagagctatttgaagcacacaatgaaatggaacctgcagcagccgtaagcatgatgggg

SEQ ID NO: 200512 - DNA, 298 bp, Zea Mays
atctccctatagttaaacaacattatcctcagctcctcaccctcaaaaagacttcgcaactccccctcacctacactcgccccagctggcgaggacaacaattcccgcttgccagccctgtccacacgaagacaaccaccctccacctcactcactctgcgattcgccaccacccttcgctgcctacgcctagcactcggaccgggaacctcagcacccatcacacgcggcgaagcctccgccgcagccacatccaatgccacaaaataatccaaatcctcatccgaagactcttccg

SEQ ID NO: 200513 - DNA, 543 bp, Zea Mays
gtggcattcagatttcggttacctgtgcttgtgctgttggttttgcttcgaaaatttgctgtttgggtagaccaaggttactgacggcctccgccgccgcagatgtgcggatttgagatggaatcgcagtgagagggttgaagagttgttcctgtccctgattctggtggcttagtttctggtgctctgtttggcaacttaagcgcttccattttcggttcatgcaagggtcgctttcggccatcggggagctctcagccgtgaggttttgaggtgggattgtgtcattgtgacctcaaggttgaaggagatgcttatggcgtcgatgtcagatagcgagacgaccaaccgaggcagcatgtgggaactggatcagaaccttgatcagcccatggacgaggaggccagtcaactgaagaacatgtacaaagaaaaggtatcgttttcatccttgctatcatcgcatttagattattagtctctgtatatctgaaagaaacatggtggtccttcgatagttcgatgtacaatattctattgatg

SEQ ID NO: 200514 - DNA, 515 bp, Zea Mays
catctacccaactacgaactacgtagtcagggacctcccagcttagggaccgaggcccttgacaacttggtatcaagatcccggcgatcctcttccacctccgaccaccactccactgctaacactccttcctctccaagttcatcatcagcgacacccatggctaatcccaccaacgccgacctggccaatctcatcgcacagctgaccaccagcctgaccaccctccaggccgaagtgggggagctgcgccgtgagcgcggtaccattccgtcgggctcgaggttcactgaccatcagggtgaacgacctccgcgttttcagaagttggattttccaaaatttgatggcaagtctgatccgctggccttcctcaaccgatgcgaatcctattttcatcaacagcggattgccgcagaggaacaagtctggatggcttcatataatctagaaggcggcgcccagatgtggtacatccagatccagaacgagggaggaacaccgtcctggcgcca

SEQ ID NO: 200515 - DNA, 314 bp, Zea Mays
cgtatctggacttaaacaattctaagtaccgacgaattgcatggcttgattatgaagctgcaaagggcacttgagagtaacgggaagtcgtccttgcaactccagggtcttcttcttcatgtgaggaatgttgtagtgctggccgccattttgcttcatgatctccatcatacaaccctgctgggttaggaaaattcggtttgatctatccacaggataattctgatatgactcatcaacctttctgagaatttctctaatgttgtttggtgtacctttctcaaacaaagattggattgcagcaaaaaatccaa

SEQ ID NO: 200516 - DNA, 300 bp, Zea Mays
gtccgggaagcctcgtcgatgggtgggttttgggagacccggcccaacccatatattatactgggtaaaatccgaatgctgtcgccggtccacgtgcatgcatgctgaaaaatcaaaccgatgaattcaggcgacgagcgagcgaggctgcggtcccggtggaagaagagtccagcctagctgccttgggaatggaggaaccctctttgatttgcctgcttgtgctccacgtacgtatctgtgctcggccgcgcgtgcatgcaggagcacgaatctggatgcacgcagccagagatgtcc

SEQ ID NO: 200517 - DNA, 485 bp, Zea Mays
ctgatatatctgatgaagacgaaggtgacgacgatgaactgaaagaaagcataaatggttcagaggatgaagctttagaccagaatgaagacagcgaagaggaagacaagtcaaaaggcagtggctctaaagcgcagaagaggaagttaaatgattatattggacagctaagttctgctgatgcaagccttcgagttctgaagaggttagcaactgccaagaaggctgaagttccatctgatgaaactggtaaaattctatccgatgaagatttcaaacgcatcaaagaactcaaggtatgtggattttggatggcttatagatctacagtaaattttttttaaagctaattttggcaaaataaatttgctcatattctgatcttagatggatcattgatgtcctaaccgaatatatttgtgtttcaggcaaagaaagaggcgaagctggctttggctcagcatggactaatcaagggtggcgac

SEQ ID NO: 200518 - DNA, 401 bp, Zea Mays
attggaccacctcaccaatcggaaagaatgacgggtcataatgtccaattacgacccaacatacctgcatggacacctccacccccatatccacctgtgccatatcagtatacatacatgccaccgccatatgtcccgaatcaaatgtggggtatgccaccatatccatttgggatgccacagtaccccgcttggggggcaccctatggtggacagatatcccccgggtccactagaaggtaagaaggcctcgcgagaggctttaggcctcgctagaccatctcttcgtgggccaggagaaaactgctggcggaatgggccgacacgagaaagaagcagacttaggcccaagcgactcgcgggacttaagcgctatccacagcgcccacccgactttccca

SEQ ID NO: 200519 - DNA, 329 bp, Zea Mays
ggagcttgttcatggtcatggcggcggaacgtccctggagatcacgttgtggacaactaacggaattgacgctaaaattgaagcttgagggagcttcacgggttcactagagactatgcacacgattgaatttaggccgaacgagggtaggaaagcgagtcgacagagagggtgtacgaggcggtgttctacgggactatggggtgttccgttgtttgggctttggtaaaattcaattggccggcaccgagagcaataggaggctaaagacaagctagaacaagagacaaatgggcgagtactgacccgaggagggctgcccatgaagg

SEQ ID NO: 200520 - DNA, 382 bp, Zea Mays
ctgaatttggttgcacacttatgtctgatggttggacagataggaggggtcgacacttgatcaatttccttgtcaatagtccaactggcacatttttcttggagtctgtcaatgcctcaagtgagacagcagatgctcagatgttagctgcactactggagaaaagaattgatgccattggtagagacaaggtagtgcagattgatacagataatggggctaacttcaaggctgctggaagacttgttttggactccatgtgctgctcactgtttggacctcatgcttgaggacattgggaaaattggagagttcaagaaatgcatttcccatgctcgccaagtgacaaccttcatatataggcatagcaagcttcttgatg

SEQ ID NO: 200521 - DNA, 1861 bp, Zea Mays
tcttgccattcgctgggtagctgctgctgctgctgcggggacgggatttctgggttggatgagatgaggaggcgctgcagctggctctcgtctttgttccgccctcgccgggctgaccgctcgctcccgcaaccagatccacagggtcccgattccgagcccaaggtataccagtggccgctgcattcgtctcttgctgtggatgtttgtttgattgtttcggtaggccttgcagtatataggattttggtgatttcattagcatagccaatcagctgttgatttggtttcccactgaacaaagattcaaggtgcgtgtgttgcaatcggttgtacatatttcacctttgctggctgtttatttagggaaacgacggcaaccattgaagatttgtggtttcctgtttttttttgggagtagatctcactcagctgaagtcgtctctatcaatactggtgaagcctcctagatccaaatgtagcccattgggtttgggagattccaagacatgttgggcactcgagtgcagtagaccatgcagaacttttgagaagatcatacataactttttcgtatgttttagctgaagcatgtgccagctgtgtcgatccatcagcgattacttcaaatatcacaactatcctcctcgactagaaaggcctgctatgtgcagaaggtgccaaaggcttagacctatcttctcatttaatgatgggatgttctccttttatttgttgtttgagcaagtgttagttctggctgtgttagcgtgttctgctgtaccgaggatcttcctcttgttttgctcttcttaatatagtgatgtgcagttccctgcgtattcgagaaaaaaagggagttgctaaaacactataaggagtatacaaaaatgtttgtgctccaacagttctctatttattggtgattaatctttaaagttgtccacgccaacaaaaaataaatgagcctattttctatttttaattgagctggcgatagaaatttgtatcaacaacctttcctagcctcttgggaggtcgaagctgtcgatggaagaccagacggtcacggcgacaggcacacgccatccacataggtccttgtggcgacggcgtgaaggcagcacaggaggtgctcttgcagcaccttggcacaagaggttgtctggcagtagcggcgtcaatgcgtctgaggcggtggagatggatttggggtcacggggtggtgggacggcgcgaagcggtggctggagtatgctttttcgcgtatgacttagcaccaacgttgatttcgggagtcccaacgaggttggtaaatgtagggatgaaactgagttttgtagggagtttgtaaattcagggacctgctttacataactattggaggagagtttttcttgaaaacttcttaaattcatatttagggagttttttacataactattggagatgctcttttgagatattattctccatttttatgttttctgctagaagctttgagactttttgagcaaatgtggtttcctgagatcaacttttctatataacttaatatattatgcatattagattatttgccaaccatggcttcccatgttatgccctctgtcgtgattgtaagcacattaatattttgtttcctgtgcaaggctgagcaggcaatagataagcacagtgcttctgaagaagttgtaatggataacattctgccaaacagtgatttttctgaaggtttacatttgtggcaatcaaatagttgtcatgcatttgtagccgttgaaggatcaggttaccattatggtgtaaggccacattcagggtcaacctatgctgttcttactcatcgcacacagagttg

SEQ ID NO: 200522 - DNA, 389 bp, Zea Mays
cttcgatcccctccattatgctgaccctactacttccaaataaccaatacgaacagcctgctgcctttactacattgctcctcgtagaccagacacctgagctgacgaaccaaacgtacagtgccaaaggaaggcacacccaacagacggaacatccacacgtacacttcacttcaactgactgcatgctggaggccgtcgcagcccagccttcacgtattatccatcgctggaagacgccagccagcaaacagctcaaaaggagccacggcatatcatacgcacatatagccacatctccaacaaaccatcatcaccagaccaggggaaaggaggggaggctacctactgctacccacccaaaggtccgaactgctacacatcatctc

SEQ ID NO: 200523 - DNA, 325 bp, Zea Mays
gtgacaaaactgatgaagatctcttcaacgcttccacaactgtcacggtaggcaatggaaaggtggctgaattctggaagtctagttggattcaaggccaggcccctaagaacattgcgccttcattgttcaagaagaccaaaaggaagaacatcacagtggccaaagcgctcaataacaacaactggattcgtctttgctcaccgtatacgggggagggggagtttggagagttgatctctctttggcgggccataggtaatatgcatgagcttaacgggctagaagacaccatctcttggagatggacggcagatgggcagta

SEQ ID NO: 200524 - DNA, 307 bp, Zea Mays
tgacactacaagctctgagttctcctaagagggatgcacccactctaaggatgcatgggtgtcccttggtcatgacaacatcacaaaagacttctctttacctacattgagccacctacccttcttacagaggcgaccacattcattcatgttgccctcggttttgttgtgctcttcctcccagttaatttatttgtgtcctcaagttgtgccatgatcatcaggtgtggttcgcatcacgagcttgactacctctactgtccagcacattgtgcatgagggagttgagctctccttagattggcta

SEQ ID NO: 200525 - DNA, 337 bp, Zea Mays
ctcaaatacttgctcgaccagcgccttgccacgattccgcagcaccattgggtcggcaagttgctgggattcgacttctccgtcgagtaccggtcaggctctacgaacacggtggccgacgccctctcccgccgcgacactgaggagggcgccgtgttggccatttctgcgccgcgctttgacttcatcggccgcctgcgtcacgcccaagctaccgatccggcactggtggccatccacgacgaggtgcgccgaggcacccgcaccgcgccctggtcggtcgtcgacgacatggtcgcctacgagaggcgcctatacattccccccgcctctccac

SEQ ID NO: 200526 - DNA, 1038 bp, Zea Mays
gtcatgttgtcattgctattcttgaggtatgtattagagcttcacttgttttttttcttctgaaaaagcatttccttttattgctagaaccgaagtgccttcaaagtaaggcaaatgcttatgatactgttcacagaaaatcataagagtgacgatgcttcgttcttgttagtaggaaactaggcatacttttagcacttttatctagtcatctgccatgcagagtgaataatattattctctagcagcctgaatgcatgcactgctattggctaatggctgcgagttttgcatcttttattaatagcttgttcaactgttgacccctttgttatctcttgttctgcaggatgctacaatcagatcctgtgatttcgccacggagcagacacttgtgctgcattcgcctgagaaaaaaacagatcatgtttcaatagatactgaagtccatcttgcattgacacctcttgagcctattgtattttttggtttccacaaaagaatgagtgtaacaggttactctcttagcttggcaggttaccttttgtgtttgcttgggaggcttaaagtgatcctccatttggttttgtttttacaggttgtatttccacgtgttaacctcttgttttgttctagttgtagggactgttgatggagggagaccgccaacaaaaataaagactgatcttaaaaaacccattgttaacctggcttgccatccccgcctccctgtcttggtaaacagccatatctttacttttttctgttttttgattttatgttgtcatgtttctgcctttacgcatttctgaccaagcttatgatttagtatgtagcttatgctgaaggcttgatacgcgcctacaatatccagacatatgctgtacactataccttacaacgtaagatgcgatgctgtattttatattcatatgtttttttgtgattttccacccatcggcttcttaatcgcacaatgtttcagttgctgttgacagtacaattaagctaattggagctggtgcttttgggtttcac

SEQ ID NO: 200527 - DNA, 332 bp, Zea Mays
tgtaggtgtactcagcccacggcaaccagcgcagccattggcgggggcgatctccagtgaagcagcgcaggtacatcactatgactcggttggcggcttccgtctggccgtccgactggggatgaaaagcagacgtcatgtgaagcttagtacccataatcctcatgagctcctgccagaacgtcgaggtgaacacggggtcacggtcggagacgatggactgcggaacaccgtggaggcgcacaatgtcggtgaagaatgcctgtgccaccgtctctgccgcgtacgggtgcgcgagtggaatgaagtggcagtacttgctgaagcggtcc

SEQ ID NO: 200528 - DNA, 369 bp, Zea Mays
atttctctgcaaaagcattatatctgactctaggtattacatatatccatttttttgaggtggggtgggggttgatgttaatgctctactatcaaggtttttattatatgtccacccctgggcaccatactttatgctccaagttattttattgattgtacctaccttattgtggacatctggcctggcaatatgggtgatgcaagaagcatatcattaaggttaaggtgtggttatctgaatcttagagatataattggaatgtaaattgttaggtggtggcttgttggttaagttagccgattgttaggagatttgttggttttggttcactacagttgttgaggttggttgtaagcttgatttcat

SEQ ID NO: 200529 - DNA, 382 bp, Zea Mays
cgaatcataggttagggctcaaaatcggggcgtcgttgctctccggtgtggttgccgccgtgtatggtgtgcgcgccgtcgcggcttggagcaaggaggggaagaagtccagggaccgttggatccctgatgtgggattgtggtgtgaagaggtgatcagccgttagatcggctacagacgctcctgatctgacaatgaataccccttcagctatttaaatcctaaccgtacatattaaatcgagcggttctggaaggtttgggtcatgcgctattgttgaccgtcggataatgatctagcggtccatatccgataccggttcgatgaaaagagtgatctaatctcgtgggtcggttttagatccgacagccctgatcgatc

SEQ ID NO: 200530 - DNA, 1076 bp, Zea Mays
agactctaatgtttgtgcaagtcaacccagatgtttcatcatacactgagactttaagtacactgaaatttgctgaacgtgtatctggtgtagaactaggtgctgcaaggaccaacaaggagggcaaagatgtcaaagaattaatggaccaggtaatcatatatttttcttttccttcacttgctagggcgattgatatgaaacagtagatgcaaaatgtcaaggtcatgagttgacttttagacatgcaaagaaatcaagaataccatgttcaatatatgtcatctaggtggctgaatttgatccagaaggaaacattcagttgttgacatccaacttttcacctgcagctttcactgctcaaagataccattgcaaagaaggatgatgaaattgatcagctccaactagccaacagtagcaattccctactgaagtccacgaaacatggtgactccttgttgaagcattcggcctcttctccaggaatgacatccttaggaaaagtggcaagctttggtagcggggcagcttctgatcttgacaactgctctgacaccagtgataggcattccgaagctgggtccatgctctctactgacgaggcccgacagctgagccagaactcggctgatcctggtggtgattcagatggaaggctaagtgatatatcagatggcggtatacccgcgggtgcagaaactgacagttcagcgaacaacgttgtggaccaagaacaagacaaaacatccgctactggaaaagagcggttgtgagtattaccagttctccatgatcttagagctaataatattttctctcatttgacatttagctcttgcaaattctgcggaatggtttctggccttggctgttgtctgtaacttcttcgttctttctcatgcagagccaaagcagtaagtcgagtccagaagctaacagtacccaaagtcggccaagcatcaagcttgaggcctaaaccaagagatccttctgctcctaaatcttcaggtaagatacctctttgcacttctgttacaatttaatttcatgggaatgctaatcttgaggagctg

SEQ ID NO: 200531 - DNA, 357 bp, Zea Mays
gaagaaagaggtacaagggtcaaaagtgacccgaaacacaaacacccccccccacacgcctccccttaaatacaaccatcgcgccacatcaatgaagaaaggcgaccacaacctatacaacctacagagctaactaagttccagtaggaaccgacccaaaaacaagttcctggagcttggcagctcccgccaagcaccaaagcccaccctccacattaacagcttttagcacttcctcaacacatggtcttgaattgtcaaagacacacctgttgcggtgtttccgaatctccccaagccaccaacgtaattagagaattgaggcctctacgaagccccttgggaacaacagcaacg

SEQ ID NO: 200532 - DNA, 362 bp, Zea Mays
gaaaaagacatggggatgcgggagcgcagaaagctttagatttggtcaattcacacaaagagaccatcacgacagctcaggaatgcactgacatggtttacagtgaacatatcctggacaaaaacagaatagagaagcaaatgaattcacatgccaaagaagatattaatcaagacctaatcttgcatgaacaaaatgatgagaaaacaaattctcatgaggcggagactcctgtagctgagtcaggtgactgtgattctccttccaaagcaattgctagctctgagaacatcaattttcagggcaaggtcattgaggtatctgcaagcagccatctagaaacagtatgctcaaaatatgac

SEQ ID NO: 200533 - DNA, 595 bp, Zea Mays
catatctgatatcattgaaagcctgggaatattcttctaccccatgctgttgtttcacattgaccagcgctctcatggcatgagggtactcttccaccccaaacttctccctcaccgcatgggtgaactgctcccagtctcccaaaccatgtttcagtttatacacctgcagccacttcgacgcatttccctccatgtgcgtcgaggcagtgcttgcccagatccattcgggcacctgataaactgtgaaatattccacacacctatcaaaccagattcctggatcattcccatggaacttaggaaacgaccacttcggtagagaactgggcctgaactcccttccttcaccccattgctccctccgttctctacctccttccctgccgaatcctccgcccctctcatccccgcgatggacacggtgttctcgctcagagttggattcgttaccttccaaatccttcgccagcagctcgagtcgaagacgcgagacagtctgctcggtctcctgcagttgacgagccatgagcgcccgatcctcctcagccttcctctgaccgacctccatcgcctccatcttgcccgtcaggcg

SEQ ID NO: 200534 - DNA, 394 bp, Zea Mays
acgaacttggcatacgctttggcataaagagtgtgaatggttgtcatgacaaggcatcgttttactacatcgatttaccttgtgtatgtgttacgtctctagattaataaaaaacactagttcttttctaatattctatttatatttatgctttaacatgttattagtactgtgtttctctatgcacttgctcgaaagagaggcacgggccattccataggagataatgccaggcgacgaaaggattttgtgtcgatttgttgcttgttctgcatgaggacatcagcactgacatcgccaaattatgatgtattgctgcttatcacgcccaattagcgaagtcggctcgacagtttagccaagttaggctaggtgggcaaggatttttaactgg

SEQ ID NO: 200535 - DNA, 480 bp, Zea Mays
taactatgtattccttgtaatggggtcttgtgtaatgggcttaggcccaacaactctaatatatacatcacccaacccaagttagggttaaggtttacaaccttcaaaatggtatcaaagctaggtttagcccccctctatccctcctacgatcaccttcgtgtattttggtgtgcctcctatcctaatctttctgccattgcccctcataagcttgcgccccgttccactcgttgcatcttccttgggtactcctctgatcacaaggggtaccggtgcctagacctctccactcaccgagttcttgtctcccgtcatgtcgtcttcgacgagtctgacttccctttcttcgtatcctcttccgctgcctcctctgagtaggacaccctcctcgagtgcggattctattgctctttctgtcgtgccacacgtggcctcgacccctctcgcgctgccacgtgtggccccggcatcccccgc

SEQ ID NO: 200536 - DNA, 333 bp, Zea Mays
cctacggcgacggccaatcctctccgctagactctctctgtaggcagtggagggttgtgaaatttcagcacacgagggtcagggaaaagcggaggcacccagggggctttatcccctggatgaggtgtacactaggtcggctcccggttctgcgctaggtggttgcaacacccagccgaggaaaggggaagaatctagcatgtgggggctacctgacagcgtaatgaggcgcgcgagctagagggagcttggagaacacgggactgccacttcccctatgggcccgcgtgtcgatcaccggggaaaattgcgcgagcagagtcttacctgcac

SEQ ID NO: 200537 - DNA, 323 bp, Zea Mays
caccatgaagtagagagaggaagagagcaaatcacgttaccggttgattcgtgatgtcaagtccccggtgggcgacggggggatcaacaatattattcgcacgtggttgtggcctttccaagcggggagatccaccagtgattccccaattgctcgtcggagtactttcaacaccgtgatgtcgcgggtcgtcgtgggccggctccccggaactcgattgccggtaaaatcatctccacatctttcaccttgtgcttctcgtagcgtagcgcccgttggtttgcgtattagagcatcggggcgccggtcgtggccacaccgac

SEQ ID NO: 200538 - DNA, 499 bp, Zea Mays
ctgaatacaaagctattgcaaatgccactgctgagttgatgtggattcagtctctattgaaggaactgaaaatttcttgtccccctacagcaagaatctggtgtgacaatattggagctacctatctcacagctaatccagtctttcatggtcgtgttaagcatgttgaaattgacttccattttgtgcgcgaaagagtggcaaggaagctcctggatgtgagagtgatttctacaaatgaccagatagcagatggttttacaaaagctctgacgaagaagaagatggatctgttcagagacaatcttaacttatgcaagttatgattgaggggggatgttagataatattaagaatgtatctgtaaagtaaggaaagggtgatgcgcctgtgtaaagataggaaaggatctgttcaggatctgttcagttaggaaaggatctgttcagttatagatataatctgaggcaatcaatcagatctgttatagatagaatcc

SEQ ID NO: 200539 - DNA, 548 bp, Zea Mays
gctgaggaaaggttcgatgataaagtcgaacacctggtcgacaagatgggacgactcctcgccgaagatgactggcttgaaaagaacaaacatcgtctgcgttcaagctacaaagacaatggtggcgacacgagcactggttcgtcgaaagggaaatcatcggcacatcgcgacgggaatgtcactggacaggtcaagctgacctcctaggggactccacgtcgtaaaggcagatgtcgtaactgcggcatatatgttcattgggtggaggactgcaaacgcccaaaaagagggaagaagaaggaaccacagatgccagaagtgaacatggtcgttggcggagctgaacacaatggcgctctcatgatggcaacgtgcgacgtcgtccacggaccatgccaacatgttcacctgactgagaagactacaccggagttggtacctgacgggatgtgggtactggactccaaagctagcaatcacatgactggtactcgatcaatgctgacacagcttgatccgagtgttcgaggcacagtgcggttcgg

SEQ ID NO: 200540 - DNA, 591 bp, Zea Mays
gtaccaaggagtctttggaaagctactgtgcacatctcttgttgtcaagggatgtagtgtattttgtcaaggtagagagcagagattattccatgtaccaacctcgttcacctgctcaggtatatttttctagatatatgtgtgagtaaatcatgttaatattttagatgattttgacaaataagattgcacatcttttattgtggtaccatttcagggtactgtgtctagttgttcttgtgataactggaagtttatgtccatggggcagggccacctgtagtgcagtcaatctatacaaactttaattcttcctggaagaacatatttttggggtcatatatttgttttcatcttattcatctagcttcacaattgagtgctatatactatgtaacgcccaatattgcaatctggcatgtgtctttagatatgtatttttacttatgtatatttaatgactgcagatttcctaaaattactcttattcattaatacctgcattgttgcattgcttttatttgcttttatctggtagtaggtagaggaactcctacgacggaagcttgctaaagaggccgctgataagga

SEQ ID NO: 200541 - DNA, 577 bp, Zea Mays
agtgcttttgagaggacgacgaggtcgatcgtagctcgatggtttgtgccatgcacgatggaacacgatggattatacaggttcgggccgcttggatgcgtaatatcctatgtcctgtgagttctgagatgtatattgctggtggttgaggattaccggtgatttctggaagtggaagatggttgcggtatgagagtcccctgtttcgtaggggttccctcccagccttatatccgactaaggggagatcaccccgcacaatctcggagcacgattcctatctaccgactttcgctagaagcgcgccacgccttccggtggttagttggtctttgcgaggcctgcgcgtacactacatgggcaggacacgatcttgggaacatttgcgcccacacgtgcgtctcgttcggtcgtcttcgattgcacccagctgagggccactaggcgccttacaggcggcccattgggggccttgtaggtggcttacgaagcataacaatgccatgatgactcaagggatatctatcctccacaccactaatgcccgaaggtggattgctttagcattctgagcact

SEQ ID NO: 200542 - DNA, 273 bp, Zea Mays
atcgaaatcgccatgccgcatggtcacgccgcagccgtggtggaccggctgctgcgcaggctggggtccgccgcttgccggctggaggtgcccccgaatatagacggggacctagcgcatgtgtggacaactctggcgaggttgcaagatatgctggttagcctggagatccgtccggagctgcaagaatggatgggggatatcaagcaggtcgcgtacgatgttgaggatctggtcgatgaattggaagaccacaatagcatggaatctcag

SEQ ID NO: 200543 - DNA, 276 bp, Zea Mays
aattattcccctactaggtgttgttttatccgttggactaatattggtaccaccgctgatgctagtggtggtgtaggtgtccttgtgaactgccttactgatactgttggttgtggtttcctaacaagcggggatgactagtgctacctaattgtggcccatttagcttgcattttctgccctccatcacctgacacttcctctatctcattatggcccagtctatgaggtgctagaaggtggggaaggtatggttcataagctagtagtgaacag

SEQ ID NO: 200544 - DNA, 424 bp, Zea Mays
gtttggcacaactatagttttgatagtcatgttatagagaactatggaattaaagttgctggatttcatgctgatacaatgcatcttgcacgactttgggattcttcaagaagaacagatggaggatattctcttgagggacttacaaatgatcatagggtcatgggtgttgttccaaaggaattacaaaagattgggaagagatcaatgaaaaccatctttggtcggaaaaaaataaagaaggatgggtcagaagggaagattactgcaattgagcctgttgaaattttacaaagagaagacagagaattgtggatctgctattcttcgttagattccatgagtaccttgaggctttatgagagcttgaaaagcaagcttgaaaggaagccctggacttttgacggttaccccagacccggag

SEQ ID NO: 200545 - DNA, 1174 bp, Zea Mays
cagaggatgttgttgagtttgctgaggtcttcaatggacacatatttgtgaatgaaaagggtattttcttccatattgttgaattttgttcatgataatctatatttaggatgtgcagcttttatacattttaatttgatcatattgtgccaacttcagcagttacaagcactgactctttagtctctttaatagcaaaaactatttgtccttagtgccatacccatttcattgttcagacttcctgtgatctaagtttattatgggtgcacgccttatcatttactatgtagcatcacaaacacaaattgatgttatatcttgatgctggattattcacatagccattaaactgaaagttgtatatgactgggtctagttatagtttgcttcctattggttgggcctaagttatagtcagctttctagaatattgtctacttgacctgatggtgtataggattctgttttcccttggtgagtgtggaagaagagatcaatagaaacacactagtaaaaacttgttatgaagtaaattttgaaatcgaattggatgtacttacataaggtcacaacattgatagcacgtgaactatgtcatactgacattaatattgtccttgacgttatcgtgcttgttgatccaacttaggtcagcgctagaggtggtggctggaagcaagaacaccatatgttggcttgataatatttcttgtacagtgtgttatattgttatgctgaaacagaaattaactacttagtgtctgaatgtttggtgttttttgcaactgtagaccacatgtctgaagttttttttgggggagtgccatctatgtttgctttgtgtaaattgggtctcatggatgttatttatggttgtcaggtgctcaatttaaagctttcgtggaatatgcaccatcacaacaggttcccaagtcaaatgtcaagaaggatggccgtgaagggactgttacgaaaggtcctaggcaatcactttacctaattctttgtcaattgtattgttctatcatattaccattttcctaaacttggattttgtcattttggaattactagatcctgagtacttggagtttcttgagtttatttcaaagcctactgagcatctacctagtgctgaaattcagcttgaaaggaaagaagccgaaagggc

SEQ ID NO: 200546 - DNA, 281 bp, Zea Mays
ctgcgggggatctcctggatgcgtcgtcctcggtaagaatacctctgccgagatctcaataccctcctctatgtgtagtagcaatcgggattcgggttggagcacgaaagcactgggcgccgctcgggggagtggggctcggccttatgcgccctggccgccaccacggtgtagcgtgtgtggaagcctggtgaagaagactagcgccgccgtggttgtccagctggttgggaagaaatccctttggccgttggatcgagatcgcacgtattaaactgatc

SEQ ID NO: 200547 - DNA, 315 bp, Zea Mays
ctgaatactgttgactgtgggggagatggagaaagcttacaggggaagtaaaaggtaggtagcccgaggctgtgtgacgtttcctttagaaacctccattgctggctccccatcctcttcctgcttcatggtttcacctgctgccttctccttcctcgattgccgcagctgctatgggaataccatctttctacaaatgggtcgtcagcaagtacccaagcatcatctcccctgtgaaggacgaaccagaggagtgccctgatggcatcatctacgacaacctctacctcgacatgaattgcatcatccattgct

SEQ ID NO: 200548 - DNA, 321 bp, Zea Mays
tgaactgtggactgccatcaacaaacactgcgtccttcagagagagaatacaaaaacttttgatgcatcatcccacagttaattcagtagatctctattaaggtccatgctaatttccagactcgatgctaattcatataaagcaagaggtctgaccataactaagaattataagactgactgcaacgcatcacccttcccctcccctacgctattactgttcatcggataggggctacagtctccccctttctcccgcagcggcgagcgctacgctctccccttcctcgcgacactcttctctctcacgccagatgcagg

SEQ ID NO: 200549 - DNA, 322 bp, Zea Mays
aggctgcaagaacctggtcgaggtcgacctcagccggaacgcgctcactggggagctcccatggtgggtgtttggggtacctctgcagcgcgtctccgtctctggaaatgcactgtcagggtgggtcaaggttccccgtgatgctgctgccaccctggaagccctggacctttcagccaatgctttcactggtgtgatcccgcctgagatttccacccttgcaagattgcagtacctgaatttgtcctcaaattccatgtcggggcagcttcctgcaagcattgggctgatgctgatgcttgaggtgttggacgtgagtgct

SEQ ID NO: 200550 - DNA, 2032 bp, Zea Mays
ggcggggcccgtggagcgtgacatcgagcaggtgcatgccgctaacccttctctgggtggatcgatttttcctcccccgtccctggttccactgcgtgtgcaactgagatgaggattggtagatcatcatccaccgcttacgtctcctcccgcgtggcgcggatcgatttcccctcccacgagtggattgaaagatcatcatctatcacctacgtgctctccgcccgcgtggcgcggaacttcgggcgagctcgtgctctttgtgcgccgacctgaaatggtgcttgattacggcggaattcatgggcgttgtgctgtttttcttcttcttatgtgctacaatggagctcagtctggatattccaggccgctattcccctttctctgctgaaatcccgggagctagaatggtggttgacttgttggtcgtccaaccactaattcgggtgtttagaggtcaagctgggactattatacttcccattccctgttttctggagctgaggggatcagtcatcagtgggatgctttggtgaacagcagattcattctgggagcgagggctcttagttgatagtttagttctttcacttgcacgctcgtgcgttctcttgctgtgttggccttggtgctgtgcttgttcattctgttctagctgctacatgacactgaaattgggtgagattttgatggatgtcggattgggtatcatggatttgtgaagaattgtatgaggatgattgttgtggatttgtggttttttggatcaaactcctgtatattttagagaggcatgtccgacccatgccttgcaaacggacagtttaagctgactctaccactgtagtcatatactcctatttttggcaccaaggagggcgatgcagtgtgggggtttggaatcaagcgatgattgatttgtttttttctttatgtacaatatatgtccaacattctgtttgtggcaaacttattagacagagtgaagataaggctgggtcatgatacttgaatacaaccagcatgctttagttgattacgccgacaagtgacaaaatggcattttcatttgtttcttacccaataatgcattcacatttttttttctattaagggtctgcattgatcataccagatgatgtgtaacgtaagagctgctgggcacactgatcaaaactctgtttcagttctggagtttatagtgagatgcttcataagctcccttccaagtgcatctgacaagatgctaataatacaaagcagttaaaaaacaaaggcgatacaggaaaatgtcatgcataactgaaaacatcacaatcattgatatattcttatcaaaccagcaagcttagtggctgtagttgcagtcatcactagaactcgactagtgtgatagggtttcttttggttttattctttgttgtcgataggaaatcataaaagaaatgcacacatatcagtctgatgcttactgaaaaaggttgatatgaagcatgagctgtatggcgtcagcagcaaagcaaaagtagcaaaacaatgttcaatgttccatattgtatattgaaacattagcgctggcacttgcttttgtacgtctctagtgttctgttttattattattgttgttattattatttcatcaatattataaaatgagtgattcacctctggtctgttttatatcttcaaaatgtaagtatggaagttgcatgctcctagttgcttgttttttttcatatattgatgattggatatgttgatatttgaggcttgacagcatccttttttcaggctatcactgctctcaagaaaggagcatacttactgaagtatgggcgtagaggaaagccaaagttttgtccctttaggttatccaatgtgagtcttatttggactctccaacttaacagtgtttctgtgccttcacaatcacctggcttataaggtgtattttatacgtttttggctccttcaggatgaatctgtactgatatggttctcagggaaagaagagaaacatctaaggttgagc

SEQ ID NO: 200551 - DNA, 350 bp, Zea Mays
ctcctccacgtgaagatccaataatgaaggcagatcttcaggattatcacaccaaacactcagtttgaacgtagacagatcagaaccgccaacagaatcaaggtgcagctcatgaacaaggcaatgtccgtcgagaagttgctcggctgtgtgcaaaccccacagatgaaacggaagtccgcggagctcaatatcaatccgatgaggcagcgtccctcccccattagccatgaactgacgggaccacctcttgatgtgcatccgaagaggaggaacgtagaatgactgacctccactgagcatccgatcagccatctccacgttgggaagcaaggcgatgaaggtgttcg

SEQ ID NO: 200552 - DNA, 294 bp, Zea Mays
cataggtatctttacttgattttccaatgtgtggaacgtggcaacttttagaatggggaagcgcttcttaagcacccccaaagccctttccacatgattcctcagtagtgcgtggcggtggttgaagagctcctttgggttctgtggtcttcgatgtctagccccaaattctttcaagtggtaccgaactcctcggtatggagcaagaaaagatggagtatttgcataccctccatcaactagatagaattttcctgaaggtacctggaaacccttgctcatagctgatcttag

SEQ ID NO: 200553 - DNA, 302 bp, Zea Mays
tcggctgtcacttctaaaagcaccgacaatcgccagtaatcactcggctgtcattcctaaagcgacaacgtgactccaaaggattcggccgctaccgctaaagcgctgacatcgcgaagaaggcagtctgaagcacgactcgacgattctaagtcgctattcaagcgttacatccaagaacaacatctgcagtaagcattaatacgatcgacgattgacaggaaggcaaaatgatgcacacagaattgggcgaaatcattcttcattataaaagggaagcactaccgaacttacaaatcaac

SEQ ID NO: 200554 - DNA, 520 bp, Zea Mays
cgacgacgtgaatgaccaaattgaatcttgggaaagcttcacaggtttaccagagatgacgcacatactaaaatttggactgggcacgaatagaaatgtggggcgacggagagggtgtcgcggcggcattctacagagcaattgtgtgttccggtgaaaggcttcgaccgaacttagattggttggtactgagagcaataggaggctacaaacgagctagaacagggagtaattgggaagttactaacccgaagagcgctgaccatggtggagtcctttacggcggagttaagaacagaggaggagggaatttgggggctacgtgagtgctccggtgaaattgagccgattgctcagtcactgaggtgcgggatgtggtgaagaagcagaacccgggcgcaatttataggccatcgaccggaattggatgaggatcgcggattttagattgcgcaggcgagctcaccgcgcggcggaatccggtgatggcacggtggccgccgattaaccggggcttgcc

SEQ ID NO: 200555 - DNA, 462 bp, Zea Mays
ggacgatctgctggatgcacttgacaatctggaaggtggtggagctgtcgaggcccgtggagatctcgtccatgaatagcaccttggtcgggccgaccagcatctcccctgaaaccaaacacgcgcggttgtagcaacggtaacggaggcaacagcagacgcgcggatgggtttgaggcggatgaaggagagggaggggtacctgttgtgaggcgcttcttctggccgccggagatgccgcgcattagctcgttgccgacgatgatatccgcgcacatgtccagcccgagaatctgcacgcaccagcggcgggtatggcgtcacagccgcggacatcgctaaattggtccaagactccaaggttagggatgcgatgcgagcccccgtcttgtcggcggggcaagcaagcgaacaccttgactgcgactgcgatcgaacctgcaactaactgctcttcctagc

SEQ ID NO: 200556 - DNA, 578 bp, Zea Mays
ttgagctgctgccatgcaaccagaatgcggaggagaagaccctacgtgaacatccatggaagtgtgagagagagagaaccaactcggacaccctcgggggctgggtcatagctcgcgctacccatccgagccggatcatccccggcgacaccctcgggggctgggtaagcgctagcaccatccttgaaggccaagctctctgtaacaaccacctctaaggctgaaggaccttaaaccacttccatgggagcagagcaatccagaccagcctcctgacccttaagaccgcgctccaaggtcgatgaggcacgggacgccgctcgggatagctccaacccggcatcaggcacatcagcgcaaacttccatcattccaccatctgtcggctctgacaacagatcttctaggaccatgtcttcaagagtctgatcaaagtttgccagagacaattcttgcagaccaatgagggcagacaaagctggagaaggaacaccactactttccccgctggctatgtagcgccgactgttcttccgaattagagggatttcatcctcctcttcctcatcttcatcaac

SEQ ID NO: 200557 - DNA, 352 bp, Zea Mays
cacggatcaccggccgccaacaaacttacagttcagacttgtgttctgtctattcctctcagttcgccgccaccttctcctagtgtaagccaatacttcttattacagtctgttacaaggccacttgggccaaataaacttagccactcacagctcgggccatatcgctctcttactccttctgagcccgtcgaggcctgcttctggcttcacatccttctcctttcccgcactggtattcttcgcttcttccgcgtcctggttgctgatcaccgggacactgacaagcactgctgctgctccggcccgcgacgtgacccgtatacgcccgcgccagtaacacctgcacgcc

SEQ ID NO: 200558 - DNA, 296 bp, Zea Mays
cggtgttgctcctggtacagctcacgtcgcggctctgttccgaccgcccttctcagatgggtcgcgacgctctccggcagacttcaccacagcagcaaagtttctatatcagcttatgagacggacacttctgtcgcggatggggtacagggaggccaccactcatatccagctctggctccttggtgccctggtctctcactcagagtttgatgttgtggatttccttatttgtgagatcaaggacaccgttctggatggtctgtgtgctcgtcgacagctgtcatatgctcact

SEQ ID NO: 200559 - DNA, 569 bp, Zea Mays
gtgggatgaattctgttctggattgtataacagatttggaagggatcaacatggtaccttgattcgacacttctatcacatataccagcagaactcagtggtggaatatgtggaacagtttgacatgctgttacatcaactactagcccatgaaagccagttgacgccaatgatgatcacttccagatttgtggatggtttaaaggatggtatacgggctgtggtggccattcaacgcccagccgatctggacacagcctgttcgctagctctattacaggaggatatgttgacacaacccaatcggaaggaaggcaggagagtggaattgggtggttatactagaccctccaatccctccatgaagactgcgaccatggctggacatcaagtatcagttaccacaagtcggatccatcccttgtcagaagatcgtcgtaggccgtctgggagcgatggaaggacggaggatcagaaacttgctgccttgaagtcctacagaagagccaagggcttatgttttaaatgtggtgaaaagtggaattataatcaccattgctctaacagtg

SEQ ID NO: 200560 - DNA, 525 bp, Zea Mays
gtggaagaggaggcggagacggggaagttggactcgttgaagacgacgtgatgggagacgatgactctgtgggtggattgtggagagtcaaggcacatgtaccatttgtgatcaggagagtatctaagaaagagaatgagtggagcgaggcgcaagcttgtggatggaagtggtagagagattaggatagcaggcgcacttgaaccctcgaaggtggttgtaggagggagaggtgccaaagagagcaaagaagggggtggggtgacgaaccgccttggtagggaaacagttgagcagataggtggcagtggccagcccctcggtcgagtagcgagtggaaagggaggcctgaaataacagggagcacatgaacgccgttcggggaagaagtgtaggagcacgacatcctcagctgaacgccgtgagaaaggaagaagtcgcgggacgcggagttatcaaactccccgcctgttgtcacactggacactctagatggtacgtccaaattgagtggaaacccaagcg

SEQ ID NO: 200561 - DNA, 447 bp, Zea Mays
ggttaatgttgttcaatcttctcgtggtcttagtgtgaaaacaaaattgcattcattgaaaataatggatgagctacaaggtcgtctttcaatgacttcaaagtatttagtgtgctctgtcatcaatgaaagtgttggagctacctcttccgatacacttgataagggcggcgacctaagcatctttcctgtggatgaggatcctttcatggatgcattaacagattttactccagatcaaaattctaatccagatgactgtcaaattcccaacttcatttctgatgcaaatgagtacaatgaaataggttcaaaagatggttcatgctttgatggggatgaacagaacgcaaaacctactgaaatattttatgaggcacaagatagtaatgtggcagattttgttgttctgacattcttgagcaggagtcctgattcttgtcttta

SEQ ID NO: 200562 - DNA, 329 bp, Zea Mays
cctaagtctttttacagataacttcgattatcagcatcttcgccgtcattttgtgaagggcttactagttgatgatgtaagacaattcactactgtttgaccacagtaagaaaaaggacatatgctgtttgcctgttctgcaacaaagtaatgtccttaccaattctttcagattatggggtacaaaatctatactcatgaattacgctctggatatgctgcaaggattgataattttaggagctatgataccgtgagcaaagatgtaattcaaaggtggacatatcctatggtgcctgatgtagtatccagtcgtgattcctcggaga

SEQ ID NO: 200563 - DNA, 366 bp, Zea Mays
gccgcctcccaagcactcctgagttcgcactcaaggtgagcaacctccctatgcacttaattcatccgttactgccatagtgtccacgcaattcttcgctggagttgatccgcaccaccgtaagttcgtctcgctgtgttccatgccctctggtgcctccatgccgatattgcgccaggactgagttcgccaggtcaccttgatcgcgcctgagcttttccccgaacccctagagccctgccatgctcgttcctctcgtctctggcgatctcaccgccaaggggcaggagtggcgccgtccgtagccgtaaaacctttccgacgttgatctccaccgatcgatccagatcgcatggtcaagatcac

SEQ ID NO: 200564 - DNA, 275 bp, Zea Mays
ggggggcaaagtgggtcgtggccccacctcaaattttttctatccttatatatacgttgaatatactgcaaaattggaaataaaaatagcaagtatatgggaccaaaattgcagtgagcagcccacttccaccgtcctggcccacaatccaactccacggtctgctaaaacagcccacgctcggcccgctcaacgcgtcgccctgcttggcctaccattcaagttccatgagctgcagcaccggccaccgcccaaccaatccacggtatctttcc

SEQ ID NO: 200565 - DNA, 714 bp, Zea Mays
tgttgaattagaaggcctcggtggtggtggaactatagagatagaggtacaatccttagcattttattttcctgatcatcaaatgcaaaggtgcatcctctaacacatccttgcctcagctgagggtcagcaaaatgcttacttttgttttcgttttttttaaaaaatagtatgcagttcttatagaagcaatagcagtggaacaattttcatattaggaagccttttggacatgaactaacagactgacctttcaactagccatgagtacagtggtaatttactcacataagaatatctagtattagagccacgttggtaaacaataggctgtattaactgcacatcgcatctgttctcgttgcccaaacaattatagaggtatataaagagtctagctaatgattctatgatagtgatattttagttgttccactatgttcaaggcttgtaatattgttgtttcattctaatcagtaaactaagtttaagtacaacatgccaggtcaaatataagagttatgacgatatcgagcgtgaaaaacaatggtggagaatacctttcgtgtctgactttcttgtgaagagcagcctgggatctgctcttaggatggttcttggatctgaaagtataaatgctagtcagtttgtgaagtctgcatttgggcaactgagttctttcacatacacctatcttccaaagccatcatcatt

SEQ ID NO: 200566 - DNA, 472 bp, Zea Mays
tccgaatggtaaggcgctggggccctcgaacggtgagcttgggacagtgggttgtactagtttagcttatcatagtaccgttgggggcgtgttacacctggtgtgctcgtgtttggttgaaggaggcttctctctgcagctgaccctgctcagttctatacttctgtgagtatcaaaattctagccttgtatgatatatatttacctggtctcacaaatgcaatctattctttgtgcagggacaatctgtggcatcaaacaaccctcatggatcgcccagcccattaccgaaccaatccagtcgctcatctcgccgatgttcttctaaacttagttgtgagacatatttatggcatatattggatgtttgtagactcatttagtgagtacttgttagtgttgtgaactatttgtgatacttgtgactttgtgatctttgtgaagaaacatgtgatctttgtgagctatgtcg

SEQ ID NO: 200567 - DNA, 366 bp, Zea Mays
tgtgaaaccgattacaatggaaatggttgattcctggtgcaacggagtagagaatgaaaagataggttctatccgttctattcttcaagcttttcgcagagcctgccattatggtgaagatcatggggacaattcaactccgaagctcagtgtcatgtctggcagcgtacttgataaagttatgcactttgttttgaaacacatggataaagtcctccgtcaattacttggtgccccaagctatggagggaagaaagaggtaatcagtgagctgatgctgagtaagtcatggaagaggcatggtaatcttatgaggatctatcttgccaatgcgcttcatatgataacagagatgaccgatgagca

SEQ ID NO: 200568 - DNA, 539 bp, Zea Mays
tcttgacaacgatgaaaaagaaaagcaacctatatctaacttggttcaggaattgaatgaacatccaattggctgtgttacacctactgcccctagaactacttcccataggaaccggtttacatctatatcacgtgcttttggagatggttcaaaattactgccagaagaccacgtgttgactggctttgctggtggttctaagaaaccacgaagtcaagtttcatactcagtttctcctaaaagtgaggaacttggcataaaaaacaaaggtcatttccgcaagatacaatctcatgttagtgcaaagataaatgatgcaaagaaacttcctgatagttctagaagtgggcatagcagcccggagtcattgacttgcgttgcaaatgttcttgttacagtgggtgatagaggttggagggagtatgatacccagatcacaatggattccgatggtcagagtgaaaggaggatatgcgtgaaacttgctgaagggaccaagtatgctcacaaggtctgtcaagttttgcagcctgggg

SEQ ID NO: 200569 - DNA, 353 bp, Zea Mays
ccacaggctccggcgggattttcattttcccaacatgcgtcgcttggtgcaggatttcgtgaaggcctgcgtcacctgtcagcagtacaagtccgaccacctcaggccagccggtctgctgcagccattgctggttccgtctgctgtgtgggctgacatcggcatcgacttcatcgaggcgctacccaaggtgcaaagcaagacagtcatcctctccgttgtggatcgcttcagcaagtacttccatttcatccccctggcgcacccctacaccgccgagtccgtcgctcacgccttcttcgccgacatcgttcgcatccatagcattctgcggtccatcgtctcgaaccgcg

SEQ ID NO: 200570 - DNA, 351 bp, Zea Mays
aacaaaataagtgtaaaccatagtaaaattttagagatagtacaatttatccaaaccttaataaatgtctagagacagaaaaaaattggccaaaccataaatcctgaaccctaaacactcaaagccaaacccttaactcgaaactctaagccccaaaccccaaaccctaaaccctttgtatcgaaggataactcataaggctttttgacaattatggtctccactaaagaaccaagattgtgatttgtgtccaaacactaaacacttaatcataaccctcaaccctaaacactaaacaccagacccaaaacacttaaccctaaaccctaacgccaaccctaaacattataa

SEQ ID NO: 200571 - DNA, 643 bp, Zea Mays
atcatgacactgaagttatcatgaattcagtggtcacagcttgaagatgctaacttgcaaacgaaatcgatgccatctgacaagggaacagccagtgagagtacaactcctaattttgcaatgggaagtatggatggaaatatatctgcgtccagctcacctgaggagctacttgaagtatgaatgcttacacattttttttgtcttggaatactgttccggtatgaattctgatgcacatacctatatgcttatcatcagcaagcattacagtatctgggcacaggctgccgagatcaagccattccactgatcaggtaagttggcgttctgctttgtctgatcaattgttggctaccatttccatctgcaaaacaatgggagttggtgatcaatatcgcacacaggacagcagtagagagaaacccagatctgtacacagcgttgattgggatgggacaaaccctgttctcaaatagattgtttcccgaagccgcggtttgttttgaacatgctataccaaaggtctgttgtttacctcgggcgactttcatcatctgagacaataattaagactcagtgctctcgattgtgtagattcaagaagatgaccctcttcttgtgcttgcgtattttggggcag

SEQ ID NO: 200572 - DNA, 306 bp, Zea Mays
caatcaaacggagcgatggggcacgggaacagcgaaattcagccagaacccgagactacgatagcggagagctaacagaaaccgagttctcgtggccttattggagcttaatatggagggagccagagcgagcacatctagcttcactactgcacggacaccacatatgtccaagggcacagagaaacagtaaacggtgaccaatagtgttcggactggaggcaagcagacaggcaaacatcatagtcaacagataggcttcacctcttcaatccaatccttggcagtgaaactatcccaagttat

SEQ ID NO: 200573 - DNA, 340 bp, Zea Mays
gagttaagtaagcgcgagcatgttgcactgtcttaagtcgtcgtcgacttaagccgattgctccgttagaagggcatagtggtcaccctgagttgagtaagcgcgagcatgttgcaccgtcttaagtcgtcgccgacttaagccgattgctctgttagaagggcatagtggtcaccctgagttaagtaagcgcgagcatgttgcaccgtcttaagtcgtcgccgacttaagtcgattgctccgttagaagggcatagtggtcaccctgagttgagtaagcgcgagcatgttgcaccgtcttaagtcgtcgccgacttaagccgattgctccgttagaagg

SEQ ID NO: 200574 - DNA, 298 bp, Zea Mays
gtggttcttcatccttcatttcttacagcactgtacttcatgcataacaattattgagtttcatcggatacttaagatgttggagccatcctcttccctctggatgcatctgcttaatcctcttctatcagactgaaatcacatgttcacctaaatttgcgataaacatttactgtttgttgttgtcccacatcactatttatactggtaagatatctgtctactttgtatacgatgatttgtgcctaatgaagatgtacatggtgcattgtataacatatacaaatacaaaaacctt

SEQ ID NO: 200575 - DNA, 582 bp, Zea Mays
ggatttcatttgtctctgtcaatatttacatttgtcggtcctggtcgaagactaatacttgatggcctaaagagtctgttgaaggggtctccgaacatgaatacgctggttggtttaggtgctttgtcatcctttgcagtcagctcaattgcagccttcattccgaagctggtagctcctactctatttttccaaaagattttttttggtttgttgcatgctttgcagatattgttggccagtttcatcgtttaaactcctttagttaccctctagctctataatatgttccgttaatttgcatcatggcatatcgccttaatatgtcagtagcttgcttatatcgttccatttacctgcaggggtggaagacattttttgaggaaccagttatgttgatagcttttgttcttctagggaagaatctggagcagagggcaaaacttaaagctaccagtgatatgactggactgcttagtattcttccatctaaagcacgcctaatggtggataatgatgctgagaaatcatcattgattgaagtcccatgtgatactctagctgttggggactatgttgttg

SEQ ID NO: 200576 - DNA, 370 bp, Zea Mays
accaagtgcacaagtcccctacggacacggccggatcagcgaaggcacaccacctcatcatacaaattatagttacatacgtacagcgagggcatcacacattacattggttcaaccttcgggatgatacccatctccctatagttaaatagcattatcctcagctcctcaccctcaaaaagacttcgcaactccccctcacctacgctcaccccaaccggcgaggacaacaattcccgcttgccagccctgtccacacgaagacgaccaccctccacctcactcaccctacgcttcgccaccgcccttcgccgcctacgcccagcactcggaccgggaagaacttcaacatccatcacacgcggagaag

SEQ ID NO: 200577 - DNA, 717 bp, Zea Mays
agagaatctgccatgacagatctcagagagcatgttgaacatctattgtcgtcgcaggttgcacgtttggaaaagttgcaagtagatattgttacccttaatgatgaaaaggtgaaattagaaagcatgttggaagaagccagagcttcctgggacactcttgctgattcaatatcaagccttactcttcctattgatcagccttttgaggggcctatggaaaagtttagccagattgcccaatacatccaggaatctcaagttgctaagagttctcttgaaaatgagctacagaaagcaaatgagcaaattaccttacatgctagcaggcattctgatgccctttccacaataaacatgttagaacatgagttgagtaaactaaaagatcatatttcttccatttctgaagaaaaacgtcaaatgcagttaaatacttctgctgtacaggaggagttggagaaaacaaacgaggaactggcaatcaatttcaggaaccttgaaagtgccaacaccaccattaattcactacaagatgcactatcacaggctagatcaaatatttttattcttgctgctgaaaagaatgaagctgaagctaaatatgaaacagaaataaatgctcttaatgctgagctaaccaaatgtttggaggagttggataaaactcatgggcacttacaaagtcattcaacagaatatcatggttaccttgag

SEQ ID NO: 200578 - DNA, 375 bp, Zea Mays
gaaaaaagtctagctagatactaggtcggaatatgtgcaaccctaactgtagtctaacatcacttattgctatgcaatttcaattcaagttctgcctttatttgctaaccactgcattgcttgttaggtgtttttatgtaacaatgctacatgtgggcacttttaccacccgaaatgtgttgcccaacaacttcaccccatcaacattgatgaagcctcagaattggagaagaagataacagaagggttttcatttacatgcccaattcactggtgctttcattgcaaaggtttggaggatagaacacaagaacctttgcaatttgctgtttgcagacgctgtccaaagtcatatcacagaaagtgtttaccaag

SEQ ID NO: 200579 - DNA, 884 bp, Zea Mays
atatggtcgtgagcgatatgtgggactggccaagtaagttgtttttgtttcttgttctctgttgataatgctctttttcagagccaatgacattattccttttctttctataaccaaagaaaccagacttctgatcagcaatggacacatttgaaaggaaagttcctccttcatgctccctttaccaaagctgttattttcatagaagggcctcctgctggaattgacattcttgtagatggtcttgtcttatctccagcaagaaagctccaagctgcaccatgcccaaaaattgaggtttgtaggctaactgcttcttacagtctgagattatttgcttgtgaatgatcttgactcttgagacttgtgaaaccttttttttcttgttataactttcatctgtcatgatactgtaaaactgtcctctctaatcgaagaatatttatttactcaatattgcagaatgttctgtatggaactaatctattgcacaataatggcttcactcgtgggctttctgggtggagtcctatgggttcatgtcgattgagtatccagactgaagcaccccatatgttaccttctatcttgaaagaccgtgcaagccagaagcatataagtggtcattatatccttgccacgaaccgcacagatgtttggatgggtccttcgcaggtcataactgataagctaagattgcatgtcacttacagagtatctgcttgggtacgagttggttctggaggacatggacgtcaccatgtaaatgtctgtcttgctgtggataaaaaccaatgggtcaatggtgggcaagtggatgctgatggggatcaatggtatgaaataaaaggagcattcaaacttgaaaagcagccatccaaagt

SEQ ID NO: 200580 - DNA, 423 bp, Zea Mays
tcctgatttaatctctgtttggactgcgcgcacaaaaacagataaatataggggtctctacgcaagaattactagactcagcgcacagccactgtggaccgcgggtttattactaagaagtccagggactctttatcatataggcacggcgaaggggtattctgcgttcctggccgcacgatcaacatctggccgccaggattagatccgcaatcagccgatccggaatgtgatctaaaccatcggatctgaatccaagggtctcggtttaacgcgcgcaattcacctcgcggccgccagatcgaacttcgacggctacgatttaatcaagcgaaggggtatgctacttaaaatctcgcccgtccatttagatcgaacgaaccacatctaatttgaacccgatctaatattagtcgctggatc

SEQ ID NO: 200581 - DNA, 278 bp, Zea Mays
ggatgagaaaggtaaaggtaatagcaaacaaaagtgggcaaaggatggagttaaggcaagactcacgaaatggcgaaatggagaacacaatcaagggtaagatatgtaaggttgcaacagaacggttggctaaaattcattaccgagggatgttacaagggaacaacgagatcaccaaggatgtgcaaaataaaatgaccgctcatggatcattgagaaacaagggtggtcaagggcatgttaactgaaatgtatcaaacagatattgagatataaag

SEQ ID NO: 200582 - DNA, 324 bp, Zea Mays
aagttttcggcctgtcattgtcaatatcattttgagacccagcttcttcagaagctatcaatgagctaagatcagcagctgcacatgccttaccctcagcaactccaagagatacaacactctcttctgaaggaactatttttgcattgtgaactggagctgtttcaacctccatcatatcggcccctttgacatcagcatcctgcaccacaggtaccttaggagaaacaatgagctcccccggttcttttatcatatcaaatgtatcatagatatcgacacttccagaacctttgatgtcccaccaaaaggtgacagtttttc

SEQ ID NO: 200583 - DNA, 332 bp, Zea Mays
gtctttccaccattagtttaagagggggtgctagatgtatagaggtgtgtggtattttccctctactttggagagtccctttgcatatgcacactcgctcactctcttgtatatctctgcctttgggcctggtaatagaagttggttggactcattatagcaatcctattatctctttatgtctttcgactttctttctgatgatcgaacattattttgttaaaaatcatattgttctactaaatcaaaaggtcatccattgtccatcatcaattgatagtttcagaatcaaagaaagacttaaggaaaaaagtgctatgcaaagatattac

SEQ ID NO: 200584 - DNA, 296 bp, Zea Mays
tcgtcaaatccgtgagcgaaggtgccatcgacctcgatgattagggccgtgggtacttcccggagacgctcatgacctcctcaaccccaaaactgaatcgagcaccgcctgattgctcgccggagttagccattgccgcagtgccgcttgctctcgcggtcaaggtttgcctccgatcgattcaccggtaatccaccatcgttcctctcgtatttatatcctcaatgcgtagcaccggtgaatttgaagagtagggtcatcggtgagagggaattattcgtcggacttcacggcgc

SEQ ID NO: 200585 - DNA, 432 bp, Zea Mays
cgcggggagaaattgtgtgggaatgagatggccgccgtgggctccttgccgcgcagagagggagtgcttcgatgccgctgacaccgctatcgccatgcgctgggttacaggtgtaccggaggcgcatgctgcggctgggtcaacgcactgcgcaatcatgggtaatgaccttatcctcgtattcctcatcttctttgctctgtgtggctatgtcgaattggggagggatcactagagcaggtggattgggatcgcctgggagggcgccactgtcgaagcaagcgccaccgtggtcagctcagtagaggaagaagagccgataaccgttggatgggaaaaggacgtctaggattagatctggtatgtgttggtcctcgaccgtcgatcttacagcgaacgactgcgattggaaccagccattccagcgctgat

SEQ ID NO: 200586 - DNA, 363 bp, Zea Mays
cgctccaatcgctgcagctccaaggcaacgcgctggagggcgacctgccctccctggcccagatgggctccctcgagaccctcgttctcgacggcaacgccttctccaccctgccgccggacttcctcgagggtctcccctcgctgctcaagctcagtatggacgacctccctctcgagccatggagcatccccgacgctatcgcggggtgcgcgatgcttcagaccttctcggcctccaatgcctctgtctctggccccttcccggcggttcttgccaacctgacgtcgctacagacgctgcggctgtcgtacaataaccttaccggggtcctgccggtggggttagaggcgttgggctcgc

SEQ ID NO: 200587 - DNA, 722 bp, Zea Mays
cagcttacgatgtcgtccttggtatggattggcttgagcacttcagccccatgaagattaattggagagaccggtggttggctttaccatacaaggggcaaattgcggtattacacggaaaagttcacacttcagaccagcctgatataatgcatgtggtttatttgttgcagtctggtagtgacactcaactacccgacaacttggatccaaggttgtccctggttctgcagtaatttcagttagttttcaaccccccagaaggtttgccaccatcccgtgcttgtgatcataccattccacagctagtgtttatccatccttaccggtatgcacctgctatcaaggatgagatcgaagcccaggttatggagatgctccagtcagggataattcagcccagtaccagtccattttcaagcccagtgttgatggttcgcaaaaaggatcagacctagcgtttttgcgttgactttcgccacctcaatgctctcacaatcaaacggaaatacccagtcacaatcattgatgagtttttggacgagctgcgcggggctagctagttctccagtcttgatctgcgagctgggttccaccagatattactcaaggagggtgaagagttcaaaacagcctttcagacacatagtggtcactacgaattctgtgttatggcttttgagttgacaggcgcaccagcaactttccagagtgcaatgaac

SEQ ID NO: 200588 - DNA, 278 bp, Zea Mays
gacgtattgtaacaaaattcagcccatggaagccattgtaaccaagtttttggccgatcacctgccaagcagcgtaagtacatcacaataattctgttaaccacttccgactgtccatcagtctgggggtgaaacgcggaactcagtaacaacttgaccccaacaaggtgaaaaagctcggaccagaaggcactagtaaacactgtatctctatcacttacaattgagcacagaataccatgaaggcgcacaatcccttcgaaaaatgccctagccac

SEQ ID NO: 200589 - DNA, 365 bp, Zea Mays
ccaagtgattgctgtcttggacacctctgaagtttcagactcacagaatttggtcgtaccaaaaaatgaggatatcctgtcctgcccgtgtgaccaccagagcagagctgtgagtttccttctggccagattaaagtgctattcctcagtgttatcatggtcttaccgcaaagattccccgtggtttcacaaaaggtaccgtcacctaaagcacacacttgagtagtaacagccgcagggcattacaactcttccagatatccatttaagcaatcagtaacagccgctggcgacatgtacagttcctcccttgcatctccaagctgagttcaatagggtaacaataacaataatagaatggcaag

SEQ ID NO: 200590 - DNA, 483 bp, Zea Mays
gctcaaactcaataaggctggttcttgtgtcaccagaccaatttggcttcttaaccattctactttcaaattttttatgttttccccatccaaaagaacttcacctgaaacataaataagagtagtcttttaaatggaggaatagaagtcaaaaacaaaagatgcttctcaatgctcttacctaatgttgggtcatagaatctctccataagaggaattatactgcttttcccggagccatttctaccaacaagtgccacagtttttctcgccggtacagtgaggaagaatccacttaatattgggatctcagggcgagacaggtagctaaagtacacatttcgaaattcaatattcccctgcacctggggtaaggttgccccttcttgattggtgctggaggttgaacgactaatcatctcatatagtctataagcagcaatgcgtccttgctcgaatgaatagaagtttgtagctgcttga

SEQ ID NO: 200591 - DNA, 340 bp, Zea Mays
cttcttcccgagccataagaagtgggactttccccgcttcgacgacacgatcgatccaatgatcttccccaaaaagtgcgaggcttacttccgccaacatcgcaccatggcggaggagcgcgtgcacatggcgtcctatcacctggacgaggtcgcgcagctatggtacatccagcttcaggacgatgagggcaccccatcgtggggacatttcaaagatctcctgaacctccggttcgggcccccgctacggtctgccccgatgttcaagctcgtcgagtggcgacgcaccggaaccgtggaagagtacgccagccgattccaggcccttctacctcgc

SEQ ID NO: 200592 - DNA, 381 bp, Zea Mays
ggcttgtatgatgaagttgtgtgccctcgcttatctatgcctgcgaaggcgttgtgtactttgtctggtgtgttttgttgtgctgtgctggtgcgattatagttggtcttggcgcggatggtttgatgttgtcgtttctccttttgttttgctagtccggttgcacccttaggtgtcttctgtacggacagtctttgtggtaggcttcggttttttcgcacttgttgtgctagtccggctgcacccttaggcgacttctgcgcggatttgtcgcaggcgagggtggctagcgcttagcctcgcggtgacctcgtattggtcgaatgtcgaagaccgtcgtcgcggtcttttttcgacgcatgtttttgcgggggattttca

SEQ ID NO: 200593 - DNA, 680 bp, Zea Mays
gggtggctggctgtggtgggggcgcagatgccaaaggatttggcgggcgtagcagggtgtcgttcccacgggcatccctggatcaggattgtggaagtgagtgccatggggcaggagctagacgtgaaggtgccattgctgcatgatgaggtacgaggtcctgtcactcttctcattcaattagacgttgctctgtttcattgagtccgatgctcgctctgcgtttgtggattggtgtatgcaatggcttacgagatggtaagttcgatgttgaattcatccacttgagttggaagcggttagactattatgatggtgggattagtagcacatcgtcactgaaaagtggtcaatggatcgatttgtcgtggaagtgttgctgttctagacaattaaactgctattggcttgtgtgcctctctgttctcatagtgatgtgcaccagaattgtgaagctctgaattcaagctctgtgggtttagaaaaactgagaccttttctttgtgacttatttgttgggctttgtcaatgctccagggtgtggattccatgaaagcatatgactgaattgagcttcttctaagcatttttttatgatggggcattcaaagctggtgaattggactagatattgagtttacaggagcagtcagggataatatgcatggttctgtaattag

SEQ ID NO: 200594 - DNA, 533 bp, Zea Mays
cgtgtttaacgctcaaaggactaggagatgagactgtcacccaagaacacggcgaagcccgaggtagacttgtgtgtatcaggacaacttgcccaatcaacatcgtagtaaacctctagctcggtctgtgtacaaggtcggatcaacaagccgagacgtagagtgtcatgaacgtaacgaacgatgcgcttcagagcagctagatgaggctcacgaggatcatgcatatgaagacagatctgctgaactacataggcgatggcagacctggtgaagatgaggtaatggagagccctgccaggctatggaaatccacagggtcagccactggatcaccaacagtaccaggcaactttggattgacattaacgggggtggagcagggcttgcactcaaccatgtcgacacagtcgaggatgtcaatcatgtactggcgctgagacatgaacaatccatctgccatgtgttgaacctgcatccttaagaagtgatgaagtttgccgagatcctttatagagaattcttgctaaagc

SEQ ID NO: 200595 - DNA, 305 bp, Zea Mays
cattgcatacgctcagaaccagttcggcaccacgcctaaatccttccaagccgataatgggacagaggttgtcaaccacaccaccacttcctccggactaccaacaacaccatccgcaccatgctcctccatgtgtccatgccacctccatactgggttgacgccctcacaacagcaacatacctcctcaataggcgcccctctatacaaaaccacatacctcaccaaatacttcacgacacactcctagattatgcctccctccgcatcttcggatgcctctgctatccgaacctcactgccac

SEQ ID NO: 200596 - DNA, 339 bp, Zea Mays
acgttttctgctgcactctttgttagcatctttccgtcttggtgtcttattatacaacctaaggcgtacacgtctagactccctctcgacgggagtcatgtttttgtaccgctcgctaaagtaggcggcccttttcatagtatgcttaggtatgttatcaacagtttcatgcacacaacctggaataaggcatgtctacgtttaacgatttgaaacttgctattttttgcatatttagccaagcgaacaatcatgtacctggtgttagaagggatttacttgtgacaatgttgtttgcctagaatgtctcattcctatgcaaccaatcgttgtcatcat

SEQ ID NO: 200597 - DNA, 376 bp, Zea Mays
cgcagcagcatattttgtacagctggtctcctagccatagctgacttgatctggtagtttattggcttcatatgccatagtagagctgcctacttctacttactagtctagcctgatatggatcaaccattcattaccacttgttattggcaatttgagcttgtgtgttgccattcatgaacacttggtatgctatatttttatttggcattgtgcccattgcatgtgatctattaacttcagtctgagcttatgtgcacagccaatgatgctttttttctttgttgcttacatgctgttttattaattctgattttgtgtcttcctactctacttctttgatcttgagatctcattttattcgccttgtgcagct

SEQ ID NO: 200598 - DNA, 300 bp, Zea Mays
gttcgcttgattttttttccatccttgcttgtcaatcgctcgatctggaaggggacggtggtcgtggttggtctgagggcacacagcagtgagggacttagggaagtgaaaggaagcggagaggtgagcgatggcggcgcatctagaggacagagggaagcgggaatcgtggcggcagcatggggcaggtgcggaggctgaaagacggttctggagaacgaaagaggcgtgagagggcggtggctatgtaatgttctggattgtgatatataggcaggggagggacacatcacacatggg

SEQ ID NO: 200599 - DNA, 406 bp, Zea Mays
ccttcgatgcttatgggaccaccgcgacgcttgcctcgtgggccacggtctatgggctctgcaccgattcccaccataccgcaagctgcatcacatagttctaacacccaggtggcatcctaggcctccatgcggtctcgtggctctccctctaggttgcagccagtgccctccccaccggcccctccgcagcatccacaatgttgtctatgcttggcgccctcctttggtgccagtccagctacccatggtgccgctcctaacgcccacatccatggcacgcaagacggtgaccaccctagcgcttgtaccactgactatgcctcttcttgatgttgtacccgtccctcctatggcaaatcagcatggcatgtttactcgagggaagcacaactctcgttagccc

SEQ ID NO: 200600 - DNA, 406 bp, Zea Mays
gctgatgttatcatagattttaaatatatgtttacatattcaaatactcttagtgttaactgaaaacttacatctttcatttacttttgcaccgagttggtattgcaatgttttttaatgcaactatgtgactttaatgtttatgctgtaggtacccgaaagcaaaatccgctatccaatggtcatggtggaacggacacaatagcaggattattagcatcactgatggaagttgtgcggacaacagtagcatgcgagtgtgtatatgttcgagcaatggtcatcaaagctttgatatggatgcaaaatccacatgaatcttttgaagagctaaaatctatcattgcatgcgagttgtctgacccagcctggccttcctcgctcctgaatgatgtcctactaacct

SEQ ID NO: 200601 - DNA, 325 bp, Zea Mays
gaaggtggtgccaatactaccttctgccacttgcacgcccgctgccaaaagaaaaaactccaagttgaggatcatatctttacctggcaggaggataagcgggaagctgcccttgatttttatgaaaacctgctcgggtcgactgaagcaaggaacttcacctttgatcttttgactctccagattcagcagcacgacctcgcttccggcttccttagatgagactttctcagaagacgaggtatgggcaacaattagagatatgcccttagacaaggccccaggattcgatggattcactggttgtttttacaattcttgttgg

SEQ ID NO: 200602 - DNA, 582 bp, Zea Mays
ccttggtgcctgcttcaagggagctttggatcgtcgaacctccctttgccgttgatgggatgtcttctggcaggagaacgctgatgtatccaatccgcatcacattctcgtctgccccacggagggatggatccgatcctaagcttcatgctattacttcgggcggggatggttctggtcacgtgcagcagggatcccctcctttttcaagacctccccattcgagtgggagaaggggagaacatggtcattcgggacgtctctcagttcatgagcgtttgggcccaagagatgagaacatgcagcagcggagcattagctccggggtggcagtttcagatttgaggagaactttggaatctgatggggggaccttgtctcctaggctggtagagatgactgatgacatggttcttgtttcaccggtgaaggcgaagcagctgaaagtttattttcgtcaaagattcaagaatgtcctgaaccaggaggaagctggaactcccaattctgtcactgtgcttcctccatccaccacagacgtggcagctgctgacacagatccatctgagtatcctgtttcag

SEQ ID NO: 200603 - DNA, 277 bp, Zea Mays
cttcgacggtttctgggggcggcgccggggcgacttcggacacagccgccaccgggttcgactccgaatcaggcggcgcgctgttcaaagccccgaagtcctccactttctcgttacgcgccacctgagacacagcacacagattcatcaagcccacatataacccacattcaacaacattaaacaagagtcaaacattacctgacccctcgccgtgtcggaccgctcacctcccgaccgtggggaccccacatccgatcgaagagggctcccgcgg

SEQ ID NO: 200604 - DNA, 527 bp, Zea Mays
tgggttcaccagccccgctccgacgccatcgagatgttcttccggctgctggcggtctgccacacgtgcatacccgaggtcgaccaagagtcgggcaagatctcgtacgaggcagagtctcctgacgaggctgccttcgtcgtcgcggcacgggagctcggcttcacgttctacaaacgcacgcagacaggcgtttatctgcgcgagctagatccctcgtccgggaaacaggttgacaggtaatcatcaatcctacgatagcattgtagtgaagaaactactagtcctttttcttactgtccatctcttttcttatctttcctttttctttgggcaggtcatataggatcttgaatgtcctcgagttcaacagtgcgcggaagcggatgtcagtgatagttaaggacgaggagggcaaactgtttctgttcaccaaaggagctgacaagtatgtactacctccagtaatctctaacctaacctgacctgctgtatgcgtgccatgccatgccttgccttcgtcgtcc

SEQ ID NO: 200605 - DNA, 464 bp, Zea Mays
ctttatttgaagggtccagtagtaatgcaagtgtcgtgggggtgctggctaagcatgagatgctgctaggtgtttgtgtgtattgattaattagtgaaatgcaagtgctaagtgcaccggtgtgtggtgacaaaaattccttagtatcttctgtgcctgagcatttagaggagtaatacaacatttcatatattttataagaatttgtctttgacaatagatcattttaagcttgcacaacattacacaaagagtgtaaaataattttggaagtcagattatattcatattagccttgttgactacctttccttttgcttcctatttttagcactctcatggattgtgcttcaatgatgaaagaagtccagactccacatttccatacattatttcacaatgcctctataagtgtactgaaactgtattttttctcagttaaacttgggaattaccattcatcc

SEQ ID NO: 200606 - DNA, 324 bp, Zea Mays
aaacatttgagggttgagaggcttccatgaggacaagtggataagaatctaagcaatttaagcgaacattaaatcaagcatgccaaatgggattgagagtttcaccaaaaactaaattctaaagtaccatatcccctcttttccatttagattcagaaaatccacactccctgattatactccttttcatctagatgttttttcacaataaggaattttaatgtgctcaccaaaaatcagacactactacaacttttccagaatatcacatatgattattaaacatcctattctgcagagcgcaaaggcttccacaccaacaac

SEQ ID NO: 200607 - DNA, 997 bp, Zea Mays
catgacgatattaatgaggaaacctccgaggaggagaggaatgcatggaatccttctgaaagcaccagcaattgtggttccaggactatgcagcagtgggtatgctccaaacgatcagatatcaacaagaaattaagcaaaaaccatagtggtaaaacatttgacaaagtggcacctggagcacagaaatcggataggagcagcatgtttggctttaatgattctcaagttccagaaagtcctgttggggtgttttcttctgagtcattatacatggccacaacttcagaagccactggtgttgagcagagtaatggtccttcaaaagtgcttagatcgattcctacatggtcttcaaaaactcatcttcagagcagtgtcataccaaaagtacctagatcagctgctgctcttgcaaagagaaaaattaaggagattgggaggagagaagctaccaaactagataattatgatgtagtgaggaatcccacttcagtgaaaagatttgaagctaggactctttccttctccactgcagggccaagcaatggaccaaacaggtcagcatctacatcaaagaagatccggaagcaccgatctccgttgaggactggcaagcgtgcattttcaccttctagtactagattagttcatggctttggtgacgagcatgaacctgagaccagacatgtaaataagaaattcaggattactagtaatgaggctcccaagaagtttttgaagcatactgaagaggatactgcagataatgacttctcttttgcaagtgacatgccagtatcgggacaacagaatgatcaatatgatgttgcacaggaaacagagggtacacaaatggattgtgaaggtgaagatgctgaaactgatgtgccatatgattcagtatccagaagtgatcctgctgagtgttgcaaccaaataagtgatgtttctctgagtcctgaaaactacagaacagcagacgatgatgttttgg

SEQ ID NO: 200608 - DNA, 975 bp, Zea Mays
gttctgttgacatggagtcagcttccatgcacacaaaacatttggccgcaattgctaaagaggctgtagtgtcatctgacactgttcctggagcaaaaatcagattgtggcgtagaataagggagtttaatgcatgtgtaccatacactggagtgcccgtcaatattgaagtacctgaagtggtcgtactggccttgatcagtcttcttccaaccataccacatagccttcctgctgatgctcctcctcttctgcctccatctccaaaagcagcagcaacaataatgggttttgttgcatgcttacgcaggctacttacatcaagaagtgtggcatcacatgtgatgtcgtttcctgtcgctgttgggagaataatgggtttgcttaggaatggttcggaaggagtagcagctgaagctgctggacttgtggctatgctaattggtggtggtcccggtgattcatccatcttaatggatgcaaggggagaatcccatgccacctacatgcatgcaaagtctgtactgttctcgcaaccaatgtatgttccgatccttgttaacaggttgaggccaatatcggtgtcaccgttgttatctttgtctgttgtggaagtccttgaagctatgctttgtgaaccccatggtgaaacaacccaacatgctacatttgttgagctactgcgtcaagttgctggtttgcgccgtcgtttgtttgcattatttgcacatccagctgaaagtgtgcgagagactatttctgttataatgcggacaattgctgaggaagatgcaatagcagcagagttcatgcgtgatgctgccttgaaggatggtgctcttctgaggcatttactaaatgctttcttcttgcctgctggagaacagcgtgatgttagtcggcaacttgttgctctttgggctgattcctatcaacctgcacttgatttgctatcaagaatacttcctcctggac

SEQ ID NO: 200609 - DNA, 444 bp, Zea Mays
ggaatgcaaggaaggagagacacaatcggcggcaacagcgattgatttcgtccgccgcacctctcctctctctccgccgccgtcgccgccgccaacaagggcgaaaccttccgatttcttccacttctgctgttagggttccgcctccacctgctctgctctggtgagttgttatcttccctccgtttctctttcttctctttttcccccctttctggtgatgatgcatgcacacatgatgagattgctctgccgattgtcagtcctctctccctcagccgcaaccgcaaccccgccaagggacaacgcaaatccttcctcttatcagcttcagtcactactacacctacctgtaccacactgttcgtcctcctcggttcttttgctcctaatccttgccactacccgatctatcccttcacttccgccgcgcacctgcatgtg

SEQ ID NO: 200610 - DNA, 606 bp, Zea Mays
tctcgatgtggagaaactaattgccaaaaatagagacaagctcgatgatattctgagggactgcatggaagctaataagaagggtcagggttttgacacatcagaaagtgggccctctttgaatacgacacggccaacaataagcaagccgaccgaatccaaaagttctttgaatatttccaagcccagtatgggcagacctatccaaggagggactccattgactttacttcgaccagcaggaagcaaaccgaagcaagatggtccttctctggctcagtcgcgaccagttggaagcaaagcaagtgaagatgcacctttgtttatcttgtcgcggccaattgggagcaatccaaagttaaggggcactccggtgcaagatagttggcccagtaaagagagtttagctgccgcaacagagttcagtgaggcggggagcatctcaagaacaggcgaggtggatgtcgccttgcggaaacccaccgtgcaccagagtcaggatgatgatctgaagtccaagctcaaaattaagccaaatgttaacctgaaaatgaggaaagatatgaatgaggacttaaggaacatttctctccttcaaaagccaga

SEQ ID NO: 200611 - DNA, 350 bp, Zea Mays
ctagaataacaaccatgagctaatccaaaatttatttagatcttatctagtctaaaatagtcatatcgatttattctagatctgatccaacctaataggctaatctaacctgatgaagtctaaccttaagttgagctaatctaaggacagtcccttaacaagttaacactagtaaaataaactggatcctactcctataaatcttgttctctcctaatgcacttaaacctaaattagtgcattagaccaactcaaccgtgagcataagagctaacccaaccaatagtgtcatgatagattgcataatctgtctatccccacctaacctcaaacaaacttttgacctacat

SEQ ID NO: 200612 - DNA, 329 bp, Zea Mays
caaattttcatgttttaacattaacggaacattgcttattgttgtaccattgtagttcatggttttggacagatctggtgtgatataataagcgggctattagctacctcttctaccaagattttactgaatggtctgcccagggaatgtattgggcatcaacgagggctgaggcagggtgatccctctatcatctatgttgtttattcttgtaatggatgtcttgaatctgctcgtgcagcgagcctctgaggaagggcttcttcaacctctctctacaaggaatatgcagcaccgtatctcgctgtacgcggatgacgcggtgttat

SEQ ID NO: 200613 - DNA, 429 bp, Zea Mays
caggggatggggactgaccggaaaagggctggcgacggtagagctcgtttcacggtggcggaagtttgatttgggggaagttggaaattccagagttcgggtgaacgattataggtgggagtgggtgttaaggcttcacgatgacatggcgcagctacccgggggctcaatttataggcgtcgcaagcggtggccgggaattttacgaaggacgcgcggcggtcggaggtagaagaaagcactggcgcagcgaatccgtgtccaccgtcgtggcaacctccccggcgacgatgggacagtcacaaggtgtcacgacagtgtggtaaaacggctaggccacgcggcgcacggccgggagacgacggtcgacggtgagcttatcgtgccagccgcaaagtagagagaaggggggggaggtcgtcggagtgg

SEQ ID NO: 200614 - DNA, 306 bp, Zea Mays
gagaaattcgggccgcacgatctgatccggacggctcggattacaacgtggtcataaccgaaccggtacgcagtgtggggcatcagattaagatcctacggctagggtgttatgaagatgcaatctaatctcggtcatcgaactaccatcctacggctcggatccgtttgatgaaggggtatgctgattctaatcctgaccgcccacgcagagatcaacgtcccgaaacaatcagctgcacaatttaatccccaccgttggatgaggatccaacgccaagaacgtcatctgccaccccaagcgctt

SEQ ID NO: 200615 - DNA, 499 bp, Zea Mays
aggggaccctgaaggcacacttggacttcttgacgaacaattggtgctgccggagtaccgctagcacggtgcgaaggtgacacagatggtctgcctaggtggagctgtatatcaggatgtcatcgaaaaacacaaggacaaaccggtgaaggaagggcctcaagacgtcgttcatgagagcttggaaggtcgccgacgcattgcagaggccgaacgacatcaccaggaactcgtacaagccgtcgtgggtgcggaaagccgtcttgtggacgtcgttggccctcatgcgcacttggtgataacccaaacttaggtctagtttggtgaggaactgggtgccattgagctcgtcctgcagctcgtcgatgactgggatggggaacacgtccttgacggtgagcgcgtttagcgcacgatagtcgacgcagaaccgccacgacccgtcgggcttcttgatgaggaggaccatcgaggagaatgtcgagtcgctgcgccgcac

SEQ ID NO: 200616 - DNA, 353 bp, Zea Mays
ccaaaggtgagcagggataccacggagttcgacgtcaatgagggaagacaagacactgcctcccgaagcaaaagcctgcctagtccatctcttaatatgcaacctcaatggagggacaaagagcgacggtcctccactaaacactcgcccagccagctcctccgaagggaagaggacaataaaggaacctggcgcagcacgacgtaggcggagcgcatcggcatcaaggccaaaccttgaggcgagcgcctctctaacctccgtggcgcaaccagttccttcctgcccaacaacgctgacgatcagggcatggcgaagctccaactcagcacggtcgatcattctggaccgcc

SEQ ID NO: 200617 - DNA, 566 bp, Zea Mays
ttattatgaaaccagctccaaaaagtggcttatgagcctatccacgtcgtccattaatctttcgaccataggatcggattccaaaggctacacgagtgttctcgcgcaccaggggccaggcggcctcctcatgctagataaatcgcgacgcttccagaggatacatctccctctcggttgccggggcggcactatccatggtgaagaggatgtcgaccgcgatggctacaacgacgacgatggagcagcttgacgctcccaacagatgcgagccattctcctcctccctacgtcctttccccctccctgacgccacaaccgtgcctgctccggccgaatctaaaggtgtcgggatccccaatccttcccctcctctccccctctccacaacaccgcaactgtgctcgcatcaccatcccctcccctgtctcttcgccaggaatcccatcctcacccccaatgccacagttctgctcgcgttggccggatctgggaatgaggaacccacggttccacgacctcctctccgtggaagcctaaaaggcatcacccccataagcgagagg

SEQ ID NO: 200618 - DNA, 369 bp, Zea Mays
gttgcagtcagcgacgcgcacttttgtggagcaggtctatatctagaaccgaaggccttcgccgaggagggtgtggtcgccgggagctacaaggtgcggtactgcggtgggtcagaagcggagcacgaggacatccatagcctgcggcgtcgtgggtgtgtgctcgttgttgtttcccctagaagaagccatgcatctttgaaaggttgaacaagtgaatcacatttctctccccatgtccagacctacgatttgcattgggaggttagggatttggtcaactaatatccatggtttctagaattttgtaatttatgcatacatcaggtgcatggatatgggcacaagtattgtttttctcacgtgcaa

SEQ ID NO: 200619 - DNA, 373 bp, Zea Mays
gtttgtctgcacgtatcgttgtccacaagaacccacgtatccgaagaatcacagagcgttccccatcctgcatcagacgacctggcgtccagttcagacagcaccatcgagcacaaaacgctgtcgacaacatatagctgcatcgacctatcagccgtccccagcatcgaacgagcgtctcgcagcagcttcgagcgattcccttccagcattctggagcagccagaccggagcagcgtggaggacttagcagcccctgaccctggtggaccagcagcagccgcagacaccgacgcgatgccaaccccgtcgtcagtggtggaggtcctgtcccgctacttcttcaggaaacccgagaacgccaccgtgcagc

SEQ ID NO: 200620 - DNA, 292 bp, Zea Mays
gtttgtggacttgctatgttgatgatgtttcggtatgcccatattccattttggactaaaagtagaggcttcaatcacttagtttcgcctgcatactccatatccgatgcacagctggaatatggaggcttgccatgcagggtattactagtgtgcagtgtgtttgttgcctttggcacgcaatagcaatgttatgaaaatctggcccgtgtgaccaaatgagctgccatcagcattaagttgtattaatacactgcatgggttaatccctgcatagttcttgacttcttgt

SEQ ID NO: 200621 - DNA, 309 bp, Zea Mays
ctccaactgggtgctgctccattcagtccggtgctcgcgcgggttggtggtaatggtgctgaatccgagcagttgagctgattgtgacggagagattggtgaattgatgtcgacttgtggtggaagtggttgctgttccaggcagttgaactgctattggcttgtgtgcttctctgttctcacagtgtggctcagcagaatcgtgaagctctggattcaagctttgcggaggcttgttagaaaatcaaggcctttcagttagtagtagttaccctgtcacttctttgttgggctttgtcaatgctccag

SEQ ID NO: 200622 - DNA, 444 bp, Zea Mays
ggcaggaaaggtgcaactgtacgccaagtcaggttgcctgctgaatgatttttttcttcttggggtgtcaatcaataaaacattttgacaggatgtaactgtggattttgtttgtcattttcagcaatgtggttgctgcaactgatttgaccatgatggcattggcaggaataggccttcgatgcaacaaggtaaaacaaaaggcattaagtactatcctattctgaggtggctcccatgtgttgctgatacaagtcattatataatgcctatttttgcaccatcaaattggtattctgttgtttgaaactctttgtgttgacaacttgacatcatgcttcagaaattaggttttgcatcttgtgagcgaagacctggggctactgaaggagtgaatgtccttattgagaaacaaaatcttgaggggctatggtcatatggcat

SEQ ID NO: 200623 - DNA, 310 bp, Zea Mays
cgagggtgttgccggggatgattcgactcagatgggtagcgcaagctgcgacccagcccccgagggtgttgccggagatgatccggctcggatgggtagcgcaagctatgacccagcccccgagggtgtccgagcgggttctccctcttgcatttccatggatgttcacgtaggatcttctcctccacactctggttgcatggtgatagcccaagcctttggtcaaggagtcgctttagaggccagcgttcccgacgatagagttttgggttctgctgatgacactggattgattcctgctgattcgttg

SEQ ID NO: 200624 - DNA, 399 bp, Zea Mays
ccattctccccaaatccgatttccgccaccgcgaaaccaagttcaccgtcgccagcccaattccggtcagtccccgtcccatgctttctcgtttgtgcactctcacatcgttgtgatgcctgccaaacccttaatttgcatggagtagcctctggtcgccgggaacgcgtcggtcttgccgcgctgctcacggccatcgtggccagagctccataattgatgaatagccaaattaagttgggggaaatggttggggtagtgttaatttcgtgtccgttgctcggagaacccggccgttgccctaatcggccggcgtagatgctcgccggagcgtggcggtgcgcgagcgccgtcggggacctcgaacacagaatagggaaaagagaaaggacttttgtg

SEQ ID NO: 200625 - DNA, 309 bp, Zea Mays
gaggaactgaaggaattaaatctgttcgtagctcaatctacatattgatgtcgagtggaggatgccaaaactctggtgctacaatgccctgttttccaaagtagcgaatgtatatattttcctgatgagatcctagccaacatttctttccctgtacagttcttgtcaatgttttaagagtttgaagttgagccgaacgtcttgactcttgagtgggaaggagattgtgttcagaaaactgtacaaataccttttagcttgctgggttgcaaactgttgcagttggaaggccttgatctttaaactatc

SEQ ID NO: 200626 - DNA, 362 bp, Zea Mays
tatgttgtctgtcggctcaataagtctatggtctgaagcaggcgcctcgtgcttggtatagctgctttgctactcactcactctggggtttgtcgaagccaagtcagatacttcgctgtttatatatcatcgtcggactgatatggcttacttgctgctttatgtggacaacattgttctcactgcttccagccaagaccttctgcgtcgcattatcactgctctttagaagccattctccatgaaggatctcggtactctccatcatttcttaggtgtggctattcaacaacattcagagggccccttcctttcacagcagcagtatgctctctatattcttgagcgtgctgatatgtccg

SEQ ID NO: 200627 - DNA, 296 bp, Zea Mays
gcggagttcctggcagatatccgtcaccggctggagcaggcccaggatgtccagaaacatcattatgatcgtctacatcgtgacatcgacatgcaggtcggcgagtgggtgctgcttcgtctacgccagcgcccgacggcctccatgcccgactcgtcggctggcaagctgaagctgcggttctacggcccttaccgcgtcgtcgagcgcatcaacgccgtggctgtccgcctggccctgcctcctcaagctcgcctccacgacgtcttccacgtggggcttctcaagaagttcca

SEQ ID NO: 200628 - DNA, 545 bp, Zea Mays
ttggacttttggatgctgacccgaagtgagccgttttcacaactttttcattgcctctatgtgtacccgttgactgttagcttaagccgcaaaagaaacttgtttgttagagtggaactgagaaaggacgattctgacatccgaaagcctccattagaggtttgcctgctgaattatttgtcctgatgttgaatgttggtgtctattcaaacatccttatccattagagacgtgggcttctaggctgtttatcctagggagcggaatatgatgctacagaagtggggccatacacagattgcttttggaacaagaatggcttcctaccatgatgaagttaaaatcagcctacctgctcttttgacaccccagcatcatcttgtgttcacatttttccatgtagatcttcaaatgaaacttgaagcaccgaaaccagtatgcatcatgttgcttattagtatggattatgcttagttgtttagtttgctcatttctgacaagttctttatttcttcaggtgatcgttgggcattctgtacttccac

SEQ ID NO: 200629 - DNA, 570 bp, Zea Mays
gatttggccactgaggacgacatcaaagaagtgtctgtccgttctcggatagatcctgcaaatcaccctagcctcctcacattcaaagcacagaggagggaggagaacagatggctcagttgtggcctcgcggagaatgagacgccgatggggccaagccgagctcacgctggcagtggtggacgccggtcgacggagaggggacctacgaggctacgacgaatggacaggagaggagtggagaggtgaacgagatgtcggtgagtcaagggtgggaagtggcggcatgtgagacgtggatgcagcggagagcgaggcaagcgagagcgcttcgaagctggttgagagacgagaaggggagcgattgctggggagtgccggagtggggagcgagcatcgcagtctcgtggagggagaggaggagaatgggacgctgatacagggaccacctgtcagagtggcggggtgggcagaacgaagaggaggcagaactgaaaaggtagcctaccccttacctttttatagtaatagagatagagatttgctttaggcatgtcacacatatgtgag

SEQ ID NO: 200630 - DNA, 351 bp, Zea Mays
gcaaccgcgccattcgtctcctccgtctcgttcgtagtgcaacacatacagcctcgtctggtgaagtgaaagaacgacaagatctgtggtacggcggtgccggccgacatccacccactgtgctaccccttgcggttccagccagcgcagcgatcgattcccgctggccgctgccgtcggtgcctgcccggtcctccactcctcccgctactagtactagtaccagcacactccactgtccactccactgccagtgccatcccattcccatccgaggtaaacgcgtcaacgcgaccagctcacctcgtcatctcccattctctttcatatttgcatgcatctcggttctcg

SEQ ID NO: 200631 - DNA, 395 bp, Zea Mays
atttcttcacgtgctacttgtggattgtaaacccatgtacttacagtgccatccgcagcgaagttaagttgagtttgcacacctgcaccaagagtttgccctaccttcttcaaacaagctctaaaatatcgattcatatgtccagtgccaccaatagaatctgcactcaactcagttttacaataatgacatacaacaatataactttttataccattttcaacaatctcccgcttatccatatgtttccagcactctgccctggaaacagatggtttagcagcactttgcactagcacatcagctggttaggaagaacttccactacaaacaggtacacctagctccacccccatctgctggtaaggaggaactaccactacaaacaggtacac

SEQ ID NO: 200632 - DNA, 343 bp, Zea Mays
tctactctgttgccttgccggagatgaagtgatagaggccttaaaagaagtccatgctggagtgtgcggagcgcaccaatccggacctcaactacattaccaacttaaacatttaggctattattggcctaccatgtttgatgattgcatgaaattcgcgaaaaggtgccatgagtgtcaaatacatggcaactttatacatcaaccacatgaaccattacatcccactagcatgtcctagacatttgaaatgtgggggatggatgtagttggaccgattcacccaccatcatccaaaggacatagatttattttagccgccacggactatttctccaaatgg

SEQ ID NO: 200633 - DNA, 325 bp, Zea Mays
cccccaatgaggggacccatctaccttttatagtgcaaggtagagggggctataggttgtgtggggtcgacctagtagctagaccccttctactattactattgaaggtgtaatcatccatccgtggtcttgtggcagcgtcgcctgcacatagtgggcggtcaacatcactcatacaccatggatggaagaagttgacactagagattgatcatcgttcatttgtgcatccacagtggcgcactatttctatgcctaggatgtccaggcctggaaactaccgtggcacaagatgtggacatggtcaagcatgtcttgtcgcaca

SEQ ID NO: 200634 - DNA, 454 bp, Zea Mays
tttggtgtatgctagattgtaatgttggattgaaatgcaggaaccaacaactaattctagagaggaggaagacaaggaggaggataatagccttgacatggaggatgatttctctctaagcctatcttcagaggatggtgggagccaaggtgaagatgaggttcaggtggcacaagttcataatgcaaagagaggagtcaaaagggcaaagggtgatgttccattatctccttcaaagtgtaaggtcaatagggcgaagcgagccgattgctggaagtattttaaggtggtcgaagttcaatcaaagaagtttggggaaatggtgacgaaggccaagtgcaagttttgttacaaactgtatgtgtatcaacgtgggggtccaacatcacagctgaatcgacatctggataagtgcaccgcctaccagaacaagttgcccaatgcaaaatcaaag

SEQ ID NO: 200635 - DNA, 285 bp, Zea Mays
ccagaacgaccagcaagtcgtccgacttgaaagcattgttctaaaccaatcctaggatcccttactcctaaattatagactcccttgattggctttcctttaatctagccactttctaaatcgatccctgtggccccggcacttgcgccgcgttggcgctctgcagtgtgtcgcccgtctcgggcccgcctttatgtgtggccgtacatgacatctttcccctcgtccaggagcaactcatccttgagttggaagttcaggtactttgaggtgaaggactcgacg

SEQ ID NO: 200636 - DNA, 375 bp, Zea Mays
tgctcctgccagtgtcaaattgaggcaactttttgcgcgagcagacgtgggtccggtgtgtgcaaaactaagggtggctgtcacgtgggcggtcgtagtctgcaatgtgggcccaacgtccggagtgcgtgatggcttgcacgataggaatggctgaatgagaatggggggttttgtcacatgggaccggagtgccccaattcaggagttgctcgacgtcccgcgtcacagaatgtgatggtttgccggacagcagcggcggaggagccattatggcttagtgtgacatcagccataccttacttttaataactctcatatcttctactataacaacaaaataagacgtggtgtggtggatatgttgtctctaat

SEQ ID NO: 200637 - DNA, 315 bp, Zea Mays
cattccggggttttgtatctgatgccaaaccaaggaaatctatgggcttgttatctgatgtgccatcgtcatctatataatgatcagctggaagttgaaggtcaaaagtgccttgtctgcttcttggaccaacatcacttgatataaatccatttggtgaggactgcacactgccttctctaaggaacttcatggaggactggtttgtatcattatgctctccaatagctttcctgtatgttgtggacattggaggaactggcatctgccacatcatctttgcaccgttttgtggcacttgtgatggtgaatttg

SEQ ID NO: 200638 - DNA, 412 bp, Zea Mays
tccggcatcaccgcaccttgggggaggaacgtgttcggatggcatcataccatctggacgacgtcgcgcacctgtggtacagccagcttgaagaagatgatggtgccccgtcatggggtcgattcaaagacttcctgaatgagaggttcggacctccactccgttccgcgccgctgttcgaactttcggagtgccgacgcaccggatctgtggaggagtactctagtcgtttccagacgctcctgccccgtgccggtcggctggacgaagctcaacgagtgcaactcttcaccggaggcctcctcccgcctctcagtcatgcggtgcgcatccataatccgaccacgctcgccgctgcgatgagcctggcgcggcaagtggagctcatggagctcgagcgaccgccggtacg

SEQ ID NO: 200639 - DNA, 476 bp, Zea Mays
ggctatttgggccgttggatcgtcttcgcacggtgcagattagatcgcatcattatccaagcggtacgcactagggaccaccggatccgtgatcgacggcccatattcaatcaagtcggatacaatccccaccacacaatctcccatccacggtctaagttcaatacatgaagggatatgtttcttttaatctgattcgctcactgcaagatcgacggtcgaggcaacactaagcgaaagggtatgtgtgttatgatctcagccgtccacataggatctgatgtcccaggcgctttcttccccaacccgcgcccagacggcggcgccgccctgcgcccaaggcagagactcgccggcgcaatgtccagtactgggttctggccgttgatgcggaatacgactaggcggaaaagggaccggagcacctaacaaacgtgatagagagctccataccagggatggatgtgctgaccgac

SEQ ID NO: 200640 - DNA, 440 bp, Zea Mays
cacgatacatggagcggatcgacggttttagcggtgcggacgagctaagcgcatggatggatcttcctggcgatgatgacggtgttaggtgtggcgatggcgcgacggcggcagcaggcgtggagaagaacgtgtaggaatgcgacgaggctcttcggtggggagcactggcgatgtcaagcgacgcagtagcaatcacggcgacgacagcgagcagcggcaggcgagtagaacagaggcgaggagatgctgggtaagctgttgctggcagcgagggaggctcgacggcgtcgaattggcccagcagcgatggttggcaagcgacagtgcatggattatgctggcagcaggaatggggcatggggaaagcgaaggaggtcgagcacggactcaggggtcatgggcacattatttatagcctagaaagggggaagggacgt

SEQ ID NO: 200641 - DNA, 335 bp, Zea Mays
tctccgtggagctgccgtgtgcctcgcggaggaagtgctccactgtgtgacccttaattcctcaccggaattactggtccatcgtggatcagtcagcgccatggacttcaccactgccccctcggaatgccggtaagaacctcctacgaagttcgccgacgtgccaattccattttgcgggtgtcaacactagagttaagacactgtagtgacggaattgcccggcgccagccatggcgctgccactggtgttcgtacaccgttgggtggggattagtctccaccgtagctgcgcggtgagggaaggaagaggcagcgtgtgccgtcgatcgtgc

SEQ ID NO: 200642 - DNA, 328 bp, Zea Mays
cgcaggcacgcagccgcgagcaccgagcatagcagcatcggaatcgggcttcggttgaaggggaagaagacggcgccgcataggagagtctgacgagtgggcccgcgtgccagtgacatccagggagtgccgcgcgtggggtttcgggctggcattcccagttgggccgagggtgccgggttattggccgagaatggtggtttcagcccaggggtgattctctcttcttcttcttttaattccttttaacatttctaatccaaagaagtcatttatttgaatgtatgctaagctttagggtttatccgaagtttaatattcaatgctt

SEQ ID NO: 200643 - DNA, 511 bp, Zea Mays
ctcccatgggggttggtgacatcgtggaagccattagaagtggcgatcccgatcattggtgggtgtcgggtacccaggaaaggggtacccaaggcgaggctcgtaaacctctctctagcccatttaccaaccaagtccccgccgagtaagtctgtgatgtcaggcgaatgaccaagcccctgccaagcaagcctgcgaggcgagcgaccaagtccccaccgagtaggtctgcgaggggggtgagcaaccaagtccccgtcgagtaagtctgcgaggcgagcgatcaattccccgccgagcaagtctgtgaggtagggcgagagaccaagtccccgccgagcaaggtctgcgaggcaaagcaaacgaccaaacaaacctgcaaggagggagcctaggccgacgtcgttagtccatgacggtcataataggtcgcgtcgccaccaaaccatgtccacaccatgcgtacagtaacaagagggtcacgacaacaaagtgtccacccatgtatcgg

SEQ ID NO: 200644 - DNA, 623 bp, Zea Mays
gtactgcagtccagttcaggtttaccaatttcatccatataccaggtgaggaaatcgtaacttgggattcttcttccttgtagaacacaaaaaactgatgcatgtggaattgtgaaaacaatctatgatagtcttttcaaagattcttaggtgggacgccttgaagtgttcctcattcaatatgtatttttttaacatttggtgtttgaagataatcttttaaagtacatttaacaaagtgtacttaaatgtcttgttctctccatatctagattatacctcttgtgttcaattttttcataaatgtctttgcatgcttatactctcactgaactgtatcaatgacttgcatttttgcacagcaatcggatgtcgagtatcagaaaaattcagaataccatccaccagaacgcctggacagcagtgatttacgcatacaacttgctgctgctaaaaagtttcttttaggaccagaagccaccgttgactcaccatctttgaactctgtgctgagaaatagagcgaactgtgtaactgatactatttcagcttatgacagtagatttggaagctctctgaacccagattggcaaacaaaaacagcattaacatttcaaagcaat

SEQ ID NO: 200645 - DNA, 629 bp, Zea Mays
aatgcccattgtcacactagaaacatatgagaaaaagtgggacaaagtagtgaatgtgtcaaattttaaatgcagaggaaaggtccataagtaatgagaaaaatcatcaagaatgactaagtagtatttgtaactagacacgctaacaacatgatacgtccacaaatcataatgaaccaactcaaacaacttggaagctcaactggaggaactagagaaaggtaaatgggtatgttttcctagctgacaggcatgacaaagatcatgcccgcttttattacacgagatagttgaagcaatagacaaactagacagcacatcagagccaaggtggccaagacactgatgctaggtagacacaacaacaatagacatggcacaggaggcaggagaccctaggaggcagtgtgtagagggggatgttatcagtgttgatggtggtgtggttggaggcaccgaagttggccacctagtttttttctcgaaccacgcaggagaggtgcacatcatttcattaaaaagcaaatagggaggccatgggagaaaagagtcccccaaggccaaaaaaatacaacacccactctcacaaaatacaatacacggccatgacctcctagggtcatccgtgc

SEQ ID NO: 200646 - DNA, 377 bp, Zea Mays
gaagagggagaagttgaagacgctagtgatgagcccgctgagtttaagcttcgggctgactaggcccctgtgccgcatgtcgtcggggtcaccattccaacaagctgtatcagaattcagggtggtggccgaacagattagcaatagagatttggtgcaggagtaccttgccaatagggtatctccaacattgagtggttggagtatgccaaagctgaaaggaacgaagaagaaggatgaacttgtccgattgccctatcgtttcaaatttgagaaataattcaaagggccatgccaagagtggttagaaatgatagaaactatgtgcaacgaaattttgggcaattacactaaaaaagaagatcagctaatgactg

SEQ ID NO: 200647 - DNA, 271 bp, Zea Mays
cggggatggctacagaaactacgccatacgagacgaattaccatgtgctttttccgatacttatcactataccaacaactacgactcggataacacatccataagataggctcgggaacatgtttgagcccccgatcttggactcggctctctgctcggtcatgatgcgacatacaggggccagacgtcctccccctggtccaagtcaaccgcaagtacaaaggccattccggcggccatgctgctacaagggcttgggcttgtctcctct

SEQ ID NO: 200648 - DNA, 400 bp, Zea Mays
agatatattccgcccatgggagccagcgcaaccagtcgcggggtcgatctcccgtcaagcacctgtgatacatgatgatgaccttgttcgccgattcggactggccgtctgactggggatgaaatgtcatggtcatctgtagcttggtactgctcaagcgcatcagctcgctccagaagttggaggtgaacaccgagtctcgatcagagacgatcgactggggaatgccgtggagacggacgatgtcggtgaagaatgcctgcgccacagactcggccgtgtacgggtgcaccaggggaacgaaatgtgcatacttgctgagcggtctatcaccatcaagatgacggtcttgccgcggacgcgaggcagcgcttcgacgaaatccatggcgatgtccgtc

SEQ ID NO: 200649 - DNA, 287 bp, Zea Mays
tccataatgaactcctacacaactaaatcccctcttgttctgatgacaacaaacccctgaatcctatgatcatttctctccactatcttggtttgataccttaattctcctgctgaaccagaatgtgttataaaaagattactctcttggtttcgtacattaatccccctgctgaaccagaatatgtgttaaaaaaggaacggagggagtacttatatgattctaatcctctattgctagaacgacaattttagttaaccagtgaccatgatgatctttgtcctcgt

SEQ ID NO: 200650 - DNA, 431 bp, Zea Mays
caagaaacgtaccggatgatgattggcttctccccctctgacttatgccgttgtgctgctaggaactatgcagggaactatccagaatatccacgccaccagggaattcgatgaagggaagaggagctatggcacacagagacgaagagaagatgagcgagggcgcacagagacaaagggaatagcgacggcgcactgacctccctaagatctgcgacggcgcacaggacctttgcctgactctatgacaatggggaagaaaccacaagcggcgaggaatccaatggggagacgagcagagcgggaagaaggaagatctcaggtggaaccctagcgtacctccggtgtgggacctggatccaccgcgttcagaagatagaataagtaaattataaacactttcctatcacaactcgtcaatagctcatttg

SEQ ID NO: 200651 - DNA, 294 bp, Zea Mays
cacctcttggtgtgatgaatctcttgctttagtgtatgaatcttggtttaaaactcggaaaatcagaacatgggtgctctctcctgataaaaaagatgtcagcccacgcgttttattcgaccggtcttcagaagatgtatactctgaccctggctcaccaatgatgcgaagaactgtgatgggaacatatgtcatcgcaaagatcaagaaagaagacggaaatatttatgtcttgttgaatgggatgggtgccacaccagaaggaaatattccattcctcgatttgtttgatat

SEQ ID NO: 200652 - DNA, 286 bp, Zea Mays
aataaacaaaaggtcaggggccctggcgcaataaatctcaagactcaggctaaccccgcagaggacggcgggttattttgacccaaaccgaggggcccaaatgcaaattagacccgcgaaggggtatcgggccgttctggccgttggattagactttagcggccaggattagatctacttaataccgaaccggtattcaacaggcgcccctagatccgaatctaacggtcaatatcttatgagagcgagatcggatcgggtccgtccgatttcatccaacggcgca

SEQ ID NO: 200653 - DNA, 280 bp, Zea Mays
cctcaatttcagagaccattttcatcactgtgtggccgtccccggacacccgcaggttcttgaaaatgtgaaggggtgccgctggtggtgtagctatcaaaccaaatgcgagggctaggcgctcactgtgcattgccagcatagcttctttctggtcttctgccacatcatgaggcacaaagcttgtatcaggacaataaccttcttgctttaacttagctgtcattgccctgagctttgcatatatttgttctgataaaggatgcgacttgtctgaagc

SEQ ID NO: 200654 - DNA, 375 bp, Zea Mays
ttaaatactcatcctacacaatcattttaaaccttaggtttatgtgacacaacaactccataagcatggccacaatcctcacatacatcgaatcaattagagtagcattagacttatatctacactagaacatcctttgcataaaccacactccaacctaacttttaccacactatacaactactccacaaccatgaacacattcacgtcactgggtgatatggaatgaaacatttttttgcaagcactaaatacaaccatagcatcacaaaatagaaaggagaggaaagattcttccctaacatcaccatagaacaatacacatatgcacaacaacggatctgaccaacataccacaacgcattagttaaagac

SEQ ID NO: 200655 - DNA, 345 bp, Zea Mays
cgaggtagaagttttaatgatgagagggaccaaactctaaaccaggtgtagtttttggcaccctgatgatcgttcatatcctgtctaattacatcactaaatgtatattttcttgattttctctatgatgaacagctgcttaccgaaatggatggttttgactcggacatgaaagttattgtaatggctgctactaacagaccaaaagcactggatgctgctctttgtcgacctggccgcttctccagaaaggttgttgttggtatgcctgatgtggagggccgcaaaaagattctggatgttcatctaaggaatattcctttggaagaggatcacggaataatc

SEQ ID NO: 200656 - DNA, 309 bp, Zea Mays
cctgattctacgagggctcttacgcaaaactcccacggcgaaggggtattggtgattctaagccgttggatcgtcaaccatcggaccggattagactttccccttaatgaacccgcatacaacgttgaccattagatctaggatcaatggccagcgactcgtccacgcccgtgctcgaatcatgcccatccgagaccagatcaacggttgagatgagcccgacccaaaagggcatgtgtgcacaaatccaggccaccatcttttgatccaagggcccagagatgcccaatcccagatctaatcctaaac

SEQ ID NO: 200657 - DNA, 434 bp, Zea Mays
atggtatttcttgacactaatttaaacaacggttgcagggaagcacaaaactttctaaagcctacatggtcaaccatagacagcgggtactcatgcacacatatcattaatgcaagttctttcctagcaacatcttgatcaaatacatacttctctaaacaaacactgccatctggattttgtgaaaatttcaaggaggattgttttaggccttttctagcttgtcgtgactcacatgtatttatgtggctttgtaaatggctggtaccacttttaccttcagctgtcaatagtttgctacaccaattgcacttagctttccgtttaccagatacagtaactctaacaaaatcctcccatactttagacttcaacttcctcttacacccaacctgtgcagcatcatctatttcaacatcattccttgtcccttg

SEQ ID NO: 200658 - DNA, 425 bp, Zea Mays
gtatcgtcctggccatgctggccgccgctgccaccgcgatgcttcctttctagatgaccatggtggctttgagctagcatcatagtcacagagcagcaattcttctgggaatctatgttctcatggtcatgcatgggaatgggagtcgatatgactacgcttattaggagtttatgaatttctcctcaagatatctaggcctttgtttcatcctttgggactggttggttaacttttttgcatgtttttcttcgtttgtaatttgaatgacaatcaatgaatttattgtgtagttgtatttgatttgttttttgttgtatgcatgtaatatattattagagcacttgtttatctatttttcatcataccatggtttggtgagtgagcatctatatgacaatagcatgttatcactgaaacataac

SEQ ID NO: 200659 - DNA, 1217 bp, Zea Mays
tgatagcagcagatgctcgactagtgctcgtttggcatcaattgccccatactctggccggagggagacttctgtctatgcgactgatatcatcagtggaatcacgatacactgcaaagtattcgtagacaagatctcccggatcagtattttccaccatgctgttaaaattgatctagatgaaattgctacattacgtatacatgccttcgatgatgaaggtaattcatatgaaccttttgtatctttcattcttacgttatgaaattgacatagtacatataaacagtgatactgctttttctatctagtacttgggttcattgtttgtagatcatcagtttacatcacattttgttcccttcttttctggttcttatttcttaatgccccgaagtcgttgttgacctaagagcttccttttggaacacttttagatttagtaagccttttttccagtcaggcatagccgtttagaaccaaaaaaagttggggtaggctagagatgaaaccatctatgaaccacaaacaaaaaggggaaaatttatatacaaaactactgtttccactgttcacaacttctaaatggtaaacaaaggcgaaccatgtcgtttaggccctaagcggtgaattatattgttaggccgtttaaacccttttaaaccgttaaaagccgttttagtcagaatcgattaaacatgattaaatgagctaaatggacatttaatttgccatttactcaatgagaggatcagaggattacaactaccacacttggtacccaactaattaacaccgtaagtacataggtgcagtgggatttagttttcttccaaaaaatcatttggtagaatacttatattttacatgcataaatatgcatactttctagcatgtttgaattctaaatacattaatatgtatattttagtgttgctatacaaaatcgtttaagccattagctccatttaaacaccataaaaaatggcctaaatgctaagcaaaggatgaccaactgtttaccatttagcgtttaggataactctgctattttcctggcattgctatattttcttattttagcatacttaatttggttccttttgggtttagaaaatgtgttctcgacattggtgggcttgcagtttttgtggcaccttaccccgaggttggttgataacagtagccatcatcttattcgtattccactgaaagaa

SEQ ID NO: 200660 - DNA, 412 bp, Zea Mays
gaaaatcagagtatattagtttctttatcctctcgttgcgtttggaaagagagtctgtgtgagcggccacaccttcttcgcataaaatattatggtaactttgacagacctttaggcaggtttttgcgtgaccagctatttgatcaggttagactgagctcttccacatctatattttctttaaaaccttgtattgtagttaactttcatttttatttcagagcaagctttgccaatcttgtgagctaccaccagaggcccatgtttattgctatgtacatccccaaggcagtttaacaatatcagtaaggaaactttcaataaagttgcctggcaatggtgaaaatgatggtagaatttggatgtggcatagatgcttacgctgccctcgagtcaatgggctccctccagc

SEQ ID NO: 200661 - DNA, 548 bp, Zea Mays
ggaaagtggatggtgcattggtaaggccgaatggcattacaagaaactcgaaatgaccacaatgtgttcggaaagttgtcttgtggatgtcgctgggatgcattcgaacttgatgatatccactgcgaagatcaagcttggtgaagaagcatgaaccccatagctcatctagaagttcatcaaccactgggattggaaacttgtcttttactgtttttgcattcaactcacgatagtctatacaaaaccgccatgtattgtctgccttctttaccaacaagacgggcgatgaaaatgctgatgtgcactcacgaatgatcccctgctgcaacatttggtcacactgcctctcgatttcatccttcagaagttgggggtatctgtacggtcgcactgccaccggttctgttccagacagtaaccgaatatgatgatcatggcgacgcgaaggcggcagaccgtgtggttcttcaaacaaagcagcaaatgattgtagaagttcctccatgcattctcggcttttgtcaatggctgtgctgcagagaatc

SEQ ID NO: 200662 - DNA, 313 bp, Zea Mays
atagccgcaagtgaagaagtatagtcgaccgtgtggatcagttcctagaatctctgctcctctcattggatttgcaatatttctagatccatccttccgtatcaaacattcaggacaataccaatcaccttcaggcaaaagatcctccaccaccccaacacatttcgaatgaaatgcagctggacagccatcacagcataacaagttgccatccatgccacaaagataacattcatcgctgtttccatcatccacttcagcagatccttctggaaattgagaagaacccactgccaccttagcagaagagccc

SEQ ID NO: 200663 - DNA, 349 bp, Zea Mays
atcggattcaaatagtctagacttcccagatcacggcgacgacggacattgggatcctggtagagtaaccggaagagtttgaatacggtagcgtgcaaatcagaaatacagaaagcctcatcggcgtacaaaagtcatggtgctcacctaaacttgtctagagaaaccgtgagcaactcggtcgatgatggggtggtccacaatggtgttttgtgacgacggacaagtgttctaaacaaaccttactggtaaggaccaaacaaccggttcagtgagcttcacatgtatgtatagatactagaacaaactttactggtaaggaccaaacaaccggtaaggaccaaacaac

SEQ ID NO: 200664 - DNA, 474 bp, Zea Mays
gaacaaagtagatctgtcacatctaggctgggaagagatgtgaataaagttaaaaatgtgtttggaattgaatacgtaattttgtttgaaggagaagcatacatagtcatagttgaaggataatacacacattgtaaaaggataacggttgaagtgtacatgtatttgttgcatgctacatttgtttgtacaaagcaaagtatactaagtagatcatgcagctaatgttactgtacgtaaataaatagcatgaatacgacgtaaatatatatttatatctgggcaccatggccatggcttgcagagtcaattagaccacaagtttgcaattgcagactaatacacttaaacatttatttatacaaatgaatatttaaattgacaactggtgttttttgcgtacttaaattgtatatgaggttgtaccttagtatctgaaacatttcgtgcttcatatctgcaatggggaagcag

SEQ ID NO: 200665 - DNA, 306 bp, Zea Mays
gaacaaaatcacatgttatcaaagtgatcgagggattcgagacagtcacgttcaagtcaaaatttattgagtggccacccacacctgatttgaagttatcatctgaggatggaagagtcaaagttgcaggttattgactagatattatcagttccttgaatctaaagaacatattatcagttctcgtgcaagatattgctaaaattcaaatttcacacttttatccactattttttcttgcagccctcctcaaatctcaaggattagatgttaaaggcttgatgaaaactgcacctgtaaaagaag

SEQ ID NO: 200666 - DNA, 290 bp, Zea Mays
agcttctgctctagcgcgctactaggttgaaggcctccacaccgtgacatacttgttgaatcgtcttcccacaaagaccaccaatgccccttgcccccacgtttctcatttggtactccccctttctacgaacacctccgatttcgcctgctatcccaaccttttagcggttgcttcccacaaacttgcaccttgttccactcagtgtgtctttctcgtttactcttctgaccataagggatatcgactgacgtcttgatctctcttccaaccgcatcacagtctcccgc

SEQ ID NO: 200667 - DNA, 1963 bp, Zea Mays
cggggctttggagcagaggtggcctccgtgggatgggttggccgagcggtacaagctcatcggcgccacctccctcgccttcgtcatctgcaacatggacaaggtgacccatcctgtttgtctctatcacgtggacggttccgtcctgggcacttggcacgggatgacaggctggcaggcggctaattgcactgttacgattttgctctacggtattttgagctgctagaattaaaatgactatgaattcgagttgttgacctgctatagttttgctcatggaaaactaggtagtcaatgacatttaccggatattcagtgggaatttgggtggcaactggcaaaacgattgcactgtttttttcctctgggtttcctttagagaactttagctgaagtccactgatgcaatagtctttgtgcttgctctaaggaaacgtgccatatctaactgtcacattttttagggcttattttggaactcatttgcatcactagtacaaacatgtaaccttcactatgtaccaacagggcttttaggcatttccttacgagcatgaaattgtttgaagtaatgaagttgctatttacagtttaatgcactcttcttcatgtgacatatttatttaattctatgaaagcttttatggatgatcggtccatcatcctttcctgagaggaacaactgttcattgcaatattctaattttgcaggttaacttgagtgtcgcaattattccaatgtcacatcaatatggttggaactcatcaactgctggcttagttcagtcctcattcttttggggttatgcattgagtcaactaccaggaggatggctggcaaaattgtttggcggaaggtttgtttatgactttagggtaacaaaatcatcttgaatatgtacgaatacagtgtctatgcttatgaaaatactgatctaatatggcatctgcttgtgaagtaggaattgccaactgctatcctatggttcataagctgaacatatccttatttgtgttacccctttccaggacgaaaatactttatattaccattaaaactaaaaacagattaattctgctcaaacttttactcctacaatacatatagtgtctatttatctatttctttttctgattgtaggaaagtgcttgaggtcggtgttgtgacatggtctttggccactgctataattcctgttgtagcaggttttatgccagggcttgtactatcgaggattctggtaaactacttacgaaaagtctgctcagggttgttggtccgaaatttgctctacttattgtgcttgtgtattcatagaatgtagtctgtaaaaaactcgaccaacggggtggggggtattgacagcccctgggtatattaagaagaggaccttctcacgtaggttgagaaaatatgatcttgggttgggagttgggacggatgtagtatttaacaaggaaaatttccagaaatgttggaactttcagaactaagtactgcaaagagatagtgaaataacacattaccatgcagaagcattatgacatgctgatatccataattccatataaattctggagcatccacatttgagcacagtgtctagtcatcacatctcgtttacttgtactttgggtgtgttaacttgaacaagaatattttaccatctttatttgtttgcatttattctttgtaagttgtgttctatgatgctaggtaggtattggagaaggtgtttcaccatcagctgctacagatttaattgctaggtaagatcatatcctagtttggttcctttcttgacatttattgttgggacttcccttagtacaacatgtgtcaattttgttttctacataatggtgtatattgtggttctaatttctagcacaatatggcagcttctatattggtatttccccccatgcccctcttttaatattcagagtatgatttttt

SEQ ID NO: 200668 - DNA, 355 bp, Zea Mays
attggttatacaggatccaacacaagtgggttaggtcttccgaacaataactgctctgttggtgctactcttcctacatcaaatatgaacttaagattaccaggttctcctggtatggttttgggaagcaattcaccattgcctttgaatgctccctctaggtaaatggtctgattatcctctagctgatatgtaaaacattccgtgtttatatttgtttctgcaaaatctcaattgcagggatgttcagaggtatggtgtgcctagaccaacctcgatacagggtgacgagcaatcaagaattcattataaccagatggtaaatggcagaaaccttcagcaacctggagttcct

SEQ ID NO: 200669 - DNA, 286 bp, Zea Mays
tctcaatatgtgcttcactcactcctcagcatcatttggctcacttgccttaatctatcattgaacttctggatgacgatgaggacttaattaggcatttataacatttaattttattgtgatatcgatattgtatagagataagggttattgacaggctgcatattgtgctgagaccagttctccaaaggcaacgtatcttatgcatatgggtatggctgtgcacgtatgcacatctttaatcccatcccttcaatcaagatccagtggctactgtcgttttaac

SEQ ID NO: 200670 - DNA, 661 bp, Zea Mays
cagaatcagatattaagacaatgaagtcagatgagaagatgtctactgcaactctttcagagtgcaatgactccagagctggaatgaacagtttgagtgttgatgaggctcaagatgacaaagtgagacatgggccttgtcagggtgaggtcatagactcagcaatggctaatgatgctggcacaagtacaaatttaatcaaaatcagccctaccagcggatcagaatctgttaagcaggagaataatgtggttggtaccgaggaagtgatactccacagtagcgatacgaaagttgagaagcattctcacattgacgatgtttgtacagaaactgagatttctttgactgataatggaatatgcgcagtagataaccacaccgatctaactgggtgcactaagcaggaggagaggggcagccccatgaatgaagccaatgatgtttcatcacatgacattgtatttacaaggagaggtagaaaatcatgtgaggcaaagcagaggacatgtgaagaggaggcacggtttgagaagcgaatcacaaggtcagctacagttaggcagagagaagtttctgcgagctcacacaaaacttccacaaatgaggctgcactagaaggcagagggaggaagggagatattgttgctcactatacaag

SEQ ID NO: 200671 - DNA, 408 bp, Zea Mays
gaaacaaaccagggaaggagaacgacggcggtgaatcgatgaagcgcggagattacgacggtggaagaggtgggggcggtcgtcgatggcgatcgcaggagcgaatgacggcgacggggaggaactgattattttagggtttgggtggacccgagctgaattaattgaaaggggtatgatttgtctggctcgttgaccatattagctcggttggcccgcgggggagcggcgagggactgtgggtccactagtcagcgcacagtcagtgtgaaggtttggttactgcgtgttcataataagcataaatagctgtgcaaagtatcgtaaacagtttacaaaaaagaattaatcaagacccacgccaaagtacgtaatataataaatcccaattgatatgtagttgttaac

SEQ ID NO: 200672 - DNA, 325 bp, Zea Mays
ccataatcgtggtttcaaaatccttttcacacccgagcccacacgtgtgctgctctttctttgcatcttcgtgtgtgctctcctttctctagacttctcagcatcaccaccattgtgttcccagtgccacagtctctcctcgccgtgctgctctctagatcgtcaccggcggtctaccctcagcttcctcgccccctgttttccctcatctctagtgagctagtcctctcttcttcatctcatccatctggtctagtgagcttcatcccctatgcattctatgaaatctcgtgattcttgtgaatctctgtgaaccttgtgtggt

SEQ ID NO: 200673 - DNA, 369 bp, Zea Mays
gtcgacagccgttagaggtgaccactaaccacgagcagtgtgttttctgtacaaatgctagatgggtgtagcattattcattgtgtcaagagcatttgtatttggtggacctccttcttgcccttggtcgacaacaccctatgcagtggcttcataggggagaagccgaagtagcatgcctggcgcggtggcgagggggagacggaggatgagtcgctccccttgtcctgctcccacagcatcggtcgccgacccaaacaactaatctaggtcgtggtgatgccgacgaggtggtctggtggtgcttcaacgccaaagctggggtccacgtgtccatagtgaacgacaaaccccgaggcatcttgatcg

SEQ ID NO: 200674 - DNA, 450 bp, Zea Mays
agttcgagatgttaacacgcgatgctgggcgtgtacagaaggatacactgaaaaagatcctcgagttgaatgctgatgctgaatatctgaacaagttcggcctcaatggcaggactgatgtagagagctacaaatcctgcatcccgctgtgtgtgcacagtgatcttgagccatacatccataagattgctgatggtgatagctccccactcctcactgggaagcccgtcacctccctttccctcaggtaattacactgcttgaaaaatgtgtcgtcttatcgtttatattagtgtgtggatgtcggtgttttgtaacttgatgttttttttcttcctttggacgcagttctggtacaacgcagggaaggcctaagttcttgccgtttactgatgaattgcttgagaccacacttcaaatattccagacttcatatgcatttaggaaccg

SEQ ID NO: 200675 - DNA, 347 bp, Zea Mays
cggatctaaaaccgacccacgagattagatcactcttttcatcgaaccgatatcggatatggaccgctagatcataatccgacggtcaacaatagtgcatgacccaaaccttccagaaccggtcgatttaatatgtacggttaggatttaaatagctgaaggggtattcattgtcagatcaggagcgtccgtagccgatctaacggctgatcacctcttcacaccacaatcccacatcagggatccaacggtccctggacttcttcccctccttgctccaagccgcgatggcgcgcacaccatacacggcggcggccacgccggagagcaacgacgccccgattttg

SEQ ID NO: 200676 - DNA, 340 bp, Zea Mays
aatgaatcaaaacaagcctaaccaagatcctaagcctatcaagtgttatgagtgttgaaaaggacactttgctcacaactgcaacgccatagcaccaactcccttgtccaagcactcaagacctttcacattcaatgctcactacatacttagaaaagttacaagtgggaaggtcaaagtcacatttctaggtccacgtaacaagagtaggcctaaatatatttgggttgcaaagtccttggttgataaagtcatgaccccctgcaagatagggtgcctaagattcaagcttgatcccctttgacatgtaggtgaactacaagaccgatgcgagacattg

SEQ ID NO: 200677 - DNA, 344 bp, Zea Mays
gaaggttaatgcaaatagttttggacatgaagattatccagatgcaaggttgatccttcctattttattgacggccaatgacaaaatcgttttatttattttttggcctaaatttatcttttaagtttatatgcagggaaggtattattggtgatggttcatttgactgtactgttgatcatgagaagtatgcgagcatttatggacctaccaccggtgataagattaggcttggtgataccaatctttatgctgagattgaaaaggacttcgccttttatggtgatgagtgcatatttggcggtggaaaagttctgcgtgatggcatgggacaagcttcaggg

SEQ ID NO: 200678 - DNA, 276 bp, Zea Mays
gaaaaacacaatttaaacaagaacttgattcaaattaagtgttaatgcaacggatcaagatagagtgaaggacataagaggttcttgcacttagttgctcccacaagatttgcggaatcaacttgagtaattaatattgcaagtgaagaatggaataagaaatagaagagtaaaaatcacaagagaataagcacacaatacacaacgattttaccgtggttcagtcaacctcaaatgcgtgcctacttcatgttgtggtatcccaatggataacag

SEQ ID NO: 200679 - DNA, 594 bp, Zea Mays
attaaattttggctgcatgtcattcctaggctagctcgattcaatgtagcgagagagagaggaacaaatttagattgtgtctatatgcaggtgaaattttagagcgcggtggagctgctccggttgaagccatcccccgaggcccgaaccagtaaattacgccgaatccggcagtcgtatggccctgcacaccagtgctttgtgaaaagcttgcagattcatcaattgacgtgcacttgccttttatatggacgctgacgtatggaggtgcacactctccacctccgtatatctcgccacctactctgtttatattagaaggttgattgctgacacacaacacctgctcgtacttttttgtcgaaatcatgacggacaacaacgctaaacatatagtacaatcttcttgtcttgctgatctgctatgcccctttgtgaaatctgccggtgacatcagcgatggcgtcttgctgatctcgtggtatacctgatgtttcctcggtctcagcttttatcacgcagtagtgcacaagtgacatgtgttcgctggcgtggcgcatcagtcaggcacacgagtgccgttctttctagtct

SEQ ID NO: 200680 - DNA, 384 bp, Zea Mays
ttctcattaggcaacgccttaatacagtaagccacatgggccatgaacccactcacgcctaagcccactccggcccaactatcctgacattatgactccttggcctgctaccgcgacgcagcgcctcatatcctgtgttcgctctgacaacagaatgcttcatgttgacatcggtgctcctgacattccccctgctaaaggagctggttgtccccaaacagcagcttccgaaaattgttgcttcaagtcgatggcatcctcccaggtggccagcacgtcaggcatgaatgaccatcgcaccaaaacctgctcacatgatttggttcctcgcaagaccgtgcgtcgctgcaaaatggtttcaggcacactaagcatatacttgtc

SEQ ID NO: 200681 - DNA, 452 bp, Zea Mays
ccttcctggtgaatatttctgccctgtttgccggacacttgtgtatcccaatgaggccctacaaactcaatgcacacatctctactgcaaatcctgcttggcatatgtagtggcaaccacacaagcttgtccttatgatggataccttgtaacagaagctgattcgaaggtatgcatattcaatgagttcttgtatgttgtgaagtaatgacactcctcttaggctcttactatcacatttgcaatctacagcctcttatggaatcaaataaaactcttgctgagactattggcaaagttgcggtctattgcctgtataataagagtggctgccaatggcatggagagctatccgcctgtaccacacatggtactacttgtgcatatgggaactctcctgttgtttgcaatcgttgtgggacacaaattgtgcatcgtcaagtacaagaaca

SEQ ID NO: 200682 - DNA, 420 bp, Zea Mays
gtttagaccagtcatcgcggacacactcaatgaaacattgcataaacacgttgtcgagacatgcgccatcagcaaaagattgttgtatgtcacaacaattggcacgatattcaccgaagtcaattatatttctacatatgaaaagattgaacatacaacaatagaaacaaatgttatttgtataaatgagatataaaattacataatatatatgaaacttgaccattgaattgaaggtactatatgggaataatgagatacaaaattacataatatatatgcaatttgaacatttaattgaagccagaaatcagtctagctagtccatcaaagtttggttaagcactgcccagctagctcttctccacgccaccctctctcagccattcagccaccaccctctctccgtctccgagccct

SEQ ID NO: 200683 - DNA, 395 bp, Zea Mays
gcttggcatgggtgtaagcgccgcgtctctcacctacgagtctttggctgcctcgcgttcttggccacatcagcagaagcacccatgggtgttcattggctatgcgaagggctcgaaggcctactacatccttgacctaggaacacagcgtgtgagcacggcgcgggacgtagtgttcgaggaagggcgaggatgggcattatgggacaaggcggtggatgacgacatgactccaacgtacgatgacgacaccatcgagtatgtccacttcgagggagctagggagtaggcaactcttcttctccgagcaggtccccaagtctccactgactccgtgctatgctctccagccacgacttcggctacagtgagctcttcgccaccacgtactccag

SEQ ID NO: 200684 - DNA, 564 bp, Zea Mays
tttttggccttctgtgagctatatcacacattttcatggacaaacaaccatgaacattgttgggggagggccttcgtcgccgaagggctccgagatatcaactttgtcaagaaaagcaagtttcaggtaaaaacgttcatcttcgtcatcgaaccaaagttgataaatggatgaagtcaagaagagctgaagccgaaggaggaagcttcgggtgatacgtggcgacctacgaagcagagaagaaggcagagactgtggaaggcttgatcaacaagatatatggatggaaaagtacaatactaccctcataatatttgtagttcatatgtataaggtttgatgacatgtttgtaatttcagacgaagttgtacatcgtggctataaatagaagaacggtgccatgcataagcatgcattttgatcagagcgatccgagttgctccgactacaaagttgtatacttcctttgctttcacttgtttgagtgtacaaccaaaggtatacttgtaatcatttgatatattgtaaagaacgaaataatgtgcttacacattcagatgagt

SEQ ID NO: 200685 - DNA, 295 bp, Zea Mays
atcatgtctcagcgtgcgcaataagctcactcaaccttgatgagtcgtcctcctcctccatcagctccaccatcgccattttttgctgaacgtatcttgcacgagcctcgtttgcgatatagttcccggcacatccaatctctgcaaatataatgggacaaataagttaggaaaaacaagataaatacaatgtacaagcaaaaccaacacgttcttttctcaattacttgcactcagatgaccagcaagattgcccaccatttgtttctcggctctagctgcctctattttcctt

SEQ ID NO: 200686 - DNA, 412 bp, Zea Mays
attaaatgcatgtttggtcttagtaaaagtgcattagcggccgtacttcagttgtttcggcttgttctcccagaaggccactgtgttccggacacattggataaagtacaaaaggttattcatgatcttggccttgattaccaaaagatacatgcatgtgtcaatgattgtttgttgtttcggaaagaatatgcagccatggatacatgtccaacatgtggtgagtctagatggcaaccaacgatttctggtcatcatgaggaggcaaccaacaaccaacgattgcactagattttcctcaaggaaaggaagttgtcctctttcagtgcaactggttccatgttcctaccgccacgaacaaaggaagaggctaccaaagggatcagtatggaattattgatattgataaaac

SEQ ID NO: 200687 - DNA, 295 bp, Zea Mays
gattggggtagcaagcgcacccgaagacacgaagattgtcgtaagagggatggatgccgaagagagcgtagtaaggagtggggtgggcaactgccttggtgaggagacggttgaggaggtaggtggcagtggcgagggcctcaggccagtatcgagcgagaagagaagcctgaaaaagtagagggcgcacgaaatcgttcgtcgtgcgaatcatacgctcagcccggccgttctgaggagacgtgtaggggcatggcatgcggaggtggacgtcgcgagagaggaagaagtcacg

SEQ ID NO: 200688 - DNA, 331 bp, Zea Mays
cgcaaatttttgatccgagggctaggctaagtcataggcgtggtactccctcgaccgtcgatctccgatctgagggtcatcgttgcataccgactcagcacgggttggatctaatctcagccgttagatgttgatcgggcggccagtgtaagacgatacctcttcgcagtgcgattttgttaaaaagaccctgtcaaacattgtaatcaacccgcggttcgtctctggcgagctctgggtctcgagaattttagtgtttagcccctgctctttttggaatttgaggccccgtccagagaattataaaatcagggaaatgaatcagaaaatg

SEQ ID NO: 200689 - DNA, 309 bp, Zea Mays
ttgatgacgctacacataacaagggcaaataacatacagataagttccagtcctacttgattaacggttcttaaaatattttacatggccaaaagttattacagccgccccccagcggaaccctcgccttgtctctacagattcagctattcggcatcggcaggatcacgctgaaagcgcgcggctaccatctccactgcatctcatacactatcacgagcagcatcttctatggcggctaccgaaccatcgatcactggtgccaaggatatggtggggtcatgactccagaagcacatcaggacgtag

SEQ ID NO: 200690 - DNA, 326 bp, Zea Mays
ataattcgctaatatgaacaacgtaaagcaagaggccgactcacctgaagattagagaggaacaatggtagacccagggcaggaggagctgagtcatggctcgacgagggaagatcaataagaatgatctgaagggcactatctgggctaacctcggccccaccagcagacaacaagctccttgcatctagctcaccgacctctaaggcgacttgtccggttgaaactggggaagagcgaaccaccgtcgccccatcggaccgaggggggatgacccaacgtggacgtccatggaggcatgggaaagagagcccacctgaacatcc

SEQ ID NO: 200691 - DNA, 567 bp, Zea Mays
ctctgtttcatcaaggctaagaaacgcggcggcacttggcgggccaggagctgaatctgtcaaacctggaaatgagagccatgtagtagccagtcgcgccattgatatagctgctcaagttaaggtgagtagctgctttaatctattagtaggctttgtcatcacaaatcaggatacaaaaaagcttaaaacaagattagaaataatgtgaatgaatgcaacatctgcagcaacccacgcatagcacttcgaagagcacctgtgagaagttcagcgccgaggacagtgtgccagggttccgtgtagagcctcgggcactgccaacctcagcgcaggttcctgagtgtggatccacgtggaataacacaggggatcaccatcgttcggtcctcggccgcgtttgcagctctgttcgcgttgcgaggaagaaagggccatcgaattcgaatacgccacagtacgacgctgcagacttgaggaacggcggtgaccgcaaccagcgagcagacaggcctgccgtctcctctcagaagaaagaccagcaggaggttagtagtactcggatca

SEQ ID NO: 200692 - DNA, 271 bp, Zea Mays
caaaatcggggcgtcgttgctctccggcgtggccgccgccgtgtatggtgtgcgcgccgtcgcggcttggagcaaggaggggaagaagtccagggaccgttggatccctgatgtgggattgtggtgtgaagaggtgatcagccgttagatcggctacggacgctcctgatctgacaatgaataccccttcagctatttaaatcctaaccgtacatattaaatcgagcggttctggaaggtttgggtcatgcgctattgttgaccgtcagat

SEQ ID NO: 200693 - DNA, 477 bp, Zea Mays
gaacaatccaccataatccacacgaatacaagctcaagcgtatccggcgtcaatgcatgtgcagccatcagggctactacaacacaacaagctttcataacaaacgcaacaggcgcagttgtgactcgatagtcggggtacaagacaagtccgcgcaacgtgcgcaataggcacaattgtgtctcgtggcagacagacaatgcctacagggcatgcgaaaaatacgcggctcggcgatggcggtccgactcaacaggagcggttcgattaaatgagggtgcgacatagcaatcacatgaagcagacaagttcgtacgacacaaatattgtgtcgtgatgacagggcgcagccaatatcataactcagccgattaataacgtagactgatcagcgcgttcgagtacccacaatacaatttaatcgctcgatatgagtccaaaagctcaacataatataaatatttagatcgatttaag

SEQ ID NO: 200694 - DNA, 287 bp, Zea Mays
gttgatgatgtttctgtggacactggcagttcaagcactgggagccagtatctggatgagctgtctgatttcctaactcaagcagacatgtggttagggcgtgcagagcttcttcaaagcctgctgggatcaggtattattgcctcgctggatgatatagctgacaaagaatcttcaagtagactacgtgacagattggtcaacgatgaacggtacagcatggctgtatatacttgtagaaagtgcaaggtattgaacttacaatgtgtttgtgattcttaatgctt

SEQ ID NO: 200695 - DNA, 321 bp, Zea Mays
catgccatcacttcaccccacaatcccaagtaacaaaataactctaaccgaacttggcatttagccgatcgattcctaacccatttttcataccaccactacacgacatgcctactacgttaaatgacttgttcacaattcacatacatctttaccaaaacactcccacatcacttgcaacttaacctaagcttcactacataattttaggacatctacttaattcatgaatatcatcgtcacacacatcgactcgatttgaattaaccacacatgtctatcacatgaatggagcatttcaacaaatatcctaaaacaaac

SEQ ID NO: 200696 - DNA, 319 bp, Zea Mays
cgttaatgccctgcaaccgcaacttccaattttgggtcggactcaaaagctaaggaaactggctgatgcattatcgttatccatccaatttcgggtcggtctccaaaggcctgatctagatgcagtccagctgcttaaatccaacgccctcctttccattcccttctcctggcgcttcctctagtgcctactccgtgctcgctcgctgtcggcttccgcgatcaacccagtctctcttctcctcgccgatcgaatccatcccatcgacagctctcctccgcccgcgatggtgatgcatctgtattctcgctcctcttcc

SEQ ID NO: 200697 - DNA, 1655 bp, Zea Mays
cagaaaacacacggcatatacgaaccatttcgttgtatgattgggggtaagtctcgcatgatatattattgttcacaagcaatagtagctgttacatggattcatctgattgactgcctaaatttctgtaagtttatttcaaatttgtactaatttgtgagacagcactacctgacactttgtctggataaaacacttacactgcacttggatgtagatattcagccttagaaattgacattggcattggatagctccaaatgctgctgtttgggtggcttggaatttagaattggaaatcaacttcaattccaaaggggtattggtctattggacacacatgcacccctccctcgcaattacagagctgtgaccctccatattggggggaattggtcttcaccaagaaaaagaaggcgtccttctctctttcttcgcacagcaagtgcaccacttcttcctcgtgggtgggcgacgacatgtgctcgcacgagctagttgggcgagtggtggcttgagctcgcgcgaagcggatggtcgcgagcaaagtgagcaagcggctgcttgagctcgcgcaaagcagatggctgcaatccaggtgggcaagcgatggcatgagctcacctctgcgcaagctccttgtctttcacgtgttgggcacccctcctattcttcatctttgcgactggcacaaccccctcttcctcatggctgatgccccttctttctattcttcctcatggtcatgggcaggcagccaggggggcaatgccccccccccccaattcacccctaattacataggagccactaattttcttagctaatcaccatgtaaacaatgcaaaataccccttgaacagccctccgaacctgacctcccccctcaaatcctgtcttcaccactgcaggcagcaacatatactggtgcagaccagtgggtgcgacctcacgcaaggtggccggctgaccggctgcgaggtcatctccgcaccactaagaccgtgtccaagcccatcgcagtcgttgactagcccgagcaccggattcccaaattaacaaaatcaacatccaaacatgatttgttatttgccatgtgactggattgcactagcaattcatctacatccaaacatgtgatggtattgtagcctatttccaaaaccaatctgatttggcattgtacccaattcaattccagccatccaatatctacatccaaacagagtcttatagcatgatgttgttaccttgtgtttaggcttgatcatttccttttccctagagttatcaattgtttaacatttcgtggaccttctgtggttaaggtgcaaccatgccaattcacaccactctacttttggttgttatatttgaagttgagctttgaccactccttttccttcttttttggataaaaaattgtaggtattcagtggaagataccgggcctgttgcttgtatatcttggacgcctgacaattgtgctttcgcagttgggtggaaatttaggggacttactgtatggtctgtgtctggatgtcggttgatgtgtactattcgtcaaactggttcaaattctgcctcatctcctatggtgaaacgttgcactctaaaatttgagcctctaatgggaggaacatcacacattcaat

SEQ ID NO: 200698 - DNA, 317 bp, Zea Mays
acattggaatcattctgtccaccttgggcgcagcgctacagagcatgacaggggctccgaggttactcgcggcgatagcgaacgacgacatcctccccatcctcaactgtttcaaggcctacgaagggtctgagcctcatgtggcgactctgttcacgagcttcatatgcgttgcctgtgtcgtgatcgggaacctggatctgatcacgcccaccatcaccatgttcttccttctgtgctatgctggtgttaacttgtcgtgctttcttctggatctcctggacgctcctagctggcgccctcgctggaagatacac

SEQ ID NO: 200699 - DNA, 568 bp, Zea Mays
gcaaaactctgctcctcgcttaaacccgcgagcctccggacccggatgttgttccggttccgcccggccccctcgtagccatcgcctccttttagcgccgccatcccacctcgccggcggccatggcgaccccgtcttatgcggcggtgaagtgcctcaacacgtcctcgtccagccgcaagcgtttctcggtacgcctcttctccgactgctggctgttccgctaacacagaatccagctcgcggaagagttttatggatgctaatgagctatgtgtttctttccgcagtttaagagcttctcgcagcgggtggaggagatcgacatcgatgtgtaccgcagcctccacacactgaaggcggagccatccagcggatcgtccttcttcctcgacgcaattgtggagtggagggtatgcgaccttttctttttcttgcctcgtttatttcaatctctgtcatctctagatacactttggaagtaacatgggagcttaatttggtgcttagagcatcagaaagggtttaattgccttaatcgttgtctgctgtgttgccctgagtgtta

SEQ ID NO: 200700 - DNA, 375 bp, Zea Mays
gggaccatccacatgtggccaggcgcatgtcctcccttggcgccacctcgtcctcagcagcatgctttcatcgcccaacaacaccttctcctctaacaccaactgagggggttgacccatggctgcgcttgggttctatcaccccatggtcagcctgccctcctaggacacccatttgctagcctctgctttcagcacggagacgctgcagcagcgccgacctccgagtggtacttcgactcgggtgctacttcccacatgacttcttccaacaatgtttcacatacctcttccccgcgggcgactgaaccatctccaacatcagcaccaccgtcatcgcctccatcgtcgctacccaagggtgcaattgatgtc

SEQ ID NO: 200701 - DNA, 599 bp, Zea Mays
gcgggccacagctaggcgctcaagggcctccagcggggtagctgatggctcctcttgcaggaggtcagcgcttcggcaacgcctacgctcgacgtgcccagcctccagcagcaccggccaacgacgaggtggctcctgtggctgctgcacctccaccaccaccagcggctgcaccagcttcgccccctgcgactccagcagctcggctcctcaatactgcagcgaaccgaccaatgactcgctcacaaaccggctccctctacattgtctagcgcttctgcttctccgcctccgtcgcctcgccaatccctgcaaactatcgcagtgctcttgccaatccgaattggtgtgctgcaatggcggacaagtacaaggcattgatcgacaacaacacttggtgcctcgtacctcggtcacctggtgcgaacattgtcactggcaagtggctgttcaaacacaagctccactctgacggctccctcactcggcacaaggcgcgctgggacgtcagctacgacatgtgctccacaactccatcccacgtgcgaccgttgtctactgtgacaatgtgagcgtcgtttacatggcggctaacccag

SEQ ID NO: 200702 - DNA, 343 bp, Zea Mays
caaacattggaagcaaaacgagtaaccaactcacaaactggagatgaaaacaacatagaatttgttaacagaaaacataaatagacattctggtaacaattatgtttgacacacttcagatagaaactgatgcgaagtagcatagacattagacacattgaacataaatggcacgcggagtatcaaacacatgatcagaggcctgacataagtgacttaacaagtaacataaacagttttgtggatcccacagggaatcatgttcagctatgctatctaagtcttggctttcaaacagcggcgtctccttggagaatacttgaaaggcagcagttctgcagga

SEQ ID NO: 200703 - DNA, 836 bp, Zea Mays
ctcgccgaccccctctggtgcccctaatttcctccaaccgctctgctatttcagaaggctactaccgacagggtggcggcgcgtacgaccgttcctaccctgatgacccgccgtctgtctacacgccgtcgcgctcggaccggtactggccggaagacgacgacgggggatacaagggtttcggtcggtatggcagcggtggccgcagggacggccgtgacatgaggggttcataccggaagtccccatacaggggcggctacggaagcgacttctccaggaaccactcagagcagccccctccgccaccacccaggaggtctcccttgaggtcagttgccgttccgatctgctatgaccctccgggcaatagaattaacagaggggacagggacaacctcccacgggtgacaccatggcggagaagggagagcagatctgaagtagccgatgctgatggaccgctttctgttggccaaagtactcggctctctgcttcagggaaggaggcttcagctcagcctctggccgcggcaggtcctcacgggacggaagacgaggcaccaaggaagaaggcacgccttggatggggtcagggtttggccaagtatgagaagcagaaggtgcagggtccttcggatcccgctgaagttgttgctgatgtaagttcaggtgatggcgaacagaagacctcccttgcgcctgcgccttctgttgcatctgtatttcctgctgcaccactgcctgagtctgcaccagcacctcctgctgctcttgcactttcgtctgctcctatgcgatgctcatctccagttactgcaccgccatattgttcc

SEQ ID NO: 200704 - DNA, 676 bp, Zea Mays
gtcgaatggtctgcacaaggccgatgagttctcgctcatatgcagctagggagcggtgtcggggagctatcagccggctgaagtatgcaatggggtgtttatcctggagcaacaccgccccaaagtcgtaggtcgatgtgtcgcactccaccacgaacgggcgcgtgaagttcgagagcgccaagatcggagctgaggtcaccacggttttgagggcttggaaggtcgcggcagcatcgtcgttccacgtgaagccgtccttcttcaatagcgcggtcagaggggccgcaatagcgccgtagtcgttgacgaatttgcggtagtagcccgcaagacccaagaacccacgtacggctcgcgcggaccggggtttgggccaatcagccaccgcctgcaccttggcgggatccatggcaactccagcgtcggagatgacatgccccaggtaagcgatggagcgctcgccaaacgcgcatttggagcgtttggcgaagagacagtgctgctgcagcaccgtgaggacgggccgaagatgccaaagatggtccacccatgacgcactgtagatcaaaatgtcgtcaaaaaataccagcacgaaacggcgtaggaacggccgtagcacatcattcatcagtgactggaatgtcgccagtgcattgcataagccaaacggcat

SEQ ID NO: 200705 - DNA, 1870 bp, Zea Mays
cttgcatcgacgctgctggccatgagtttgatgtttcacgccagcgcacattgctgagagctgctacatatggcctagctttctgcaggttctcttttgtgcctttaggatgctatatttgagcactttattagtaatattaatttgcttatatttgtcagtcatcatgtttgattgttttttttcttttttctaccttactaattttattaattgttgttggagaatactttgtatacttgattggtattgtggtacacattcagtggttttagataaagtataggaccactatttctttcaagtgtctattttctggtaacatgtagagtatattcatgcagcagaaaatttgctctaagtatctataccctgccaagtactcccttcatccccaaaaaagtaaaaacatgtcactctggcaattctaagaaagattactgttcgagataatttacctacctgcccctaattattttagttattctgtattgtttgccacactagccaagattcctgcagtgaactggttagagtgttgagctccaggagtcattgaatttgaaactctcattgcacccatgtttgaagcatgacaccttgtaacaaagcccaggggatctcttctcccccctgtggtccctttgccacactacttaatgggaaaggatgcaaccttccctagttaactacacacattcatgatctactccataggaaaagaagcaaatcatatgattacccacacatgcatcagtgatggaattaatgcagatggccccactagctgtccacaaaccacaatgacgtgttttgtggaacaaattttaaatcctagagtgacatgttttctgggacaggagtatgtacaagtagatgggatcaccaggttggtcaaagactcagagtaacaatgcaagagaaagttatatgtgagcttgttctccaatacttgttgtataatttagttctgcaagtccaaggtttggtccacaaagtttttgaagaagctgcatccttaagcctaacgattagttgactgtgcaacaatactaaacagttaatcctctcaactggagtaaacatgtgaagcagttttatgagttcaggctactaatcgtcgaactcatgtgaactgccacatatcatcaaatttgtgcaattagttcctaagaaggttgccaagtgaggttcctgattttaaacgctgggaagttgggcaagcccccatataggtgcagacaaaggggtgatgctttatagatttcttttagttctactatttggttttcagccaaatctgatcttgaatagaaatgcaacaatagttaggcgttgaaaaacaaaacaatcatatgagaagatagctgagtagttgacttttgcttcgaaatatccaggggaaacattttgtttaggagacactgggtgtttttcctgctacaataccattgtttttgtcttattggctatgtggtagcttgcttttttttgtcaagattatggaaggctctaatttaaaaattacctcaaacagatcataaataacattgctcttttctgaccctaactttgttgaccagttgagcatatgctttctggctaacagcaactgctgtagtgctgcatgctagtatggtacctcatgctgcagtatgtaactgttatataactcaactcaattattttattccaccaaagtttggagctatactaaccaatatctttgacaattactttacttgtagttgttatttttgagtactgctattcctctgtatagaatagtttattgctgatatttgaacttggcattgatacccagttggctttggcagtcgatttccacatgaacgctttcaagaaatgt

SEQ ID NO: 200706 - DNA, 505 bp, Zea Mays
gatctcttataaaactggtgtacttctcgcgacatgctgagctctccactgaagataagcacaagatatccacaaagagaagacttgggatgtttaatggtggcaggagaagctacccgattcttggagggaggctccacttcgtaaagtttgagactgggaagctaaatgaatgtttggacttcatttcttccaaacaactacatcgtggtggtatgcaaatattagtttttattgtaaacaattagaatgttgtcttcgtcctagttatttccatcaccttgttgacatagtttcacatttgcgtgggaagggcttacctcggtttatcccgtcactatgtgagagcctccagcactggttctgccctgttgacatagttttggtgttccttcaatattgcttctgtgtacctacgaatcatgcttcacctgtattttcttagcattgaatagcagttatatatacgctgcaggaattgattcaccttcatggcgctctgggg

SEQ ID NO: 200707 - DNA, 835 bp, Zea Mays
cgcctgcggcaccgaggccgacgacgtgtgcggcttcagaacgaccacaaccaacaactccacgtccatggaccgtgacgacaaaggctccccggatactgagaacaccagcatcggcggaggggccagtgattcgcgctgtttcagccgtcgctcacaggcaagcagctaagctaagctagttatatacctataagtaattcaccagctcatcatatttatacacacacctctatagtttctactttctagctggctagctaggttcacgcacttcacatctgaaatgctccatgctaagctacacgctacatatgcatgcatgcagggatatttcattacaaaatatgcttatttttctacgtgtccgtgcgtgcatgttctggcaaaaataactaaagagagacggcttatgcgacgacgacgaggagaacgtggtgatcaacggggacgacggggcgatgaggtcgtcgatttccaccaagaggagccgggctgctgcgacccataacgaatctgagcgtgtaagctactagctagatccccattcctgcactcgtcatacgcgtacatgtagataggtgaaataaaacgcatgggctagcattatggtacgccatatatgtcaaacagtcatatattacccatcgcttttagtaatagtaggtggtgttgtattgtaaaccacttaaaattgggcgatatttatttgctccgacaacacacacacacacacacttgaggcttaccgtgtactgtgtgttcggttcacatatctaaactaaccaaataaaccagatatattttgggtaattttggtcatcgtttagtcgga

SEQ ID NO: 200708 - DNA, 292 bp, Zea Mays
ctgagatctctgatgctaatgttgaacacgtcccaaatcttggtattactctggattttgctaatagtaaagctggtagctctggctttataactgtcgatggaggaaacagttcttctgcagtatcaattttgacatcttctgcgcatcatgaggcactcatgcattcagaagcaagggtaggcttactacccctgtattgagacgtttttccaactgctaccgtcagctaattaaattcttgtttcttaggttcatgcaacacaaactgaccagatttattccactgcca

SEQ ID NO: 200709 - DNA, 420 bp, Zea Mays
aatacacttcagacatctacgccttcagctactgatggagacatgggagcagaggaagtgcaggtttcaaggcctaagaggacggctaggcccagtagccgtgttacgggcccagaatgggtgcgctagaattgtatctcgctaagcccatgagcttctatatgtatcgctgtatccgaacgagacgagaacaagaaaagagaacactcatttaccaccatcttcttctccaagcttctctcctacctgtgcttccctgctcttccctctgcctccgtagcctctgctaacatattggtatcaaaggtcatcgatccctggatctggatccgatccactacacccgtcgagccaagcgtctcggtgccatggatccacaggttaaactcgccctggaagctcagactcgatcgttcctcg

SEQ ID NO: 200710 - DNA, 541 bp, Zea Mays
tcctccttcacgaggctgctgcgatcatcaacctccactcccaggccgtcgctgtgcaaaacatccggagtctcgttcacgtcgtcctcgacctcgccaacaacagctacacccgctggcgcgatgagttccttctcgtcactggcaaatactccctggacagccgcatcctcgacgacactcccgcgcctcacttccccgactgggcacgcatggactgcgttgtcaagtcctggatctccggctccatctccccggaccttgctgaaatggccatggaacgcggcgccactgcccgcaccacttggctgactctcgagaaccaatttctcgggaatcgggaaactcgcgccctccacctcgacgctcaattccggcacttcgtccaaggtgatctacctgtctccgattattgtcgccgtttcaaaagccatggcagatgccctcggtgatcttggcgaaccagtctccgaccggacgttggtcctcaacgttctgcgcggcctcagcgaccgtttctccgacatcgaacgtcatcttc

SEQ ID NO: 200711 - DNA, 293 bp, Zea Mays
gcatatcattgttgctgctcaacagatgttaccctgcaatgttgttcctttcccatgtaaatacttaggtcttcctgtctctgttaaaaagctccctagaagttcctttcttgagcttattgacaaggttgcagcaaagcttcctggctggaaggctactaatcttaatccagccggaagggcaactttggttaaagttgtgctcactgctattcccatttatcacctcatagctttgcgatgtccaaggtgggtgatcaaggcaatagacaagattcgaaggggttttcttt

SEQ ID NO: 200712 - DNA, 1233 bp, Zea Mays
gttgagattacacatggcatttacatttgtatttgttttatccatttccttttcttaaataaaatattttttgggttgacaaaaattttgggttatgaagtgcacaaatattctttgcagatttttatcacagattacttcttcaaagcaaccttggatgaaaatttcagtttagccgatattgaggtaactctgatcccaatcttggcagggttatgcgaataggttagtgccttagtggagattatttgatataaccttcaaagttcaaacatttcttacagtatgcgaataggttagtgccttagtggagattatttgatataaccttcaaaattcaaacatttcttacagtaataactgatatttgttactcagaaccacatgttcaatcaactaaccaactaccaaaggacttataaattgatacatctagaaccttatgctgttaccacaacatataaacattacatgcttatccagtttccgtgcttgctttagctttttatgccccatcttttcaacgccgaacaacaagcaacacattttctagggaaattcaatttccatttcctgttatttttatcatatggcaaaatataagtactgtagttgctaattttgcacaagtcaaggaattatttaatctgaatattgttatgtaatttagttcacttctaatgttatttagtatgctaggttgaggtggagattgactcacacaagcaagaccaggagcacgtcccaactttgtctattgaagcaacactcattgataactctggactatctaacagtatagatgctgatctttcatccgctaatgcagtcaatttgaaaccgaagccaaaacgaactcgaagcccttgtcttggttttcatggttatgtacttggtggaaaaatagaaaatccaaaactttggtctagtgagcatgtaagagatataatgcaagggaaattctattaccaaacattactattacagttcaactgtataaaagctgtcttttgactattctccttcttgtaacagcctaacttatacacgcttgttgttctccttaaagatgccaatgggaagcttattgactgtgaatcatgccaagtgggcattcgtaatgtggtcatggcacacaagcaaatgctcgtcaatggatgtcctgttgtgctaagaggtgtcaacagacatgagcaccatccacgccttggaaagacaaatttagaagcatgc

SEQ ID NO: 200713 - DNA, 290 bp, Zea Mays
ggcgcccagccccgaggctaacaaagctttggatgctcagaggtctgtcaatgttcgcccgaaacgttctcgctgagctgatcaagcctcttttcctgctgagggggagaaaaagaagaagagacgtcttcgtcgggtgtctagcttggatcagggtgtcggtccttctgttcctgctgctgaggaagtgccggtgcctgaatttgctgaagctgaccccaatgggtgtgaccctactgaagttgaccccaatgggtgtgctgtctgtgttgttgatgaggatgataaag

SEQ ID NO: 200714 - DNA, 424 bp, Zea Mays
tgctccagaagaggagatggggaatgggagcctaacatggcgacctaactgacaagcatgacagaggtgctcaaaagatcccctacaaccggaaacagaggtgttgctggagagtttggacatcacatcacgaccggggtgaccgagacgacgatgccaagtcatagaagaggcggcgacagcaagaacacgcggggcagaggtcggtgtagcggaagcaggcaagcgaagtgtgtagagtggcccggggctgtcacaccgagctagaagggtcctggtggcaagatccttcacagaaagaccaaacaggtcaaactccatggaacaagagttgtcagtagtaaactaacggacggaaagaagattttgaataatgtggggagcaacaagaacgttggataaacggaaaggaccgggaaggacc

SEQ ID NO: 200715 - DNA, 381 bp, Zea Mays
tgaataaataaggcatggtcatgagcactaggtaaaaaacaagcaacctttatcatagagcaaagcactcaaaccaagcacgaggagcttgtttaagaccatacaaagcacgacaatgtttaagaccacacaaagaacgatgaatacgatagacataacctgaaggagcatcaacactgggaggtggttgcatatgaacttcatgtaaatcaccatgaaggcatttttaacatccatctgagagatagtccacaaagaagtagcaactattgcaatcaaagtacgaacaatagtcatatgtgcaacaagggcaaatgtgtcattataatcttgcattcttgtccttggctctgctgaatacctctggtgacaagacgagct

SEQ ID NO: 200716 - DNA, 382 bp, Zea Mays
ggcgattcttgctctggcaacgatggaagttcttgctccagcagcaagggcagcttcagctcctactcggctagcaggagacaaggccaagaatgaggaaccaggttcccggatcgatggggtcatggaatgggaacatggtacgtgcccatgatacttaaaaaagattttaacactacaggaacgagattgttcccacgttcacaggaacgtggacaagttccacgttaccggtttctaagccccgaacttatgtgtgatgtgatctaggtctctaagtttgccttgggtgcaagcattggtcccaacaggctctgacccacatgcgcctgagatgacaagctgactgggttttgatatggacccgacaccaagtgtcacc

SEQ ID NO: 200717 - DNA, 1068 bp, Zea Mays
atataatctcatatttgcttgcaggacttgccaccgactacgatgcctttgtgacctcgatcaccactcgaagtgatcgcctttccctggatgaggtttattctcatctcatggtgtttgaggctcgactccaacgcaaccaggcggagatgcagatgcatctcaattcctcggccaactacgctcgtcgcggcggcaacaacttgcgtggtcgcggtggccctcgtggtcgcggcggtcgcggaaactactcgcatggtggttcttcgtcgcgtcctacagatccgcctggtgctcgacgtcctgccaccaccaacaacaacagccggcccctttgccagatctgtggcaaaataggccacactgcggtacgctgctggtaccgtcatgatgactcctacaacgaagatccaccgatggccaatgtcgcctctacgttgccttcatacaagcttgacaactggtacggggacacaggcgccacagaccacatcaccaacgaacttgatcgccttgcggtccgagaacgctacaacggcaatgaacaagtccaagtgggcaatggtgcaggtttgaaaatttcacatatcggtcactctactattaatactgctgcacgtcctttatttcttcgtaatattcttcacgttctggggattaccaaaaatctattatccattcatcgtttcactcgtgataatgactgttattttgaatatcacccttggaattttttcataaaggaccggcaaacgaggagatgccttctggaagggcaatgtgaaggtggtctctatcccctgacgatctctagcgcacaagacctgacgcatgcattggctgcccgcaaaataaatcgtgatcaatggcatgctcgcttaggtcatccagcttcgcaaacagtccagtccatcttacgtattaataatattatgtgttctagtgagtctttttcatcagtttgtaatgcttgtcagatggctaaaagccaccaacttccatattctaggtctatgaataatgcttcagctcctcttgaattaattcactccgatgtttggggtcctg

SEQ ID NO: 200718 - DNA, 305 bp, Zea Mays
gtcgagcgtctgacaacggagttgcgccatggaggtagggggcgcgtgcgtgctagttgccgcatcgctgagttgtcaggagaagtagaacgtctgcagcggaagattgtagagcgtgatcaggctatggactgggttgtgaattcgcgatccatagcctaagatcgtgatgcgactacccgagcccgggtggatgagttaagtctagccttggaaaacctgcaggtgcatgagttatatgaccagctacatccaaatgtgccacccgaagttgcagaaatgggtgttggcgcagcgggagcagg

SEQ ID NO: 200719 - DNA, 367 bp, Zea Mays
gcgttcatatgcggtgagcttgatatgccatgctgcaaacgacctactgaagaaagccaccggacctgctccttgatgcaaaaccgccccaaagcctgatcctgaagcatcacaatcaaccatgaacagttgttcaaaatttggtaattgcagaactggtgctgtggacagagcttgtttgagttcctgaaatgctgtattagctgcagcccccacgtgaagccctccttcagtaatgtggtcaaaggtgctgcaattgtcccaaattttttaatgaattttcggtgactgcttctaccttgctgaaaatcctagaaatccgcgaagtccctgtggggatttagggattggccatgacgtgactgta

SEQ ID NO: 200720 - DNA, 611 bp, Zea Mays
aaaagttccagttggtgaatggttttgtgaagaatgccagcttaaggaagatcagaacaatacaagtaactatggtatctcggtggttaatgtgacagaaggaaagaaccaaaggacagaaagtcgaagcaagcctaagacattgcaaattgttgtgcctgattttgatgctctggaagtcacacacagcgcattgacagctgatcggtgtgatggtaacagtaaaaggttgcatttagcttcgactgatacacaaacacggcaactaaaggataccaccccagctgctcaaaggttggatgtgaagaacaaaaaatcattaagtgttacaaaccgtaacaaactgcaagttcttacatctgatttagacacacgaccacacaattatggaacatcaacatctggagtctataccaataaaagtcaaagttcagaatttttgttaaaccacaaaaagctgcgagtttctactgacatgcagtcgccactctcaagcgaaggcctacggagtccaccaatatcatgcaagagacatgcagagagtatgtcgtcccctaagcctaggatcgtcaaggcgggtacccttggaaaacaagatgtcatctctcgtg

SEQ ID NO: 200721 - DNA, 306 bp, Zea Mays
attatatctccaagacttccctgatctaaaggtggcttttcctccttttttctttcttctattatgtatttttgggatgattttagatgttctgttcctctattgtgaatgttccaggagctggagggttttctccttgctgcggatggtgccaactttagcattccagagctgaacattcttaagcaacattactcaaattgttgctcttgggtgagtcgtgctaagaacatactcagaaaactttatgctacgagtgactatcacaatgctgttgaggagttgacaggcattctgaaggaagca

SEQ ID NO: 200722 - DNA, 362 bp, Zea Mays
cggctttgttctcacggtcacgggagtggatgattggtcgattagggccccccatatatctactgcgagggcaaggctagattccagggaaggtggttgaacggagccacgaggttgcaggattcttggatcgagcgcgcgatgttcgctgtattcgttggggaagaaggagaccgacggctagaggggtccacaggcagtgactcggcccataccacagaggcacatgcgcgcgtggcttcagcgccaggtccacggggcccacctgtcaccggccagaagctcgagcgcaagcacgtagggactgccaacgaggcccacatgtcggcgctggtatttaggctggctccgcggtagtggag

SEQ ID NO: 200723 - DNA, 422 bp, Zea Mays
cacctcttcatcaccggctcctcctcagctgccacctggggcgatcccggtatccccggtggtcaatcatcaccgtatgaccacccgtgctaagctgggatttcgccaacccgctctgtttcatgttgcagcattgtctccagtgccacggacttatcgcactgctcttgctgatcctcattggcgtcaggctatggaggacgaattctctgctctacagagtaacaacacctgggaccttgttcctcgtcctccctcctgcaatgttgtttctggcaagtggatattcaaacataagttcaatgctgatggctctcttgagcgctacaaggcgcgctgggttctccgtggtttttcacagcgccctggaattgactttgatgaaactttcagtcctgttgtgaagtctgctactgttcgca

SEQ ID NO: 200724 - DNA, 587 bp, Zea Mays
gtgaacttcttgagtggattttacttggactagaactacgatcaggtcttgctctctcagtcagagaatccagacgcccactgcctgaagatttttccaaatgcacacgttgatcacgtgtgcttggaggctttaaatcatattggtcatcattttcctcaggaggtcgttttttccctctactttccttgtacctattgttgtaatcctcataatgatcaacatcttgaactgcatcctttctgtaatggctctctgagcttctgcgtccatctttagcactcttatattcagctctatcactttcatgactacgggccactcgctcattagaaaacttgtcgtcatgttgcctcttatcccttacgtaatcatccttgtacttttccttatacttgtcgtcatcaaacctttgttccttagagctcctagatttaccatgttcatatctggacagggtctttctgtcatcactgtctctattgtcagtggaccacttatctgtatcttcagaatcatcttttcttcggctgtgtttttcagcttgcatatcaggattattgtacttctctttcgctgaaatttct

SEQ ID NO: 200725 - DNA, 304 bp, Zea Mays
ccgcttccccgcctcatctctcatcccgtgttgccacactctatgtcctcgccactgcatctgcctccacttggcaccgtcatcttggccaccccggccacgacgtcctctctagactcttgggcacctcgaccatcccctgcccccacggcgacattgcctcgccttaccatgcttgtcagcttgggcgccacactcgcttacccttctcctcttccatgtcctaaaccgctcaccgctttgatcttgtccactgcgacttttggacaacccaaatatcgagcatttctagttaccaataata

SEQ ID NO: 200726 - DNA, 357 bp, Zea Mays
agcaagtgtatatctaccattctcattagacatgattaagtcaagcaagagtttgtgctttgttacatttggtgactaacatcatctaaacggcttggtagcgatcgagcaagttggtgatcactcgatggtaattatgggtagcctaactcatagtataaatatttgtcaatgattcatcgtataagtgtggtgaagaatcaattcgtagaacacctaattattgtgcggatcaaggaagagtttcacccttacgcagatgctccaacaagaactagtaacaagtgtcgacccttcaatacatcaggaaaaaacatcaccatatttctaaccttatttaattcgcgattcttattt

SEQ ID NO: 200727 - DNA, 302 bp, Zea Mays
aataaaatatgtaacaaaccatcccaataacaggtgagtgtatttctgtactcatgttactaattttgtcacttgtgtaccatagtgtttgactgttcacatagacgagtatacctgaatgaaagttctacagggaaatgacaatgttataccttctgttgtttcaggtgggttgctgtaggtgatgctacaggggattatccatttagtcaccacaaacttacagttcaattttcagaggcatctgctgcccaagatagaaaattggaggtattagttcataaggccattcaggagctttg

SEQ ID NO: 200728 - DNA, 385 bp, Zea Mays
tgctaacataaattcataatttggaagtgttagagatactgtcttaccgaactttaggcatatattgttattggccacatgcgtttgtgtttatagttcttggatgaatttgtttcattttgccaataaaaaaactgtggtggttcttagataagtaatagctgctgacccatataaaaatgaagtgaatgcataaactgatgctaaatagatttggtgatggtttatacaattatttctcccacatttaccaattggtcagaataggataggttgtcaatgggggaaaaaaggcaggggcaacatgctgttgaccggatttgtatcccatcctctgtctcgacaataacaagcaagttgacaaataaataaataagactcatct

SEQ ID NO: 200729 - DNA, 423 bp, Zea Mays
agactccaagaaaaatatgccagctggactattgacaaggaaattgatcaagtgccgacccctcctatctgtccaaccatcagacataagtgtgcaaccaaattcagtccaagccaactcatgagtctttttttatctcatctacactcttctttgccttctcaagcaatggcgccgtaacatcatgatatgaaggtttcccatacccaggaccatattgcccaaccgcctcaagcatgatctcaaatgcccttgagttgatgacattaagtggtaagccacacataaataaaatcagcaacatacatatctgttcttttcttctcctccttgctctttcgctgcaatgtagtttgagtgttgcccttgcaatgcctctcacgaaccacatcttcaggtgctttgcgaagcatggatgcaatt

SEQ ID NO: 200730 - DNA, 292 bp, Zea Mays
agcaaacccggccgacgggcgaggaggtggttgaggtgtgctgttagcgcgcggcgggatctacggcaagagctccggagagaagaacgcacgatatctgacaaggcgggcccgcgttccagatagcagaagggagaagcgagcgcacgcggttccgtttccagctcgcaaccgagaaggacggaagacctgacaagggtggccccacacgggagtgtctagtgcaagggataggctgcttcgtgggtcccacgcgtcgatggcgtgagcgagtgcacggctgaccgaagtg

SEQ ID NO: 200731 - DNA, 313 bp, Zea Mays
gtgttgagcatgtggtggaattcgatacagggaaaagcgataaagattactcaagcatttcagttgatgatcatcataaaatcaatgcccgtgattttttcatacctaccaaggtttttctcatttcacttttatgtatttattaagttttccctttaattaggacagttgactattttcctgtaacaacactttatttaatatcatgatttacttattttgtaggagaactggttattcataactgctgattactcacagattgagttgcgtttaatggctcacttttctaaagatcatatgttggttgaac

SEQ ID NO: 200732 - DNA, 385 bp, Zea Mays
tcctccgccccgctacgccaagactcttgagacgggaacaccagatgtctcgatccatgcggcgcccggctttcccgcggcgctgcgtctatgctctccccaaggcagaaaatggcccacgagaggacgactataggtggcgggaatctcccttcgcgcgggggcggcaaggtaatgcccccccgacccagacggggaccccacctcacctcaagcggagcggctcgggttccgttgccttgcctctttccgacggtgaatcatgtggctcctctcgaagggaaaaatcgaagctccgggacagggagggaggagacggacgagaggggcgaggtcaatggaaaatgggagtgagcaggcgccgcgcggggcggagcaacgcaat

SEQ ID NO: 200733 - DNA, 312 bp, Zea Mays
caacatctccagtaacatattcgccaaatttcacgcccatccgatattccaggctttaatttcacccaattccctgtttcgagcgatcgtttccgagccgagtgccccaaatgtcctttttcttcgcctaaattcaaaccaagcaaacacttcactcatattcacccatataaacctattcgtgaagtatcggctcaattccacgtcatttcgtgcctcaattcgaattccaaacctcctatggcactttttatcgttcaaacgccgttttcacgtcgtttgacctctcgatcgtctcatctcttgttttct

SEQ ID NO: 200734 - DNA, 384 bp, Zea Mays
tgatgagtctcgagatgatgtttgccatctcatccagggcttccgtcctctaggatctaggctctaggtcgtggtttcccggacggtgtgacgctaggcgggctcgacctgaacagaacacgtagcaagttttaacatgaacgcgaatgcaaaactcatttttacatcatttttcgttgcggctataccaactccagcctgaattttcaaatgtcattcgagcgctttaagattccacaatagacgcagcgcagcgcctccgcttgctattgagctggtggcaatacgacgacatgggcaaagaagttgtactccctcctatttttatatttaacgtgcttatatttttattttagttactaaattaccaaatacataaattaa

SEQ ID NO: 200735 - DNA, 391 bp, Zea Mays
gtgttgggacccaatattcggacctgctggattccccctcgagttctgaatgtgctggctcttccccacagactgctgcagcaaggaaacaatctgttccatggtactatctggaacaggcctgacagcgctaccgttgccaattgatgttgtaattgcctgttggagcaagtccacagcgtttgatacttgaggagtcaccgaagaagcccctgaacctcccagaccctgtccagcgaccatcacagaggaagcccctccatttgaaaacctgctgtgaacacctccgcccccagactgggttggcaaagtacgaccaccatagaaccggcctccggcagaagcacctcttccaccacgccacgctccagcacggccctgtccacctccc

SEQ ID NO: 200736 - DNA, 849 bp, Zea Mays
atgactgagcatagttccaactgctcggttcgtgttctgaattggagtctcgatgaaaacacgaacttgcttttcaatagcagttcttgacagatctattagtttgttatctaatgccatgtctaggccatggtcttgcttctcaacacagtactgagcaacacctggacgaatctctgaagctggtttcaagattagtgagagatcaatgttctcaagtttctcattagtcttcactacttctggatcaacctcaagcatatcagaacgtccaaccatttcagtaatggtgcggaacccaaggtttgccatgatttctcttagctcctcagcaagcatgaaaaaaaagttaatgacatgctctggttctccagcaaacttttctcgaagcactgggtcttgagtagctataccaacaggacaagtgttcatgtggcattttcgcatcataatacaaccgagtgtgatcagtggtgcagtgctaaaaccaaattcctctgcaccaagcaagcaagcaacagcaacatctctaccagtcttcaactgtccatctgtttgcagaacagctcgaccacgaagcccatttgctactagagtttgatgtgtctcagccaacccaagttcccatggaagtccagcgttcttgatacctgtccatcttgaagctcccgtgccaccatcatggccagatataagaacatggtctgcatgtccttttacaacaccactagcaacaactcccacaccagcctcagaaactagtttgacactgatacgggctccaggatttgaattctgcacaggcaagaatatcattatcactgaacagcatttgcaagttggagattc

SEQ ID NO: 200737 - DNA, 546 bp, Zea Mays
ccttaatacatctcccctccaaccatctgtccttccagaaaagggtattggctccatcaccgagcttagtaataatggctgcagcaatcagatttttaaccaccttacaaacatgaatggggaagtccgcccaaggcctactggggtctgttttctgcagccatggccagcgagctctcaaagcccaacagaggttctttaactcactaatcccaagaccacccaactccttgggactggtaaccttaggccaagccaagaggcagtgaccaccacaaaactctttcctacccctccagaggaagcccttcctcagcttatcgattgctttgatggcccaaacaggaaggtcaagtgccagagctgcataaatcatcttagccgtcatgacaaactgcacatgaatagctctaccagccctggtcataagttcagctttccatcctggcaaaaggctggccactctatcaacaatggcctgaacctggtcccttgtgagtttcttgggagacaaaggcaaaccgaggtacatacagggaaaaactg

SEQ ID NO: 200738 - DNA, 319 bp, Zea Mays
ggcggaggttaggaaggaaagtgcgtcggcggacagaggcggcgcggcggccatggtggggcgctgtagtgttgatggcacaatcgtgattgcttatcagaaggtaggaggagcaattcagactggaatggaactctggattggatggtttatcaggagaaatggtatggcatggtatggaacagaaggtcgcggcggggcgggacgaagcgtgtataaatcggtggcggcgtggagggtggagacaagcggaggaggaggttctgggaggttcaggtgccaacgagcacttccgtggagtggagaaggggaggaagac

SEQ ID NO: 200739 - DNA, 612 bp, Zea Mays
attaacaagtgcttattatatctatcttttttgttatattttatatgtttataccttgattgtttggcaattatgtagaaatgcatgtgttgttttgcttctatttttatgactctttagcacatttttaggatgaagaagatgtaaaagctattgctcgtttatatgcagacatgggtgaatcctatgttgacttgattgccacaggtaaatttcatggattatgctgatcaccattgaaatccttctcttgccaatgatccatttatttacttttaatgtttgagctttaccaggctcagacgattcaattcaaatagtgaacgcattactagaagttacttctcttctcgaatttgccatttcctccatgacgtttaatttctggcattgccttaagcgtaacctcattcgaaggtaattgactaacctaattaaacatcatatgcttttcctgagaaattatgttatcaatgcttcatgtattttagggactctgatgtatcatatggattagatgtgacggttgaaattgagaaaaacagaagattacaaatatttcgtccaaagtttgaaactctggtgtctctggtaagtattttttttctcgaa

SEQ ID NO: 200740 - DNA, 598 bp, Zea Mays
ctggttcttggttcatgttgctgggatgccttcacaccaatctgcaattttcatcatatttggctggtttttcctgctcctgatcagattttgaaagagctaaccattgcccacaatcaacttactgtcggttgggtcagggtgctgctagctcctcccaaaggtaaagtttttttttatcacgcctagtgtttcatatgaaatcatttgaattggaaaaaacttgtgtgctacatagtagttggttttgatagattagcctgattcataaaattccaaacgttttaatttgctggccttcttcaaactgttgcccaaatttgacattattttcacgcatttcagtttctctccaatatctatacaatttgtgccagtccatctaatcaccccgcgcccctagagaataggcattgaagaaactggtagcctgttcctcaagatcatatatagggggaaaaaagcacaaaataaagaacgaactcatctgctgttctttcaataattgtatggtcatcacggatacaatcaaaagtcagtagcaagactgggaagctagctgaggagatggtcatttgtcgtcaagtgcagagattag

SEQ ID NO: 200741 - DNA, 483 bp, Zea Mays
atttgaaggaacggagcttgcacgagaaacctgtcatttgatcaacccttgttagcctaccagaaaataagcaaaaaaattgagtttcttagaacaacaaattcaatttgtgtggcacaccaaatactagtactaccccatgaaccgaagatctttttttctctcgaatacgcaggatagttgtgtatcattgtattaagagagagacaagagagtgggtccggtacaaacatcaccccaaatcctggaccaaataaggggttagagacacaaacagccgattaataatacacaactcggaaaggaccttttaggattcctgatcctaccgggaatgttgcatagggaataggggtgaggagatggaaggggtggatatcatggcgcaaggacgccgtggctggggaactcgggggcgcggcacagagaggaggcgaggaatcctaggcgcagctagcaacaatgggttgcttctgcttgatt

SEQ ID NO: 200742 - DNA, 272 bp, Zea Mays
gcctaattccctttcacctaccactataggaaacagtagcaaatgtgatgcaaaaaacaccttacaataaatgtcaagttcacaaaaacttacaataactggttcaacaagtcttgttggaactccattctttctggtatgtgttttgatatagagttcatctcttcgaggagggcggcctagttccttagactgtaaattgttttaatattaacaattgaaaatgaaaaatcataatataaattcaacagtcaaattgcttcaataccatt

SEQ ID NO: 200743 - DNA, 553 bp, Zea Mays
ttcatctccggccgccagcacggctcggccgaattgatcaccatcgctcgctatccctataaattgaaggccaggactgctgcgctaggtcatcacgaagccgacacacccgttcttcccctcaattgcccaccatagccgcagaattcccctttttcccccaaattggtctccgccaccgcaaagcacaactccaccgtggccagtccgttctggtaaggcaccatccaattcacgcgttgttctcgtgtctttgtatgctggtgatgctctccaacccgtctaattgaattaggccgccacccattgctgggaacacaagcaaaagtccttagccttcgctgtcctcgtgggcagggcggagtatgtcaccaaccgtgtgattaacttaggggaaatgctcggagtaggtctgatttggtgtccgccgctcgggaacgccagtcgttgccccgttaggccggtctgctagctcaccggagctcggccgcgttcaccgtcgtcgtggacttcaccctgcgaaggaatagaaaccggaggactcttctgcaaa

SEQ ID NO: 200744 - DNA, 287 bp, Zea Mays
tcttcgatcactttcttgatttttgccacggtggcggtgctggagctgaggtctaaggtttcgaacatgcggtagaagcaccatataagcctttccataatggaattccaaactagaagatggaatatttacagttagttagaagaataatccattttctgatgccaaatattccttactagaaaattgaatatttacaccgtctgccgcccgcctacctatcttgccctgtcgggtccgaaagcttcgctctcctcctgtccgtgtccccttagtcttccgccatt

SEQ ID NO: 200745 - DNA, 352 bp, Zea Mays
cagaccttgctaccagaagatcgtccccttccaacctagtggcaggagctaccagaagatgcggcacagagacactaggacaatccattggcgcctgtggctcagcagtatcgttgttctctttaccgcaaccactgctgccttcaagctgggaataaactatgggatcaagcatggcctactcctctagggtctgttcgatagtgaataggccaccaccaccagggcaagcgattcattgcctgttattggagcatttggcgcagcacagatcaggtttgggcatcaacgtcgggaaagttttcatggtgtcgagccagactccaggtggtggcaatggagggagacttgt

SEQ ID NO: 200746 - DNA, 562 bp, Zea Mays
cagaaagttacagatggatcatgctgaggtctctggtttgttgtgtattggtacacgtgaaacagatgggggtgaagaatcatatgcggctgagtaccctaaaatggatcaggataccaatgcaacgaccaaatttgatgtagtaatggagacttcagcaatgtatactgatcaaatcaacaccaatgcttgcttagatgaatatcacatgtctggaaaacagcctatggaagaaatgggatttggcagtgcacatccctttgaacttccatcagaagtacatatttatttgccatacaattaaacatccctgttctgttcactggattttttttgttaactgttagttgtttggcttctaccagggaatggtagctgattctggggaagaaagcatgccatctagccctgacacatctaccagtaattatgatgcgcctggtaatatgctcgacttttgtaatggcctctgcttgaactgtgttcaattctggtaatcattgtgcaattccaggttacacggagcaaaatctgcagcatatctataattcgtatgatgcac

SEQ ID NO: 200747 - DNA, 274 bp, Zea Mays
aacggggtacccggtgctcctcaaacaaatgcatcgcgtactggggagacatagcataaccggcttcctgcagtacctcccacaaaatacgaggaaaaccctctcgtgcaagcccgtcggtgtgggaatgttcgttccctccttccgtggatacgagagaactcatctgtgtaagggcaagcgtaagcgaaaaagaaaaaggattacctaaaataaaaggaaactagtgcttggcttcccatggttaagttgagatcttcgatgtagacttaaa

SEQ ID NO: 200748 - DNA, 380 bp, Zea Mays
cgaaggatgagaatcagaaggatgttacaggctttgtggataaaagagcaactggtcatgtaaaaagtagcaatcgcaggcaaggggaggttgaagactatgcacagagaagaataattcgtggtggtacaagaggaaatggagacaatgggcagttctcatcacctgtgaaggctaaagatactaggggtagtatgtctgttcataggttggtgacgaacaaacagactcagtcagttgcagggaacgatttacaagggcgagcaacttatactccatctcggacttctgcccttccaaatagcagtattccatcaaagaatgctaaggttcaaatgagaaaatacgactatactatgacaagtagcagaatagactta

SEQ ID NO: 200749 - DNA, 737 bp, Zea Mays
ggacaagttgctttgatgagcctattttcaaggacatgtttttatcagcgacgtctcacagacgcagtctagatactgcttcacaaggtattgcatcaccacaacaataactatcggcattgtctgtggcaacttgtgtttatacaacctccgtcccaaaaaggatgcaattctgagtttggttccttaattttgatggtgcttatttgttatgatagttttgataaacttcagcaatttcaacttttttgggtatagttttggtttgtcttctcaaaagggcgagagtcacactgagagagggagtatgggacctgatttatgtgcatcttatttgcagataacaatacaacagcgagaccagtccacagggccggtgcaccagacgcttcgcgaggaagcagtcacccgacggacctgtcgtttgcaaaggaggatccctggacaaacaacgtaaagcagcgggaactgttgctggacgaggttgtaggtagcataacaggaggagctctgagaacctcctcctccgtccttggtatctccctcgtcagcaatacgaaagggaagagaagcgagagggaagggaaggggcacaaccgagacagcctcaggtccggccgtccgtcgccgtccaacgcaaagggtgaaaggaagaacaaaacaaagctcagacagaaggcagccaacatctctgctccttcaggaggtctacagcttccagcgaaaacaacgcctcc

SEQ ID NO: 200750 - DNA, 297 bp, Zea Mays
ttccaacttggggtttcctgtagccttttttagctgttctggggcttttatgggagtgcccgtcgcgcagaagtccgattcttgggtgactgtgcttgcgatgacggacagcggcggcctcggcgttcggcctattaacggaggccgagggagtgccgtggagcagcgtgggctcggactcggagacaacgggcctccagtgtccccaccagagcgtgtttctacgccgcctgcgccgagactagctgcttggtggcgcatgtcgtcgcctggtcctctccggtgctcaaccccgag

SEQ ID NO: 200751 - DNA, 524 bp, Zea Mays
agcaatagcatgtgttatggctaggaccctaacaagtggcctggttaggctgtagtactataaacaggcactgttgttgtggcatcctgatccaaagcttaatagaattgatagaatactcctacaaaaagacgtgccttctttttcggaaacttatcttggagtagttggagtgttacaactgctcacttgcagaaatagaaccatgggtgttgacgtgttgtattacgcccagctcagtctcctccatttagagggctgatgtacccttatcccccaattccacctccgcaatttctcataattcatacacataacaagcatgccttaatagagaaaagaaaaggatgaacattgtcccttaataggatgtaaagaacataatgagtaagtagacaaccgtttaatgcatctccgttgtcatttccatacaaagtatcacttatgcagcattgtttgaagatcattttattctctgtgagtgtcccagttttgtcactcaaaatatattcaatctgtccgag

SEQ ID NO: 200752 - DNA, 307 bp, Zea Mays
cggcgccgttacacggttgtttgaatggcaaggcggtaaacatatggtaaaggcgcggaattatagggaatagtttccacatgcaaacttgattactatgttacgtgagcgcgtaatttatggatcttgcatggggtgtaatggcggcaggtaaatataacgtagcataagatgttgaaagatatggcataaaaccgaaacggcacaaaagttgcataaatagtatataccgtttggcgtaaaacgttcagtcattgtgcgtaaatagtttattatggatattagttttacattgacatcgccataa

SEQ ID NO: 200753 - DNA, 480 bp, Zea Mays
aaaacaggtattgggacgtccttaaaatactttgctccttaaaaaagttcatactccaacagttccctttcagaatgtacgacagagtcatggagagagaatcactgtcgtcttccccgcatacggctcaagatgcacacttctctgcttatgaattcaaacacatggccaccagcccaccaccatttatatgacaaagatgactacgtgaaggggaaaacacaatagagcaaataaaaacataacagaacacaaccccattaatcatccaggcttcaatcgtcaagagctcagcgaagaacacacaacagtggggggatggcatggacatccctctcggcctctcctacagaccatgcccaaatcaccacgatactcatccaaatcgaaaacaaaactagcaggttgaagccacaatatcttgtctataaatcaaacagtagcatccggttctggctcgaagccagccaaacgaacttg

SEQ ID NO: 200754 - DNA, 325 bp, Zea Mays
gagacttacaaatgcaaaatctgaattcaatttgaatatcacaagggacttacccaaaacaaatcccacactttgcttgtgtgtgtcccgtcgttcccgtacggcttgagatcccaatgagcctagtaatgaacagctatctcttgaccgccctctgtcaccatcgctgggtaggcgaatcacaaacaaatccccaactctgtgaggattggtgtgcgatgccctgtctcgtcccaactaacctccttccacgccctggtgcctttcggttcaataaccctccgctgatcgaagggtttagaaggcttcaatgtgagggaccgac

SEQ ID NO: 200755 - DNA, 987 bp, Zea Mays
tcaaattcttcttttgtgcaaaggagcagacaggtaggatttgtaccattttttaattttttttggtgatgctctttgaatttattattggctaagcctgtacatcaggccatctgcactcagattttgatattttttattagcttaaaaatgttaataagcaaattttacacctgattacttggtgctgccaacatgcttggcttgtttgctctatctttttcaatgccactactttctttggcttcaacttgactatccttgaccgttctttgttcccaaccaagcagcatcatatttgatagattggcaaaaaatggaaggatgtatgaagttgatacaactaagcacctgaatgaatatggtgaggcaggcttgcgaacattggcactatcgtacagggtgcttgatgaatcagaatattcttcttggaatgctgagtttcttaaagcaaagacctctattgggcctgatagagagttgcaacttgaacgtgtctctgagttgattgaaagagagctgatccttgttggtgcaactgctgtagaggacaaattacaaaaaggggtaaaacagtgtctgacttttcgtattgttaagatatgaatcttggttcctagtattatgctagtaactattttgagttatgctagtaactattttgagttgttctgactcctaagttatgttttgtgctctatcaggttcctcagtgcatagatcgtttggcgcaagcaggtctcaaaatctgggttctgacaggtgacaagatggaaactgcaattaacatcgggtatgctgtcaagtagaaattcttaatatgtgggaagtaactttttgtaccttgttagcacatcacatccatcaacatcgtgtgatggctctatttcttttgcaggtatgcatgcagtttactgaggcaaggcatgaaacaaatatgtttgtccatacccactggtgagcaggtagcccaggatgcaaagaagg

SEQ ID NO: 200756 - DNA, 362 bp, Zea Mays
agccaattggagcactaaaccctgaacgtctaaagaagttccaagaacggtactctacattcgaggatccaatcataccaaagtttcattatggttcacattactccagtgctggcacggtatatcttcatagtagatatgaatccgatgtttacttagaattctggatttgcaatgtgaattccttgctcgattatgtggcctgcaattttgatatttggtcattgtccagtgcatacttggttatcacaatgtttgatttgtgtactaattactactatccctttcaggtcttgtattaccttttcagagtggagccttttacaacactgtctatacaactgcaagacggcaaatttgac

SEQ ID NO: 200757 - DNA, 307 bp, Zea Mays
ggctaaaaagggatgttgcctcacatgtggcggtttgtgatgtttgctagagggtaaaagctgaacataagagaccagctggattactccatccgctaaagatacccgagtggaagtgggaagaaattggtatggatttcatcgttggtctaccccgcacttctacagggtatgactccatttgggtaattgtggacagactaaccaaagtggctcacttcatccccgtgaggactacttaccgggagccaagctagctgagttgtatatggcaagaatagtttgtttgcatggagtacctaagaag

SEQ ID NO: 200758 - DNA, 291 bp, Zea Mays
ggaagtcgtggctgaggaagatggcttgggactgcttgttggtgcgaacgaggccctcaatggtgagccaaagtgcccaggcagtggtattgtcggtgtccatggcaaggtcgacaacagagtcgtcgacaaaaacgaagatccaggagtgaacacaacagtccgcttgatcccaatcagaatcgtcagggtgcggaggtgctgtgatgttgatgtgtggtcggaggccagacttaccgcacaaggacttgaagaagaacgtccacttggtgtagttggaacccgtcatcg

SEQ ID NO: 200759 - DNA, 460 bp, Zea Mays
tagcaccagtggatcaacaacttgttcagcttcaactttgcgatgtagcaccgcctaaggcgcctcaactcgacagttgacgtcatgtcccatcgtgactctaactcaacagtcatggtctccaacttactcaaaacttgcacccgctgagctcctcgccctgtcaacacccttgttcagactcaagcacattcgtgtcaccacatgagctaaccctgaagttggtcgcatcaaacagcagttgttggaggctttccttgcccctatcctcaaggcaactcacacgtaaagacccgagacaccaactgcgtcagcccttgaggcacctgtaccggccatctggcaactcgcacactagggcctaggacaacacctttgttgtgccccggaggcacccgcgccaggccctgagccatccgtttcagccatccgtttcaggccctaaggcatctgcatcaga

SEQ ID NO: 200760 - DNA, 501 bp, Zea Mays
gacttgggttgcggtgagttagattcagctagggtggaatagcactagggtacctttatgctatcctactgttaatcaatctccattgatgttttcgttggttgactatttttcacctccacagtcagcaccatctttctctcgctagcagccttgtcagatttgtttcatcgccttcatgccttggagatcgactatattggtgcaagtggccatgacaaggcccctgcttgtggagccatcgatatgctcctgtcgctcttgattttgtcaggattatttgggttgttgtaaaacctatcctaagcatggttgcatcaaaattcactcgtgcggtgttagagcaggcaaagtcaacaatcatgtttgcttttctgtctataatccttgtttcgactaatcacagattcttttgcgagcaccattgcaagtcaatgtggaacaaaagctggatctcaggagaatactctgtgtaatgttctttttggttgcccaggcgct

SEQ ID NO: 200761 - DNA, 325 bp, Zea Mays
gccgcttagaaggtcgtccatggtactgctgctggctggggtcagtcggatgatgagagcagtgaagagagaggaagggcagctcagaaaaggagacgctaggtgcgtccttgaggtggacagcggctagagtcgactgttgtgggctgcgacagggataggagaagaatgagggttagggttagctgtcctccaaaatccacgcattttataaacctcagcacattgcacatacgaacaagaaccgtcgatcgacaatgaacatctatgggcgagggagtgtgcgttcaccgtgtggttgggccggaatggcggcccaggccca

SEQ ID NO: 200762 - DNA, 546 bp, Zea Mays
ttagaggctggaactgaagcagaaaatgtttatcatgttggccaagtggtcaaatgtagaattatcaatgtgatccctgcttcaaggaaactaaatgttagttttgtcatatcccataataggtgagttctctgcatgctcttttgttctactattttcatgttctattaataatctgcctttatttgacatgatgagctgtaattgttgccttaattttgtagacgtattcattgaagtttattgtttcatagagcatatttctgtcatttacttgtcatcttgtttttgaacttgtactgaaatactgaatatccagaatggtcattttcctgatgtgcagatttatatttggaaatactgaaatacatgatgagctgtaatcgatgcttgcatttatttttgccacctgtaggattgctccaatagacactccaaagttgggcagtattgtctctggtgttgtggaacggcttactcctgcagctgttgttgttagtgtaaatggcttctccaaggggacaatactgaatgaacatttggcag

SEQ ID NO: 200763 - DNA, 314 bp, Zea Mays
ctgttttgtcgatgtcggccagcctcatgcggacttggtggtatccggatcggaggtcgagcttggtgaagaagctggcgccatggagctcgtcaacgaccgggatggggaacgcatccttgatggttatggcgttcagcgcgcggtagtcgacgcagaatcgccacgagccgtctggtttcttgaccaagagcaccggagacgaaaacgcggagctgctgcgccgaatgagcccttggtccagcatagctgtgcactgacgctccagttcgtccttgtgcagggcggggtagcgatacgggcgtactgccact

SEQ ID NO: 200764 - DNA, 392 bp, Zea Mays
aaattgtccgtgtgctggtttttggtggtgtggtgtctaggttcaacctatcacttacctgctacacctccgatccactctctctaatgagtttatattttatttttgtgtacttgtttacatactccggtgtctaaggataattagcgggaatgtaggtttccaagagcaccgagaaagaaacagcggagtttgaaaggcgggcgggcagtgggcagggagtacgagagatttgtctttggggacagaggccactgggctgggtataccccgtatgcatgtgcatagccataggggggcaaaggcaaggaatgatggcctggaaatgggcatcagtttgaggcatggcgtcgacgcttggttggctgcagcaaccgccttttgaggcggcg

SEQ ID NO: 200765 - DNA, 378 bp, Zea Mays
gcagagtcaccgtcagatactgtattgttagtcgatctcattttccagacattgccaatatatgacgatcgagcatcacgaaaagcagtagacgatttggttattcaggctcttggtgaacccaccttcatgaagccctttgctgcggtacttgtacaatctatggaaaagaatctaaaggttacaaacccccttacaagcttaaagcttctcagatggtcacactatcttctgaaatggagtcagtttgccacacttacaaaaggcgcctttaccagactggccaatgcacaagcagtcttatgtcaagtccttatggatgggtccttccgtcggcgccggacttgcaaacagttattcattcatctcttctccgag

SEQ ID NO: 200766 - DNA, 399 bp, Zea Mays
ggttcttggcactttgcccagtgattgcatcgtgccacttggattggctcgatgctttctgatgcgcttgttgtccaaagttcctgccctgatgcctctaggtgcagcctcttggggcctagcatactctgtctaacaatatattgctgttcagtgcaaattctgacattctttcatttgaatacattatcgcattgctgtgctgcgatttctcggtgtgttatcttcttttcagtttcccatttcatttgtacctgatgtcctatgcttattaagttgacattttagtatattgattcaagcctgtggtttgcgatgtgcatgtctgacgcgattattttgctgcccttttctggagtggaaagggataagtgccatcttcttttggataactatcat

SEQ ID NO: 200767 - DNA, 370 bp, Zea Mays
acgagctcgtcagtttggtttaatctgccatttgccatagctctgattgttttgttccgctacatatcgcttgattatggccttcgtagaaagagcgtaactagaacagatcatgccagtcattcactcgtcaaaacaaaaggtactgaggtaaagaaagtcattcatcagactgaaacggatggaaaaatagattggaggagcaaggttaactcgcctccagttgaagcagcattcgaacagttcacaaggcaccttatctcagaatgggtaacagatctgtggtactcgcgcgtaacacctgacaaggaaggtccagaggaactcatcgatgtagtcaatactgtccttggggagatttcagttcggg

SEQ ID NO: 200768 - DNA, 305 bp, Zea Mays
taggcctccacctccgtgctccagtcctatcgttcgctcacctctcttctagcatgagtagaccacgcctctcttcactctacctgcattcacccttgtgtcatctcctatcttgtcatccgtgtttcgccctaccatggagctacctcgccgaagtcctttctcatctcctccacgcgcacggcagctgctcggagcccttccccttgcaccctcccctccagtagcagcagactagacaccatcaccttggatgcggctccttctcacccaagccaagctcgcacaggtcatgtgcagccctc

SEQ ID NO: 200769 - DNA, 937 bp, Zea Mays
agtttttatatattaagtatactctctcctctatctctcctctatctctcctctctctcctctatctctctctctcctctatctctcctctatctctcctctctctcctctatctcttccctctctctctctcctctatctctcctctctctctctctcctctttatcacaaaatgctgtgggcacctctagagttcaatgagaagtagagtatataatacctgtggagatgatcgataaagcctgatacgacattcagacatgtcgccgatcagatagcctgcctggtgagacgacaacaaaatgctgacggaggtccagtgctccagtgctgctgcagtacacgtgctccagtgctgcagtgtctggtgactcgattgatcaagaaagacttcgacttctgcgctccagtgctgctgcagaattacactttcccccgccggagtagtcgaggctcaactcaagagaactagagaaggctccaatcctagggctaggaagcagaaaccgtgaaggtgccggtgggttcacgtggaccccgatcctcgagcacctcgatccgaggtcgagacgtctcagtgagacgtcggaaacggctgacgggcaggcctgcgcggcctcctcggctcctccactcagtgagagcattcaattgcagtgtttaaatcctatgtagtctccttgcttcgcgtatctccgtcagcctggtgactcgattgatcaaagaagacttcgacttctgcgctccagtgctgctgcagcagtacactttcccccgccggagtagtcgaggctcaactcaagagaactagagaaggctccaatcctagggctaggaagcagtaaccgccgaaggtgccggtgggttcacgtggaccccgatcctcgagcacctcgatccgaggtcgagacgtctcagtgagacgtcggaaacggc

SEQ ID NO: 200770 - DNA, 295 bp, Zea Mays
gcccacgcatgctggaaggtgacgcaacaaccatgacgaaagatgaagccgtactgaacacgaccctcaacctcaccgtgagcgtgctctgcgggactcatcaggtaccgctacgttgacatcgaacaagctacaaggacttgtacgccggatggacgaaacatagcgccataccaagagtacggtggcgcacgacacgttagaagttgccatgccgcgtgtgagcacacctcgagactgacccagggaggccgccacgcactaccgcgcgagacgtcagctgcagatctctctc

SEQ ID NO: 200771 - DNA, 551 bp, Zea Mays
actgcttccaccttgctgctgtccatagccactcctttagctgagatgatgtgccctaaataagcaacggatgtcgcgccgaattcacatttggactgtttgacaaacaaattgttggtcagcagggtctgtaggacagccttgacatgtatgaggtggtctgaccatgtggcactatagatgaggatgtcatcaaagaatactaggacaaaccggcgaaggaactgacccagtacttcattcatcaacgcctgaaatgtcgctggggcatttgagagaccaaatggcataaccagaaactcaaagtgcccatggtgtgccctgaaggctgttttgtgtacgtcttctggatgaacacggacttgatggtagccggatcggaggtccaatttagtgaagaaatgtgccccttgcagttcatctagcagctcatcaaccacgggtatagggaatttgtctttgactgttttctcattcagtgctctataatcaatgcagaagcgccatgatttgtccctctttttcactaggagtactggagctgaaaaagc

SEQ ID NO: 200772 - DNA, 322 bp, Zea Mays
aactgaagtatgccattgtcgacaaattccatggctctaacaaacttgtgctcatgcccaagcagcagagctcatcagctgcagcttctatgcttctgcttggccctctcactgcatgtcccttatcatgccaattctctctccttcagctacagcttcttcaaccctgatgacttcaggccggaggacgacgcgcaggtcgtcgatggcaggatcgagctgctcggcgacgagttcagagggcgtgccagggggcgggtgtggcacaagcagccggtgcagctatgggacggcaccaccggcgaggctgccagcttcaccg

SEQ ID NO: 200773 - DNA, 654 bp, Zea Mays
accgatcccaccattccgccactcgccgtggtcgggttcgtctgcgacaaactgcgaggtaattggtcattgattgcatttgttggatgtagagcatcatgtagcaccgtcaaaatagggcgttaggcgttgtaccgagagcttggggtcgccgggcatgccttgccgtcgtgggtgctgtccgcgccgccgtcgcgtttcgtcgccagggatggtggataatctcggtcatctgattgatcatcgacggttaggattacaagtgcgtaccgattcgccccctgctcatctcagccattgatcggagcacgagcgggtgagatcgtgctctggcgtttatgtttgcggagcaaatatgggccgtaggatctagatccaaggctccacattgagtaccggttcagaggagatcagatctaatctatgccgcacgttgttgatcgagcggccagtgctatccgatacccgttcacctggataatttgcagatgaaacctcatagatttagagattagaacccgccgtccctctccactgtacgctgtgtctcaagaaatttaccccgtagcccctgtactttccaggaattgaggcctagtccagagatgacttaaaatcgaataaatgaatagaaaatggatttttaacatgaaa

SEQ ID NO: 200774 - DNA, 407 bp, Zea Mays
ctaatacatgcatatatacttaaaagaatgaaaaaaaggagatcagagtggtcaatatcggggagaaagagaaggcccatttaacgtcacaagtctcctagcgtaacagcttatcctctcccctcccaaactcctttgttgatgcttgtcactcgcccacgcccttgacatcgcctgcttccccaccggccattgccgagaaggcccatttaacgtcacaagtctcctagcataacatcttatcctctcccctcccaaacttctttgttgatgcttgtcactcgcccatgcccttgacatcgcctgcttccccaccgtccattgccgcccccatcgatgttacctcctcccccactgccacatgacgtctgtgccgcccccatgcgtccttgcctgggcagatgtgc

SEQ ID NO: 200775 - DNA, 272 bp, Zea Mays
ccaaagtccatggcagagtgccagaagcgctcagattgggtcaaatggaaagaagcaatagagacgaaattgctctcgctttcaaagaggcaagtatttgggcctgtcgcccgcacgccccccaatgttaccccagtcgggttcaaatgggtgttcgtccgaaagagggatgcgaacaatgaggtggtgagatacaaagcgagacttgtagcacaagggttcacgcagagacccgacatcgattacgatgaaacttactccccggtaatgag

SEQ ID NO: 200776 - DNA, 348 bp, Zea Mays
tttcccactaagccatcagcaatccaagtgagaaaagactgagaacccatccagtttgataataggtcgcttagtaatatgctataatcaacgtgtagtgttctttttagattgaattttcaattgttgacaggaatagaaacaaaacgccaaaagatatgctttattctgtttcagttgcaaaaggctctgaaaggcttcttgtatttttgccacagatctagattctagaaacaaaattggttacaatgggaaaggcttcttactgcagtctagcatatgagcggtgcaatttgtttgaactactaacttattttcttcttcacttttatagcaaaatagtagcaa

SEQ ID NO: 200777 - DNA, 330 bp, Zea Mays
ccatgtttgatttcctgcggggtcatggcctccgatccgtatagcaggcgaaaaggagtgaatccggtcgcccgacactcggtcgtgttcagcgcccagactgcttcaggtagcaggtcagcccatttacccttcttgtcgtcgagaagcattttcttgatcgccgtgaaaattttgccgttggcacgctccacgacgctgttggattgagggtgataaactgaggcgaaggtaagcttggtgccaatggagaagcagaagtccctgaagtcttggctgtcaaattgtttgccattgtcaactgtgagctcggacgggactccgaatcgg

SEQ ID NO: 200778 - DNA, 316 bp, Zea Mays
cacaaggacatgcgccacaacctccagaactgcagggatttcaagcactccgtcgggcacgaccgacccttccaacctctacctcctcccccgccgtgaggaggaccgggagaaccgcaacaaccccagcaacaggaggagggaagaggaggagccttcccgcgcgtcgacagagaagtcaacatcatcttcagcggacacgggtcacaagaaagcaagagacaacaaaagctcaacgatcgtcagatactggtggcggccaccggtcctcccgccccgtaccaatggtctgagcacccgatcaccttcacccggg

SEQ ID NO: 200779 - DNA, 315 bp, Zea Mays
catccctgcgcttctatttctttacagaccgaagtccacgacggtgaacggcgcagggacaagctccggcgagcttgtaccggctagaatacttgaggactgacgttctactttggcagagaccgaattcaatccctaaccaacgtttcccctcaactaatttcacgaacgacgatctaacctgctctgtccacagtgacagtgggcatcacggacattcaatcgtgttcccgacgatcctagggactctagctcaattgggtgggtcagcgagtatcagaagcatccaagaacactgaaacgaggactcagagg

SEQ ID NO: 200780 - DNA, 356 bp, Zea Mays
gtactacttttatatatttgtgcattccttttttcagatttactaccttgatcacctacatcaccctgcatctcctgttaacaaatatggtactccacgcattaagttttttgacaatgagaccataaaagagttggctcgtggtgacaggcgccccccgtaaaactggtgaaccattcggatatgcagaggttagacataaacaactttttgtcctgttatgcagatgttaaaatattattactgctaactgttctatattactttatacagtttcgtagccgttcagaaacgtgttgcttctgccgttttcaacatatatgtgccacgtatcaataatttgattggcaacaagt

SEQ ID NO: 200781 - DNA, 455 bp, Zea Mays
taataaattccgcattgagactcaaatatctcaggtgaaacatattgcaaatatctttaaagtggtgattcctcactcccttacatttctttaaattcaatacacgtaagaccagaaaggccgaaagttttggcatcaactggaacactttagtggacacagtaagtgatcttacgtgggagaaactcattgtagccagctgcttgacttcctcttcctggctaatttggagggataaccggtggatctttttaggcagatcaagagatatgggctgttgctcacctacttttgttagaaaatgctcctcatttgacaagaaactgataagatcaaggaccatatcatgtatccgacaagaaacagtcttaccatcacggccaatatctacaggttccaacatacttctgttaattaactcttcgatgtaatcctcacctacttcatataaggtc

SEQ ID NO: 200782 - DNA, 360 bp, Zea Mays
ccgctaaaagcatttgctcgagagtttagacctagtgttagtgagagttgcatacctatttcttactaggtggttgtgcacaccaatgttgtacatttgatgggctcgtagtaccagacgtttaaacgtgtttgtggtgcagcgccaccacttacggagggaacgaggttcgctgcaatttggctagaggatctatagtcaaaatggcagagaccagtccgagagagatcgtttcgacgatccacttgcatattcaagaatggtagtacatataaattaactacgtagaaatcagagtctatagttttacaaatagatttaaagttatctaatttaacttcctacccttttaggtatttt

SEQ ID NO: 200783 - DNA, 271 bp, Zea Mays
tattgttaccattagatgtggctctaaataccatcaactccaagggaaaagacaatttccaccgtttcaggtgtagcattaccaacatcttaataatgatattttattgcatagacatcatcttttcttacactgaatatttgttgacattacaatttccttagagaccaaatgggacacgcagcgcgcacccaacgtttttgtcatcattttaattttgcatttcttgaatccgatcagtactaactagcttatgatgacacacaacttt

SEQ ID NO: 200784 - DNA, 421 bp, Zea Mays
ctcatgtggacattgagactttgcatatgcatgtttactatttgaactttttgtcttatgcatttgttgaactatgtcttatgtttgtggacaaatgtctggtgatattttgtggatcaaactatgtctgttaaaacttatgtttatattagttcgaattatcctgtgtatggttgatcgaggagtgattaaatttgttgcgcttatttcacataatacttcttgtatgcctcgataaccatgattgtacgaagatctccatcaaaactctgatcgattatgtgtgttgtgtgtcatatcttcaactagaaatatcatgcacacatatagggggagctattcctacactctgagttttgttgagacttatctatctcttggatggaacttcaaatcaagataagtcttttgaaactcatct

SEQ ID NO: 200785 - DNA, 304 bp, Zea Mays
agaaaagattgagtgtgcagttgttcttctacgccctatatttatgtggttagatgataaagttgacaaaacttccctgtcagagagagacacctttaaggtatgagaatttgcagtgattatgctagcataatatatgttctatcactttaattcagttgaatgaggcactttttttgttcgtcaaattcagttgtcagcatttatttggtaaaaactcagcattggcaagctaaagttctttatgcattttccaggtccatcagttgcttcagtttactgtaaaattgtctgagcatcctac

SEQ ID NO: 200786 - DNA, 298 bp, Zea Mays
gtgttattaaagattcagtaaaacagaatctgaaaagatttcacgaggaagcccggcattctttaattagcacccctgaaaggaagttggctctcattattgatggtagatgcctaatgtacgcactggacccaactcttcgtgttgatcttcttggattgagtctaagttgccactctgttatatgctgccgagtttctccgctgcagaaggcacaggtaaataacgtttcttgcagagtaccattttcctcttacccactgaagaattaacaatatgggattttgttggacccccc

SEQ ID NO: 200787 - DNA, 475 bp, Zea Mays
tgcaagtatttgaacaacatatagaaaaatgtgcattaatttctggagttgttgatgaagtgcatgaagttattgggagaaccttagcagaaacaagtgctgcttatgcaaagcccagtcctaggcactgggcctctacttttcaggcagctttgcactcaagcatcaacttgattgaacaaatgactgaagcttttcttccagaatttatcagatcagttgttccacataattcagaggtaaaggaaaccgtcaggtcaatttctgaggtacgtggttctgttgataatgctctagagaagctgattgaggttgaacttgagagaacatctcttgctgaattggaacagaactactctgtgaaagttggcagaattactgagcagcaaatagctcttgaagaagctgctgcaagaggtagagaacatctatcatgggaagaagcagaggagctagcttcacaggaggaaatctg

SEQ ID NO: 200788 - DNA, 441 bp, Zea Mays
ccttatcagagaggagctggggaaagtgctccctccgcctccatccgtccgtcgtcgcccggcgaatcgatcgaagctagcaatcaaatcagaaagagcaagagaagcgcccgagtccctaggccggaaagctatggacagcgccgccaactggcggtcaacgcagggcaccgaccctgccgccggcggcgtcgatccaaacgcggctgcccccgccggaagcgactggcgcacccagcttcagccagaggcgcgccacaggatcgtgaataagatgtacgtcctctccatcttccttccctccttctgatgggaactgtcaagcgattccaattctttcgtttcgccatggcggatccatgtcgcttcttttacgactcgatcgattcgattcgtgtacacctgcttccctctttacttatctctttaccttatttagat

SEQ ID NO: 200789 - DNA, 1642 bp, Zea Mays
tttggcggatccctggcactggcagtggcagctcgtaatccgcagattgatttggttctcatactagtaaacccaggcaggtgatcatttctggtttcagatttggtctgaataattcctatactcaccttattgttgccaactgacatgtttcgctttaccagctacatcatttgcaaagactccattgcagccagtattgcctctactggaatcagtgccaagcgagtttcatgctacagtgccgtatcttctcagttttgtcatgggtacaactcctcttagctcttctttgaaactatgaaacactcaagaatataggtcatctttatcctggtcttcttttcacccctttcccctataagaaaacatagtcttaaatgttcacgcggaatttcttcttaaatatacttgatgtcaaattcgattgttgctccacattttcttggtagagaaatcgttaccttttttcaactcattttagtattattatccctttgttatacactaaaaaggatagttccttttccttgacaatacttttgctgctgttttaatctctaataatctccacttatacactaacaaaattctcttatctctttttcgcattattatgtatttcatttcttttcatgccacccctgctaggtcagttctgtttcttcatcaactaaacaaagagcagagaattcagaacaattcaaaaattaaaggcacataaatgcagatagtatagtatagtatagacagtatggaatcaacgaaaaatgttgtcatttataaaaatactcaaactttttgatgaaccacaatatgcatggaacgtactagggaaatcacttgaaactttgaagacgttcaaatagaactcttggatttttagggtatccaacatcttccttccacaaaaaatcttatacataatagcatctatattttaatgtattatatatatttttttgtacttagtggcaaaagagaggcatgtttcattggtaggaaatatattagagctgtaaccatgtagaaataaaaaataacttatatatatatatatatgttcttacttcagaagatatgtttcaacaggtgacccactgaagatggctgcagttagcattgaaaacaacctatctcctccagaaactctgcagaaattgtcagacagtctcacatcaatgcttcctttgctttcagtatgtcatccattgttcccgcttttccttcccagttacatacaagtttcaatacttttgaaaccataaacctaacgctcataagtattgtcgcaccagtcttcttccttttccttaaacacgcaagagagttgcatacgtttctactaactcagttgttctataatctaagacccaattaacaaaaaaaaggtgttaggaacattgcttttagaaatgctccatttttttgtaaaagatggaataaacatgtctttcttttaacttattattttaaagattatgtcctttctccttgcatgatgaaatcgatcagctacaaatgtggctgcataatggaattccttgttcattttgggaagcatttcgtctcatcattttttgacatcatgttttttcccccttatctcaggaactgtctgatattataccaagggatactc

SEQ ID NO: 200790 - DNA, 316 bp, Zea Mays
atccccttcgtcttccccagcacactgcacaccttcactcccgcatcctaagctatggcggcgctgagctggatccggctccggccgccccgtgctgccattctcattttgctgctcctcgccctcaatatctccccctcctttgccgctaacttcgagggcttcgactccgacgaccttcctgtcgcggccggcggcctagatgctgacgatgacgagggcctcgacggcgtctacctcccgccccctccgcccatctccctctccacctccgctccttcacctcccgtcacgacgacaccggcgccgaacccta

SEQ ID NO: 200791 - DNA, 557 bp, Zea Mays
caccccatggcagaagaagatgttcacaagattgttggggctgcagtaccgcattattttcaagaagggagtggatatcagtgcggctgatgcgctgtcccgacaccaagctgtgacttcttcgtgcttagctatatcttcttgcactcccaagtggatatctgatgtagcagcatcatatgaacaggattctgaagcatctgctcttattgcaaagctcgccattgattcaatagtagtgcaacattttacctggtaggatggccttcttcgctacaaacaccgcatctgggtgggtcagtcacctgacttgcatactcgtttgattgcagccatgcattcgtctacaattggaggtcattcgggaattccggtaacatacgctcgtgtgaagcaactgtttgcctagaagggtttaaaagctgatgttaagacgtttgtcacaaactgtctgacctgtcagcaagccaaggcagatcgtgctcgtttaccgggcttgttacaaccattgcctgttcccacatcgttatggcaaatgattactatggatttcattg

SEQ ID NO: 200792 - DNA, 304 bp, Zea Mays
cgccgcggtagagtgagaccggggatgaagaaacagagaccaccacaaccaatcctcgttctcgtcatcaatcggggctcggtcggagtcctggaggaatggttggtgggtgccgtgtatccctggtatggagctgaggacttgggatggtcggagcaatgggatatgatccgccagcgctcctcctccgccgtggtgccgcaccgcaccgtcgacacgcgcatagactagcgtcggggtccccatgtcggttctaggagcttcattgcgccccgcggatggtgtgcacgtgcttgactcgggc

SEQ ID NO: 200793 - DNA, 548 bp, Zea Mays
ctttgctgtcaatacaatggtcagaaagcctatgtcatcgtactgaactttcgccatcgagttcattactcagctgctcaaaccggaattgtaggtaagcgtgtcattgagatgcttgatcaggtgactccagtggtgaaagaaatgttcagttccatggaaagctccagttctgcacaggcggcggcggcagcagcagcttggccggaggatctcccagaaagaagaaccctccctcctgttctctgtcgcactacatcccatcatccatcagacggtgacgaggttgcgatgcacacaggacgttgcaaagttgaggcaccggcgcctgggcacgagacagatgagggcgtttgcaccagggaggaggatggccaaaccagcagccgtgaaccgctgtcagctcctattcctaccgctgagtttttaccgctgcagccgacgctgtcgtcggtgtccccacatctgctgtcggcgccgccgccgtccccgatgcccgtggttggcttgtccatgcttctgcagtcgtgggaggcaacgcaagatgg

SEQ ID NO: 200794 - DNA, 499 bp, Zea Mays
cgctccaatacctcaccttcactagacccgacatcgcatacgtcatccagcatttgtgcctccacatgcacatcccgcgagagccacacctcacagcttcgaagcggatcctttgctgcctccgcgacaccctcgaccatggccttctccttcggccctctctagcatccgagctagttgtctacaccaacgccgatctagcaagttgtccacttgtcccaacacgggtcgatccacctcggactacgccatgttcctgggcgtcaacctagtctcatagtcctcagagcggcaaccatcgtctcccgctccagcgttgaggtcaagtaacgtgtcgtggccaacagcgttagctgcttccgaagcttcatagccctcttgcccgtgccacactcgtctactgcgacaacatcagtgcagtcacacctcatgaccaatcccatgcagcatcaacgcacgaagcacatggagattgacctccactttgtccacgagtgtg

SEQ ID NO: 200795 - DNA, 369 bp, Zea Mays
tggccggacgcccgtgctctccatggtcgtcacttcgtatggtcagcatgccatttaccatcctcattgcaatgcaaatgcatttctgttgccacaaactcacaattgcgttgcatccgcacattgacatcactgcatgtgaactacaaattaaaaatttctgacgaaaatagtatgtgttgctgaatctaataacaggtgagatatggtcgggttccgagggtggaatgataaaggtgtggccttacgatgccattgccaagtccctgtcattgtcaccagaagagaaacatatggcggctttgttggttgagagagcctacatcgacctgaggaaccattgcacagttggtaatgtttgctcattgc

SEQ ID NO: 200796 - DNA, 343 bp, Zea Mays
tggagctggtaagacagaaagcactaaaagccttatgcagtatcttgcatttatgggtggtaaagctcaatctgggggaaggtcagtgcaacaacaagtactggaggtcagggctccaatttctcttcttgcacttgggaatattagcaactaaaaatagtggatgcatggattatgaactggcatcttggaatgtttgtaaaggaacaagctgatatttctgaatgattgcatcaaactcacatttcaccaatcttaatgccattctagtgtcttatactatccaatctatctatttgattgatgcagtcaaatcctgttcttgaggcatttggaaatgcaa

SEQ ID NO: 200797 - DNA, 332 bp, Zea Mays
gcctatgcaaggaactgatgtacatctttgaagacttagcagcaacagaaagcaattgtcatcaagctgtgatggggcatgtctattttttgtgaagtatcagacagttcttcctatttcttcaaatcatggaggaattatttgggtgttagaaaagacaaattctgtttttttcctgctttgttgttcgatttagattagtgagtacagatttcaaatgacagatgaatcataataaggtttatggtaaattctaactttcttaacagtatgcaaaattgttcttcatactcctttgtttctgtctgattactttcctcttagcatgaaac

SEQ ID NO: 200798 - DNA, 844 bp, Zea Mays
gtccaatccgtccgtgaagaatttatccgtattttcgtttgcgtcgcatcgtttctgcgaaggatttcctgttcgttttgggggagaaaggcgtcgtccttgatgtctactatcgcgaccccgccgccgccgattgcgcaagagaaggccgccagccggaataagcgcaagtaccgtgccgagccaccttccgccgagttgggcccatacgggctggagtacccgctgacggcggactgcatgggattcgagtttatgtcgcctgagaaggctgccatggcagcagcggtagccgctgccgagggtgtcagccttgacctcctccagaactcgtgcgaaaagtgcaaagatctccaccctactgcggaggagttactggactgccaacgatatgtgaattggagcgacccaaacgagacgcagctggaggagatccttctcaagagtctgggcaccacctttgacaatgctgtgagtctgatcaccacaatgggctactctgaggcggttgcacgggctgctgttgtgcgggcagctgcgcaatacaactggagggagagccttgcagggtttggagaggcagcagttgaggttctcaagacggaaggggacatgttgccgagggagggtgcctctgttgaagacatgaggaggattgagcaggctgtgcttggtagtatggttatgtgggtaaatgaggctcagccactctgcaccacaggcgatgtaatgttttgcttgcttatgtctgacatgaacgtggcaaatgccagtgccatggactacaatacttcttccctcccatctgttgctgctcaagttattgcccaaccagacgcgggga

SEQ ID NO: 200799 - DNA, 305 bp, Zea Mays
ctcgagagagtgcgtttgagtgctcagaacgaagctggcgacaatcctgctgtggctgcgagaagtggcggtgatgccttgcggagccccgctaactgtggagtcagattgcattccaacaacagtacaggtttacctggaaatgtccatgacaagagtccttttgcaaagcgcaaggtggagaagtttgatatgtccaaccttgagtggatagacaagattccagagtgccctgtgtattgtcccaccaaggaggaatttgaggatcccattgcatatatacagaagatttcacctgaggctgc

SEQ ID NO: 200800 - DNA, 284 bp, Zea Mays
gctcgaccggaccgcgtggctccggcggggtcgccaccatggacatcgggcggcgccgctgtctagctgggaaggggtaggggagaattgtgtgggccgttgatcggctattggacggtcagatttgaccctgtctgtagcgccctcacgtgtaatatatgccctccgatcgggatcgagtggttagggttagggcgctcttcatcaagatccggaccgttggatggggatcgggcgcattcgaagccaccttgggtattttaaatccgatccgtagatctcgg

SEQ ID NO: 200801 - DNA, 933 bp, Zea Mays
gtctgctgctccttttccaaataatattgtgacatactggaaacttgacaaaactgaagataaatggcggcgccgactgaagctcaagcggaactataagtttgatgagtgcctttgtcatccatcatccatcaaatctagtaacgataatgctgccccaactgttgacccatctgctaatgccaagataacagaaaaaatgaagcacttacttttgaaaggagtgcgtggaattacaggggatatcagttctgaatcatgtgaggatagcaacgacatgattgatcctccccagaatgtcccgccagagaaccacactgttagtgatacttctgattctgcagattcctcagattatcctgctattgttcaaaatagaaaagaaagttcatcaaccagtagtgataatgattatatcgaggtaagcaggtccattatgtagttgcagaatggctgtatgggtatttgttcttcttccccactcaatatctttatttctttctcatttcccaggtgctatcatcagttcactgtgttcttgtaacccccaaaagaaaactagctgggcaattgactatcacacgaaatgccctacatttttcttttgaatttctagttgaagggactgggggatcatctgttttcgacagatttcatgataaaaaagattcagactccaagaatgagatgggaggtgtggaaaaactgaagggcaatcttgatggaggacgaggcaatgctgctgaatctagcgacactcaaattaaaaatcaatctggtaaaatcaaacaccatagaaggtggaaaataactagggtatgtctgcttttttctatttgagagtttgtgcgaccttgtgttgactctatgggctagtcacaaatttgactattttttccttgttgacagataaaagcagttcattggacacgg

SEQ ID NO: 200802 - DNA, 624 bp, Zea Mays
gcggaatctgtcgtgcgtgatttattgttggtgagtagtttggattacgagttatatgaggattatgttagaaactagtatgcggcgtgtaactgtgctagtgatgtgaataacatatcagtaggtattgttggtgtcattagcaagtgggatgattttggttgtgcgataaattttgaagggcgaagaacatgtctagtgtgtcgatcaggttaaccgataggttccgtaaatatacttgtgatgcttttatgtgcatgataggctcgatgccttgtcgtcgtagtctcaggaaattttctgaaatatgctagtgctccactgatgggttgaatgaacttgagatgtattacaatagctgtgtgtcgtgccggttatccaaaaatggcgaaaggtggtgtgtgatggtaattgggaaatagtcacgtcattagccaactcatgttaggtaggagttgattgtgttaagtgattgttatatatatgttgtgtctcgaattgtgataataatagacaagccgatgagtatgttgtctagcgggctgtgtcgttgctctagttagctgaattgttagatgacttggttaagctcgtaatcatggtgaattgcttgttgtggtctaa

SEQ ID NO: 200803 - DNA, 635 bp, Zea Mays
ttcccttttatagctcaagggaggcacatacaaggatactgagccccgacatgtgggcccaggggcaaaatggaaggaagaaccgatgcttgtaacgcctgggcgatcttcgagcgccataatgtccgtagtccatatagtattgatatgtcgcgctgcttcctctataacgcgcgagtcatgatgagtgtagtacatgtggcagtatggatgtgccgcctgccaatggaatagacaggcacgccgcctatgggatggtctggtcgccgcctgccagcggagtggtcagggctcattaaatgctgaggcggcacatcgcctgccagtggaatggacagggctcattaaatgccgaggcggcacatcacctgccagtggattggactggcgacgcgccttatctataataaaatgcaaaggtcgcgcggtccagaggccttacatcaggctctgccccgtttgcttacgtcaggtgcaccatgccacgtgacagcatcggggctccgcctgagcgaggagcaggagcgtatacagtgtggtccgaacacgtgtcggctccggaccacctcctggccttgattaaggcctaggtattctttgtctcagaatcccgggaccttgccgtgagtggcccg

SEQ ID NO: 200804 - DNA, 283 bp, Zea Mays
ttataaagctaaaaaggaaataagagagatggagagacaattttgctctcttccccgcagcgcacggtggtctgggtgtggccgtgtgggtgtggtgtctgtagtctgtactcgtactcgtagatagaggcttttcaagtgccacctacgcaagtgcaattcaagaatgaatcgatggagagaaatttggcaaaatgggtcgctctagcttgccgctctgtaaaacacaccgcttctagctgtactcgtaaaaacgggtcgctcaagtctgatcgctcgtcag

SEQ ID NO: 200805 - DNA, 309 bp, Zea Mays
aagaaaattggttctacaccacttgatgtgtttggtgaggcaccagatataagaagcgccatgtcaaagaagggaccctgcaacaaagtacatcgtacatgtaggtgtgcaccagatactagtcatcagacatcagcggtgtggcatcaggtacgacatcgaatatgaaattcagagaagatatcgacgtgtttgggaacatctacaaggcatctaaagtcttaaaagccactaaagaatgaggcctcctctgcgtttccggcatacggacgctcgtgcgtgccgacacgtatcccatcaccggactcg

SEQ ID NO: 200806 - DNA, 405 bp, Zea Mays
catgcaattcaaaatttaggaaataggccttagctatagcagcatcaaaacaaattggcgatagtggtcgcaaaagattgaaggcatgacactaagatcgatgccaatgcgggtctgtaccgaccactggcgtggcgagtggcgacccaagcggtcggtatcgatcgctatggacgagaggcggcacgactggtcggtcggttgggccacctatcggttggtctgggctacaacgctcgcgttggagagcgcacggtcaataccaatcgaccggtaacgactgatgcgttgggacctagccgctgccaaccgggcacggtcggtaccgaccaactggtgtccacgtggcagcccgtgattcgtccatttcatttcaatcatttcaatttgataaaaatcccaaaa

SEQ ID NO: 200807 - DNA, 456 bp, Zea Mays
ggctgattcgagcccaattccatcctcaccgtccttgctggctgtggtcgaagctacagaggagcccttggctgatcatcccctgccgccatcttcaacacctctcttggcattcggtgttgttggtgatgtttctctgcgtgtttacaccaggacaaggtggcagcacaagactcaggaagaagtttatgttggtacacctgctgcaaacgtttctgatgctttccttggcaaggtaaccaagccactggatcagctccttccgtgccctaatgttcctaaacaacgacataaggcccctccacaaggatctttacctcgtcgtagcagaagagtagcaggtgcgagtccttgctctccaaggtctgtgacatttgatgcgcaggtcattcactccttacgattccctattgtgaatgaacggattactatggaaacttaggacgcttatggaag

SEQ ID NO: 200808 - DNA, 397 bp, Zea Mays
agatttaggaagatctaggaaaaagatggggaaaatctatgcgaagctcttcttctctttcccatgttgcttcctcttctccatggtgactccattgtactttgcacatctttatcaccttatttctcgtgacacgagtcagtgtatcaagaatcttgatgggatactctgcataagtcagatcatcttgaacactaaggtcctccattggtagctgctcttcaggtactctgagacatttcttcagctgagatacatgaaagacatcatgaacatccgcaagatgatccagtaactccaattgatatgccacctctcccactcgcttaaggattaggaagggtccaatgaagcgaggggacaactttcctttgactttaaatcttttcataccccg

SEQ ID NO: 200809 - DNA, 367 bp, Zea Mays
gcttatgcagccatatgcactcattcacccaataaaccagttctcatttttgtgtcatcacgtcgacagacaagacttacagctcttgatatcattcaggtcgattctactatggatctatgatactagatgggtataactataaacattactgcaatcttatctgtttaatgtgctctacgtgcagcttgcagcatcagatgaaaaaccaaggcagttcctgagcattgaagacaactccctagacatggttctttcacaggtttctgacagtaatttgaggcatactctgcaatttggcataggtctgcatcatgctggtttaaatgacagagacagatccttggttgaggagcttttttcaaac

SEQ ID NO: 200810 - DNA, 280 bp, Zea Mays
ggcagataggttgggatagcaagtgtaaccgaacacacgaaggtgttcataggagggtacagttttgaagagggcgaagtgaggagtggaaaaatgaagggtcttggtgggtagaatgttgagaagaagtgttgtcgtgtggagtgcttcaacccagaaggttggtgggatgctggcctgaaagagaagaaagcgaatggtgttattggtagtacggatgatgcgctcagctttaccattctgagatgaggtgtaggggcaggacatgcgtaggaggaca

SEQ ID NO: 200811 - DNA, 350 bp, Zea Mays
caattacattgatcaggaaccggattctcccattatattctttggatccttgcagcatgcagcccatatttgatttcaacggctaattgggttattggtcagcttgcgatatgcctaccagaggttacatgtttttcttgttttttaaattccatcatctcataggacatgctggatcaaagtagaggcttaatgtaatatgtatatccctctacattatacatttcactttatttcttgtttgcttacctgtaggacatgagttctagtatttatcagtccttaatgaaggcgttgaccatggagtatgtggaggacataacttgttatccggtttgtgcctctgcttc

SEQ ID NO: 200812 - DNA, 360 bp, Zea Mays
gcggaacgctgccttccacgtgccccagcatcttcttcacagcgggccgctcacccgcgccgcgcgccactcgccgcacaagctcgcgggcactccgccggagtcggggccagcgtcatcgtcggccgcaactggagacggggtgagcggtgggcaggcggaggttgatgcgatccggcccgagacggaggagacgccggccccagagctgccgctggtggacgagatgttggaggcggtccgatcccgtggccctggcgtccatgtggtccctacctttgctggtgagtcctttgtgccacgaagactgctgtgatctctcgtttgggttgtgaattggggatgttcatcactagttgg

SEQ ID NO: 200813 - DNA, 496 bp, Zea Mays
gagagctcgctggagccagggtcgtggctggatggcgtggtggcgaagagttcgtcgtagccggagctggagagcgtggcgttgtagtcggtggagacttggaggctggagtaggcctactcgaagaaggatcgcctactcccccgacttcctcaaagtgggcgtactcgatggtgaagtcgtcgtatgtcggagtcgtgccgtcgtccaccgccttgtcccaggcccatcctcgcccttcgtcgaacactacatcgcgcgccgtgcgcacatgcattgttcctgggtcaatgatgcggtaggcctttgagccctccgcgtagccaatgaacacccctggggtgctcctgtcgtcgagcttgccgatgtggccaagctccttggtgaacgcgaggcagccaaagacccgtaggtaagagaccaccggcttgcgcccatgccaagcctcgtacggtgtcatctcgttgagtgccttggtgggcgagcggttgaggat

SEQ ID NO: 200814 - DNA, 1657 bp, Zea Mays
gcgcgcccgcctccgaccgaccggccgccacgcgagcgaccgcttcggcaaacggggaggaggaggagtgtttgcttctctgtcttgatcggggaggcgccatggcggacacccgcaaattcgtgctgcccggccaacccccaggtacggctcgctcctcctgtctgcttctcctccggggttggggttttgcgcgctccccacgggagagcacggagaattcgatggttttacggccacagatgcgttttcgtttcaagacggagagaaaagcaactgcacgtgccgtgtcgatcgaggacgagtcatcttaaatgctttattaagtacatctggaaaaagggccgtgcgtcccatgttcttgcagttgcacttgcagtccccgcgaaatttcaccctcttttttttatatctacaaaaaaaaaaaccccggtccattcccggcctttgcaaattcgctctatcgccccgcggaatttcgagctggatgacgggatgagtttctctttcatcggccacgtattttgtttttcgaaagaaagcgactggggctagtctctctctggcgttttgctgacttttccgaccaataattcagagcagacaaaaaggggtttcggtaccaagaacgaggagtcgaggaccgtatgcgagtggtggtggtcgcctggtcggagcagttgttggcgttgactaaccggggactaactaactaacctcgtcgtgaatgaatctgcagacatctcgcagatactgcaggaggctcagaaccggtggctgcggcccaccgagatctgcgagatactgtccaactacaagctcttctccatcgccgccgagccgcccaacatgccgaggagtacggtttctctccctatgttttttgtgctctctttaggtgcatgctgtggcttctgaacactggcctcataaatatgcttattaaattccattagcaatcgtgatgtatttatgctgtgggctatggaagagttgttgtctgctggcagcttggcatgggcatttcggctgtgtatatttctttggagtagctagtgatacagcttatggtaaatttttcgcttgctttgcgggctcgacaggtcttcctctgcttgctatgaagccatcgaaaacatgttctcattctgaaacagaaatctggcacaacttgatgtgttgggggatctggtgggtaaattttatggtaaatagtttgtgattttcgctaggcaacacaaccacatggcggttttcctttcgagtcattgctgatgatacgtcagccacgcccagtgtcctctttcattagttttttaagaagaaacgtagttttgtttcggttagcacaaatagtacaacagttacattatagccctacagtttgattgctcgatttggtcaaagctattcttatagtagtattagctctacagtttgattgcttcatttggtcaaagctattcttatagttcggaatgctggccctctcattggcactgattctcattacttaacttccatctgatcgcaataggtggctctctttttctatttgatcgcaaagtactgaggtacttcagaaaggatggacacaactggagaaagaaaaaagatggcaagactgtcaaagaagctcatgagaaactgaaagtga

SEQ ID NO: 200815 - DNA, 393 bp, Zea Mays
gaaaaaaaacctgaccatcagaggggaacctggtacactacaaatgtaggatcttaataccatagatgtggtgcttctacctctcaaatggaaatgcatgtgtgttagtggatttgaacatatatgcactgaatagtttagatatggccagtaggcacatcataaaacatgttgatcttgcttgcctagtagaagagcaaggaaagacacttcacaataacaatgtatactacctccatttttatttatttgacgccactttattcaaatttgtactaaccggcaacaaataacaattaatggtgggactacctagataagcaattatatcatgtttaatgatagacccagcaattgcatttgacattactcttacccataacctgtacaaat

SEQ ID NO: 200816 - DNA, 299 bp, Zea Mays
tattcgtggcagtgggacaggacgcctgatcgtaggcgtctacgttgatgacctgatcatcaccggaggagatgcaggtgctgtgaacaaattcaaggggcagatgatgaactccttccgcatgagtgaccttgggttactctcctactacctcggcctggaagtgtcacaaggaccagctggcatcacactccgacagactgcatacgccgccaagattcttgagaaggcgggcatgactggatgcaatcccagtgccacgcctatggagctcaaactgaagctgctcaaagagggag

SEQ ID NO: 200817 - DNA, 380 bp, Zea Mays
gttttgtgattcgtgtcttgagtccaagggagctaagaataatatcaggtaacctttgtaacagatgtgcccattccattttttatcacattgaaatattttcctggggttctagaccattggttgcttggctgcttttattttagttcatccaaagttgggcgaagtcaaacttcatctgccaaggtatataagagtgcatcaccaggagcaaagtcttcaagtgtaggaaggcttacaagaaagtaggtattatcgttaatgataagcatccttttccttgaatttctcacctctcatttatcccttttttgttgtttttatgaaaaagggataagggtatgcataaggtcgttttcatgagtggcattttaccagag

SEQ ID NO: 200818 - DNA, 323 bp, Zea Mays
cgcatatgtggcaccctaccccgagtccagccgcagacctcaccggcggccaccgagtcaatcgttttccatcgcggtgtcctctgcaccgtggttctacctcactgtacttctcctctacgtggtatacatgtgctagcaaggttatccgcggccgctgatcgcttgtcggtccgccgtggctttaaatagcggcatgaaccacggcgaggcactcaccgcctcaaccgcaagcttgagaagaacccaaaattcgcactgccttctccacctcctcccaaattgatggtgcacggtgaaactacggtctcttacggccgtat

SEQ ID NO: 200819 - DNA, 356 bp, Zea Mays
cggaaatgtcagatgttgcaagaaagttgttttcagaatctcaaattaagcgctgcagaaactacttgaaaatgcctgcactgattattgatgagaaagagaaggaacacctgaggtttctgaccaagaatggactggttgtggatcctgttttagttgagaaggaacggatcatgataaatccgtggactcaagacgaaaaggaaatttttatggagatgcttgctaaatttggcaaggatttctccaaaatttccagtttcatcacacataaaactactgcagactgtgtggagttctactacaagcatcataaatcagacagcttccgagaagtgaagaaactgttggacctt

SEQ ID NO: 200820 - DNA, 778 bp, Zea Mays
tcaaagctttagttgctaaatctaaagctgacatattgcatgaacacttgactggagttgttgagggcctgctgagctggcaaagtgatacaaagaattcctttaaagctaaggtatctgttgttttttattttgcagtatttttttgtatggttaaaattatttaattattgtcattttactagtctaaagacatgtgtggatgtgataatatttgttttgttgctatagttctgtattaggatagatacaaaaactttagtatgcattgttatccttttcttggtctaactccacatcctattgttaggtcaagtcactcatagaaattcttgtgaagaaatgtggtttagacgctgtgaaggctgtgatgcctgaggagcatatgaaattgctcacgaatattaggaaggtaacatccattgttttatgccactcttcaaaaggaacatattttctctccaatcttaaccttttatgattgagtgcatgtgtgatgtttgccagattaatgagcgaaaaatgcgaaaggcaaaatcttctgaggatggggatgccatgtctatggcctcaggagctacaaggtatcctttattcggtggaaggaagtgtatggtcttgtagttggtgtcttgatgatacacacctgaaaaaaacagaatccattggtagttctagccttctaggtttggggaaattaatgtttgttcctaattctaactgtccgttccatgtttcctacaggcaaagtaggtggaatcacacacaaatgttttcg

SEQ ID NO: 200821 - DNA, 371 bp, Zea Mays
ctactttccccactagctatgtaacgccggctattcttccaaatcagagggatttcgtcctcttcttcatcatcctcatcaacaacatggacaacacacccattggggtcagcgtcagacgggtcacacccattgggatcagcttcagtaaattcaggcactggcacttcctcagcaacaggagcagaaggaccgacaccctaatccaagctagacacccgatgaagacgtctcttcttctttttctccccctcagcaggaaaagaggcttgatcggctcggcgagaacgttttggatgaacattgacagacttctgagcgtccaaagctttgtcagcctcagggatgggcgccaccaccaatgtttcagc

SEQ ID NO: 200822 - DNA, 309 bp, Zea Mays
gcatagaactaataaaagaaatgtacgtgagcgtttttccttatatacaggttatattaggcgatggaacagggatcacgacaaaggtccgagctttggctgcaaaaccaaacagatatggagtgacatatagtggttacattattaatggtttgaggttccacactttgagtcgtgaggctgcacggttgacacaaaacagtggtgtggtcaacattgctgatgatggggttaattattttggtagattattagatatagttgaattgtcatatgcaaactacaaggtagtgcttttcaagtgtgaat

SEQ ID NO: 200823 - DNA, 760 bp, Zea Mays
gagtaatgtcattgacgcaatgctttttgtgtttgggaagcgtgcaaagcaggttggtattgttgcttaatgttgattttttagtgattatcactatattcatttagttcatttcaccgggagattttatgttatttgttctatgtcaacaaatcattcgatttgtttatagcctatccaatggtagattctagcatgtcactctaagttccacaataatttaaaagcctgagagtaatatcctgccatttaagtttgtaaacatataaattatcatcctaagtattatgtgaaaggattattctagaacctagcacattgatgcttcaattgtattaatcctcttggtttagataataatcgtattaatcctatggttgccaagtagtctgtgttttgaagttgatactttagagttcctgtctgctaaatgtactgtgcatactagtttctcgttactgttacctgttttccctttgaactttacatggacaatgcaattttcacaaattcattcgtacaagtgatcagattcattttttccttaccaatatctctgcttttaaagaaagtaaaaataacgtttgagatacaaaccccactggattaccatttcacaaggaacatatacggaaataaaattgatccaatacattgttagtcgctatcattacttaggataattttgtatttctcttgttcttccatcaactgcagatgcgcctaaacaaggtctccgagctcatacacaattcttcca

SEQ ID NO: 200824 - DNA, 456 bp, Zea Mays
accacgattcttcaatatcgatgaggcgaggtgacatgtttctccttgtgaattgatctaactgtttctgtcattgtttgctaatcttgtgtaaacagggagatgcatattcgtgtggaacggaggcgagataaagaatctggggagtactttgagtgggttgataatttgaagttcaaagatggtttcttgtacaaatctgtctccactaaatcgatccacacaaacaatattcaaccgaattttgacgaacttgagaagtttaagaagcctggtgatgacatgaatggcgacatggctagcttgtccactctgtttgcaaacaggaaaaaaggacactttatgaagggtgatgccgtcattgttattaaaggcgatttgaaaaatctggagggttgggttgagaaagtagaggatgaaaccgttcacatcaggccaaaaatatctgatctcccg

SEQ ID NO: 200825 - DNA, 286 bp, Zea Mays
caatgcccaagaaataatgaagcttaccaaggtctttaagagcaaagtcatgcttgagatccgtaagcagagcatcaatggcctgcggtgaggagcttgtaacaataatgtcatccacatacacaagaacataaatagtgatcgagccacgatgaaatatgaaaagtgatatgtcggctggagatggaataaatcccaaagcttgtagcttcatgctgagtcgtgaataccaggcacgaggtgcctgtttaagtccatagagggctttgtctaacttgcaatgata

SEQ ID NO: 200826 - DNA, 949 bp, Zea Mays
agaactcggaaggcggcactcagatctgcagaaggagaaggacttggtgcttgatgaagtgatcaagatacaggaacagataaggcttgagaggaaggagcatgaagattgtacacagtcaagcaacattagatttgatgctctacagaagaagattagtctattgctagaagagggcaggagtagagaggtgcagcttggtgaggaggagctcaagattgtcaaagctgagatagagatatttgtcttgcagcagtgtttgaatgacatgacagaagtaaattctgaaatcgcagaacaactgcgaaagaataaagaaatatgcaaggtccaggagggaaaaatctacagcttatcacagcataatcagaaactaactgaagggattgattcagtagtgagagtattgcatctggatcataagtatgaatccttaggccaaatgaagcttgaaatcattgtgcagctcatcttaaatgagatcagctgcctgctgaataacatatctgatgcccaggatgtgaagcagaaggagcttgttgagaaatcacttgtagttacacttctggagcatttcgggcaagaggtggctgacttgaggtcagagcggaatgtcttgaggcaagatcagcagataaagattgaggaactgctccagctgcagagagaaaaggaggaacttatgaagataagtgatgaattcttggaagaggtggaggctcgtaatcacaaagtggatgagctaaaggctgaggcgaagttcttggttgtaaggttctccgaactgcaagagtctaggaggtcattgcaaagcgagatcaccaagctattacaatcgaactcttttctatcaaatgaactaaatgattccattgaaaaacagaagaggtttgaacatgatttcagcaatcttgttagtgaagcagttagtaaagatatcctcagtgtg

SEQ ID NO: 200827 - DNA, 451 bp, Zea Mays
ggaatttagctgggcacatgtggtactcggctggcctgggttcatgaagttagtttctgtggtgcctggatcgattcttaagcccctagaataccaatccgtactgggaaaaacctcgatgattagatctaatctgctgaggtgtaggtaaacataccttcattattgttgttcatggcggcagcgatggtggcgatgtctggaacagtagacccgcctcctcctacttcgccacctcctgcgtgttctggtgaggttggggttcgtcgtcgctggtcggcggtggatctcctcctccagcggcacctgcaggcggagggtcggatcccgtgcccgttggggtgagcatggatcccgatgccatagatcgcagctcttctagtcactacacacgcctagatgttgggacctgtgtggatgtagattagggtttgtggtcgagtgattagca

SEQ ID NO: 200828 - DNA, 297 bp, Zea Mays
acctatgttatgacaatccaagctagcatgaggatgttgtgattgtgagctgttttgtcaaattaatttgtatttggtcactgtttatttggtgcaacctatttgttacaaaatggtatggatatagttaatatatgaggcaagagacaaatattatggttgtcaattttggttatgacgttacatatgcgaaatataattctttttgtgtaatattttatacccaatagaaatatgaaatgcatttttatataaattatgggttgaatatatgtaattgcaacagttttattcgtt

SEQ ID NO: 200829 - DNA, 288 bp, Zea Mays
ccacctttggttatactatgtttcttagggccaatttcatcttttgggccttcaagcattgacatgtaatttcccgcttcaatgttaaggagtacccaactgttgctaatggggtgactgaggcgacctagttatgccaacttttccataagttccacaaccccctcacttagaccacgcttgtctactacgacaacgtcgtctacctcttcaagtaccagcagacaaacacatattgagatcaatctttacttcatctgtgaacacgttgctgtcagggacattcat

SEQ ID NO: 200830 - DNA, 336 bp, Zea Mays
caggggatggcccctcatgaactctacccgcttgtctctgggcacttgtggcatctgaacttgcactagaggctgaggtgggggtggctgctgctgcacctgctgcattgctgctaaggtctgaccaattgcctgaactgcctaagtttgcatcatgaacatctgctcgactgtcatcgggggtggcggtggcaactgctgctgctaggctacatcttcctagggtgcctgttgttccggctgagcaagcctcgcaactctacgcctgttctcagacatctgtagaaaccagacacacatcagatcttactctgtagtctttcagcataagaaaag

SEQ ID NO: 200831 - DNA, 276 bp, Zea Mays
ctagggtgtctggtggcgtgtggtggcggtgattggatttcaggcggcgtgtggtggcagtagacttggggtatctcagctgttcgacacaaggcatcactggttttcttcaatccggttcgtcgcgcagcgtagtgtgggctctctgtttcactcagtccaagttgctgctacggtcattagcagcccggaaggcgtgttggtgttgaagaaggtcaagacagtcccagcaatcaagccatttgtgcagtctcggctggtgttggttgccatggc

SEQ ID NO: 200832 - DNA, 366 bp, Zea Mays
gtgcgttcgcgggtggatgtacaactccgccgacgacgctgtcctcgacctcgccatggagcccgatcaagacgcccacgcactgtacgtctccatcgaggccctgttccaggcgaacaaggagtctcgcgccgtcgtcctcgagcaggagttccacaacctgtcccaagccgacctctccatcgacgcctacgctcagcagatgaagcgcaccgctgatgcgctccgggaagtcggccacactgtctcccccgcgcagctcgttctcaatctcctgcgcggtctcaatcctcgcttcgccaacacggccgacatcatcgccaacacgtcaccgctgctcgacttcaagtctgccaccaacatgat

SEQ ID NO: 200833 - DNA, 507 bp, Zea Mays
gagagcatgtggaaagcctagggatgttagaacaagcaatggtgcagcttgaactaacctgggttgagctggccgcggtgagcttgattcggcggtgcttcagaacagaattgggggaaactagaaattggagcgtgctggtggaggattgagggtggaagtggttgctacagcttcacaatttcatggcgtaactgtccccgcccttaatttataggcttccagggcggtggctctcaatttgaccgcgatgcggtggcggccggagacggggaagaagcctggcacgcgcagttacgtggccaacgacgtggcaagctccccggcgatgatgggatggcccaagggattcacggcgacacggtagaaagctaggccacgcggcgcgatgccgggaagcggcggttcaccggcgagcttatcgtgccagccgcaaagcggagagaaaagggggggggggtcgtcggagtggtggccagctcacggcggtgaagatttttactgggg

SEQ ID NO: 200834 - DNA, 427 bp, Zea Mays
agcaaatcaagttgcacccagtttcaagaacagtgatagggtcattgatgaaacggaagctgcggaacttgggccactcaaggaaccaagggaagatgacaatttgtttacttgtgtaaactcaaactcagcttcaattacaagtgacattgctcaaccaagagttgtcttgtgtttagctcacaacggcaaagtcgcttgggacatcaaatggaagcctcctttactaagtcaacctgaacagaaatcacgacttggttttcttgcagtattgttggggaatggcgctcttgaagtgtaagttgtgcaacccattgctatgctagaacctttatttaggaaatcatcagtcacatacttcattgtttgtacacaggtgggaagttccatcaccatgtatgatccagaaaatatattccccctctaa

SEQ ID NO: 200835 - DNA, 412 bp, Zea Mays
attcatcttatcttgaaaagatgtaatcttatcctaatagatctaattcacctcatatcttaaccgatctaatctagatcccatctaatctaatgtgatccaatcaaaagtaagttaataacaggttagttaatctggtgatatgggttagactttgcttcaacaaacataacctaacctaaattaatatcttataccaactcatccataaacaacaatataacctacatcacacgctgcctagtccatttgttccaaaagcaaaatacaactctgttcaaacctacctacctcgtataccccggctatcctaactatatgtccttaactcggatggcaactccaagaagaaaggccaaagaagaccaaccacatcaaagaggataaacatcaactcaagtcttcaaagatc

SEQ ID NO: 200836 - DNA, 273 bp, Zea Mays
atagccacggtccaaccaaacataccctatagatgtcccagtggatcgtgttgaatggggccgcactagccttgatacatctcatagtgttttggcacgacatgacccgatgcatatagtgctcgtgccagcaaggcacgtcgccctagcacggtgggctgacacaagcacggcacgactaagtggttggcacagggcagacatggcttagatcaactgttgaatagtggacatgattgtgatttgtgcttatggttgtgaattgtgatttgt

SEQ ID NO: 200837 - DNA, 362 bp, Zea Mays
tgggaagttgcagacagctctcaagtacacaacttagagggttggtcaaacaggacgctgtggcacagctgctggaaatccgagtggcaacccagactgacaattcaggaatacccccggtgattgaacaactggtggactgttatcaggacctgttccagaaaccaaaggcattgccacctaaaaggtccatcgatcactctatccctctaataccgggtgcacttccatttcggttgaggccctatcggtataccccacaacaaaagactgaaatcgagaaacaggtgaaggagatgttagagaacggaatcattcagcccagttcaagcccgtttgcctcccctgtcctcctggtcaag

SEQ ID NO: 200838 - DNA, 394 bp, Zea Mays
atttcaacctcgccggcgaacggagcagaagcgatattgcaggaaagcagagaaagcctggatgcaaaaagctaagcaaaaactagggcacggagcgtggaggcgcgcgacagtgcagtacatatggggttttcccgggccagatgtcatttccaaaaagtgcccagtcatcacccagcggttatttctaaaacgctggcgtgccatgtcatcactcagccgttatttctaaaaaaagctggcgtgtcatgtcatcactcggccgttatttccaaaacggacgacgcggctcaaattgactcagctgttgtttctaaaaacgctgacattatctgacctcactcggccattactttcaaagtagccgacgcagtctgttatcactcggctgtta

SEQ ID NO: 200839 - DNA, 363 bp, Zea Mays
cgctggtgcgcagagagaggcgcaacggaagccgtcgcgcgggaaacagagtgaaaggtgtgaggggaaggccacaacgtctccctgtttagagtaaggggggtggttcgcgacatcatggagacgaagatgcagatcaccggcggtgatgaaggagcatcgtcacgctggtcggccagcctatgcctcaatcatcggtaagagcacgttcctttagctaagcgcagtttctgctcacgtcggtggtaactcaatctcttgatgtaagactacttaagtcacttagacaaaagcattagtctcacgattctagtcataaagagaactttccttttataagtgtcctaaggatttgaattcctt

SEQ ID NO: 200840 - DNA, 314 bp, Zea Mays
cgggccggggtgatggatgaactcaacaaatggcggcatttgcatccggtaagactgctaagaactagcacgagacctgaaaactagcttgagtgcttcgatctaatccttggttcttgcaatggcggccctttcaggaccctgaggacgagctagcatacatgtacaggcagcaagaagaagatcatgccgggatgcaacagcaacatcaccatttcgctgagcggctgcccgagcagcagcagtactacacaccaccaccaccagcagcagcgccgcctacgtcctctagccccttccttcctcgtcttcac

SEQ ID NO: 200841 - DNA, 359 bp, Zea Mays
aggatatggcaaattccttcaattctacttagtcctcttcggaaatttgttggtcgcccaggtgtcgaaggtcgaaattcatatcttccaaagaggtctcttcaattctcttcaccttatcaaaaggcactgcgactacatctttctcatcaaccacatccgaaataagtctgtcgatttctgacagtttggttgcaagatactcggcttcggcaacggcgatatcttcagcatttacgggtatagtagctttatccgccaaaggtagggacagggtctgttcaatagcttccattacattcatcatatgccgcttctttggccccccgtttttcccctcggtagccgaagcgatttcc

SEQ ID NO: 200842 - DNA, 496 bp, Zea Mays
gttgatattttgcgttctaataaggtttggttcccactgctctcttagaaaacccgtaaccccatgtccgcatgtgcatagatcagtccacaaaattagcactaggtcattgtaggaagtagccgtactagcgtggcagtgctcacttaagtttaggatgtaagctgtataagttgagctactctaccaaccagttgctcctgtgatcattataattcatggtattgccacaagtatttttagccttttccctgtaaatgcattgcgaaacagctgatgatgtattcttgcaggaactctttcaaggtaaagctaaaggtttcaatgttcaaaaggctttatcagccagttgtttgcgtgacttcgatgttgctatatccatggtttcacatgggttcgatactcttcatgacttctatgctgaaattagtacaaggctgtcagttgcccatgttagaatacctctactttttatacaggtatatctttcaacaat

SEQ ID NO: 200843 - DNA, 322 bp, Zea Mays
gtgttatggagcatgaactgtttccgtttcttcctcccccatgattctcttcggtaaccaacaccattgatggcacttgaagccccgccgtccgcctctccctctctctagcgtctctatctcgctcccatcgcccctataaatccgacgccaagctctctcttcctcccctacccaagctcgcccctctctctagctcttctcgcttgccatcgtcgctggagccctgcattaccggagcttcgcccgcccaagcacaccatcgtcagccgtctacgctcgtcggagctcttgccccatcgcagaccatcccctactcgtc

SEQ ID NO: 200844 - DNA, 371 bp, Zea Mays
gtgaatttaggctccacccatgttgattgagtaatgtacttggtttctgagtttagtgacttattatgcgtatttgacatctttctaatttctgcttcgtttcattgataagctggctgatgttcacattccttttcttttatagacacgattactggagcttcgtacaattcctgaagcattaccctttttcattactccaaaagcagtagatgaaaattcagtgctgttacagcaactaccacactgggctccatgttctgttacacaggcattggagtttcttactcctccttataaaggacatccacgtgttatggcctatgtccttcgtgtcttggagacttacccccctgagactgttacctttt

SEQ ID NO: 200845 - DNA, 493 bp, Zea Mays
caccgttcagctagtgtgcgcgctgtggcggttcgccttcttctcttgtaggactatataaacagacaggttggtgacaagttaccacaacattcattgccattgcattgttgtgctgttgaaaattttaaccgaagtcaaagctctctgcattgtgctttcaacaagcgcttcatcacttaagattagcttcgtctgaaggaaactgaaaactgaaatggccagagtaaggtctactgccatggtgtcctgtgagggagacgaaactaaaatgactgaaacagcgcccatatcaaaaatgatgaggcgctcaggtctagttgtgcaagagggacctactaccaaagatacccctaatgtcgaagctgaacagactgaggctgaggtcgggagtgacaatgagagtgaagaggacaacaatattctgagcccaaccaaacctagtcacattgaatttggaagatccaccgtaacagtagaggacttggttgtg

SEQ ID NO: 200846 - DNA, 338 bp, Zea Mays
ttgagctccctgagttctgctgattgttggatttattctgcctcggatatgggcagtctttgataaaatgaccagacttcccacagttgaagcagccagttgaggaattagggaagcgggaaaacaagcaccaggggcactcggctgatttgtagaagtgggggcagtatcagggtgaatgaaaacaggctgtttaaacggataggagggtggacgaggcgaagaacgattctgattgaaaggtcggattaccaaccttgttcgcttctcaggtccctgattggacctgtcaactccaaatccttggattttccttggcctgtagtcttggcttccac

SEQ ID NO: 200847 - DNA, 276 bp, Zea Mays
caaagcggtgcagggtgaagccacgttccttgggttctttgagactttgataggtcaaaatagtgatcagtgtgtgctaaaagttgatgaagttaaagagtctttatgtgatttgatgaagtactatgaaatggaagagggtgaagatacaacagagtcatcaactcctctacttgacactagtttgttgtcaacaattagtgcacgtgttgctagtcgaaggccagcgatgacaagagttaaaactgagctagatagatacttggaggatgattt

SEQ ID NO: 200848 - DNA, 3319 bp, Zea Mays
gccaaatagcgcttgctctactgctcatcatgaagaggtaataatcaaatgaggcttccatgattttcatgcagcatatgcgtttttcatgttttatttagtgtgatataagtaaccatgtgcttgcagttaatgtttcttttatcctcctccaggccagcaagtcggtggaagatggtaattctattgggattcaaggtgcatgcacttcaaggaatactgaagctatccaatgtgatgaaacatggtatgatgacaacatttgtgttgtttgcagaagtagggaaatctcagatatcctgaagtaagttactctgcagtctaattaagttatctctttttgatgggaacatatcttgtgctcaaaggggtactgtgctcatgtgcacattttaaatttgggactttcatcttgaatctaacagcagcaccacttttatgaaaatcccctcccaccatgggagcgaggtgaaagggtttctttataaaattgctgctgctgtgagatgcaagatgaatgtcccaaatttaaaatgtgcatgtgagcacagcaactctttgagcaccggatacgtcgccctttttgatccatgttattttcttaataccgaaatcacacaaatatgaacctatagaatcgaaagatggaacatgatcatgctaaaactaagcagcttctgtgatagaccccccttctaccagttgacttgatcacagttgcaatcttgtttattctttacgcaggcaaatggtactccgcattgtttcagttatctgtgtttcactagcactatctggttattttactcccatcattggctgacattataagcgataaaacatgctctagtcactatgcccgtccatcatatttatctgttcattccagatgtcatgcctttcataatatactgttgaaaatactgtgcatataaaatcagaagtgttaaaagttcgtgttagaatacaagtgagttgcccacctctctctatcagctaaagcttttgagttgaaatggttggtgtatgcaactcaatgtggtatcaaagccagaggtctcaaatttatatcctgattagcgcaattaaataaaaataatcgttattagttcatattccacatttgaggtatgagaggcttgatgtgagggggagtgttagaatacaagtgaattgcccacttctctttactagtttaagcttttaggttgaaatggttggtgcatgcaattcaatagtttgattaccagatttaaaactatatatgaataagtgttatttgtcttcaaagtatgactttgacaacaaaacttttgttgtatatttttggacatgatgcaatttgtgttatggatgtgtttttttttttgaatcacatttgttcattttcatgtgatagattcaaaatgataaagacgcctttagtcaaacttaaaatggtttgatgccttgatggatcttgcagtggtacttatttgtaactgtatggagtgaagttgtaggttattactgtcctgaattctgggagactacgtagctaggtttagagatattgtaggctaaagtttgagtttgataattataatattcagatttatgatgatagaatgtaggaaaaagtaaatgtaggcgaacctaacaaatccagaaacaagtggtacaaaagaatgcagtaaagctttcctaaaattgcctacttcttgctacaacaattttagaataaatacattctcaaacgagtgatatgattcatgggtgaacagtgaactctgtttcaaggttattgaacagtttttaggtgactgaaagattcgatatcaggtgaaagataaacatgtgtttttttatctcccatttcggttgtgcttctagaatttaacaccttatagtctttgtggttgatgcatctttcaaacatgttttgtggaacagttcatctctaataccatgctgtaaatgtgaaaattgtgttccatggttcatacttgatttgcagggatcttaataaaactaaaccccttaatataatgatacacagaaaaaaataatatgaagctctcccctgtcttcgaaaagaaaaaaaaactaaccccattttttaatttggtaataggtcttgtggtggaaaaggatgtaaacgacattaccatctttcgtgtatggatccttccttggacgtgtccctaggaatatggctttgcataatgtgtatgaaaaagaggattcagtttggtgtatattcagtcagcgagggaattgaatctttatgggatgtcaaggaaggtaattatatcttataaagcgtatgccagtttttctttgattgttatcattcatttattaattctatcgcctctccattttaggagtggtgaacagcaagcaatatttcgttaagtataaaaatcttgctcatgtacataaccagtgggtttcagaaagtgatatagttgatagcaccccgcaaggttctgatcttatctccaaagttagcaagaagattcataaagaaaaggtgattactcgtgtgatgaattccattgcttatctttttcacaggattttaggctctgcaaaagtatgcatgctgatggattcttttctgattttgatttcttagacaataaggtggaagcaggaatgggctgaaccacaccgtctgttgaagagaagattgcttatgcctcaaaaagaagccgaagttttttttaattcactaggtgataaatttgtatactgtaatgtcgagtggctagtgaaatggaaggatctgggctatgaacatgctacatgggaactcgagtcctcatcctttttatgtactcctgaggccgaggagcttaaaaggagctatgaggaccgctttaaaactgcaagaaaagcatctgatccttcaaaagtagacaaggtatgctatagaaaacatttatttgtattaactggcacactgcaacttcatttgagaagaaagtgattataatctgtgcattttcatcatctagggtatatgctcatccctttgctagtccacaacaatcaacaagctctattagttccaagcaagtttgtatttttctgcaattgtctgtcagtctgtcacattgctttgctaagctgccacacaaataatgagctctattagttccaaacagtccttagattgcttaaagagttcacatttcacaattttcagtgatgctaaactatctatgtgctatacaggctaagggggggatatttcagcaactcgagagactgccagatggttgccctcctggtttagacgatgaccatttgagatcacttaaccagcttcgtg

SEQ ID NO: 200849 - DNA, 451 bp, Zea Mays
gcacgccaaaccatatcgccaacagaagaaaaaaccctaaacactaaagtatcctagtttagcaaaacaggtaccattcgcatttagcaagccgagctcggatagactcgaagctcgagcaaccgaagtaaaccctaaagtcggtcgggggcaggtaatccgcggatggtccggtggaagagattacctcctctttagatccggtgccgtagaaggcagcgacagtagcatcgaggagcgtcacgtctaccggctggcttagatccctgagcttctccgccatggcggcagcggttggagtgagcaggtgaaggaagcttgtggaggcaggggatcgtggggagcagggaaggcaccggaggcgcgagaaggcgcagccctagaagcagcgagcgcggcgacgctagcggcggcggcggcgggccggattcttaccggaagagggagtcgg

SEQ ID NO: 200850 - DNA, 306 bp, Zea Mays
attccctttcacccctttatcgcgtgccgttagatcgtaatctgatggtcgagagttgatatcggttcggtgggcgaaacttctaatcgagaccgctggatcggtagttgatggataggattagatcgtgcgtacaccttcgtcacattaaaatccgaccgcacgttctgatctgggtggttcatactgaacaataccccttcggacaactcttttgcgtatgagcccctgaagaatcaagtatttaacccgaagttcactgtgggagtacactgagtcctagaaatcttgcgctaagacccctga

SEQ ID NO: 200851 - DNA, 376 bp, Zea Mays
ctggccacctgccatggccccagtcgccttcgcaaaagtccccaatcccgccggcggcctctgcaagcctagccgcagacctcttcgtcagtgtgccaaaatctcctgaactacctacccacctcaaaccctaaccccaagccatcgcagaagagggtgacgaagtaaaacaagcagctgcctcccgatgcaattaccttccgcccaacgcccgcatcggcaccgcctcaccaacggccgcctccccaatccgcgcgaactgcgccgggcgccggcctcctcgccgcggcgcctcgtgccggtaccgcctgccgtcgacgcgtccaggtagccctcccagctcaacggtgtctaactctaatctctcccacgtcca

SEQ ID NO: 200852 - DNA, 750 bp, Zea Mays
cttgttgatgtgctttctgtaattattgaaaaccgtgaagctacagtgagtaatataccactcccgccattcagttctctatcttttgatgtcattatactacatatataattatcttatattacctacccctttttgtttgcatgtgttgtatgtgtgtcaaaatgtccaagtgctcagctgataatttttccttcagataaactacaaatcatatatgaagctaggaataacaactgcttagcatgtgcaaatgatcattaggaatctgatgcaccattgcagaatcaccggaattattttgttaaccgttaaagatagcaaaacaataatctcatattctcattgtgtggtttgttagctccctagatgagtgtcacctgtcaagacaacaagtccaaatggaatatgattaatgcttgagctgagctcgtccagttgtgttacttaaaataaacgaattagtcaattagacattgtcactgttaagttcttttttcttctcagtctgtagatttctcataatcttaatcttaacttcactcctgtgttctttttcttgcatatgaaagctccaagaactactggaacgcatgcctggtcctgacttccctacaggagggacaatcctgggaaatcaagggtatttattctcttttttctttggtcttgtctttctttttgactttgcgctaacttgtgtacccatccctcctcttaattagtattttggaagcatataaatctgga

SEQ ID NO: 200853 - DNA, 296 bp, Zea Mays
ggcggatcggcgccgccaaggcctgtgttttaattgtaacgagaaatattctcgtggccacaaccgtttttgcaggcgcattttcttcttggatggcgtcgaaattgaggaggccgaggcggaaacgggtgccgcggagaccgacgctccctgtttctccctccaggccgtggccggggtcgcgccaggggacaccatgcagatcgccgtcaccctcggttcggtctccctggtggcactgctcgactcgggaagcacccacaattttatatccgcagcggcggcgcaccagtcgg

SEQ ID NO: 200854 - DNA, 382 bp, Zea Mays
tggatattgtgttggcacagcatctggcatgctcaagctcattggagtgctggcggcgtggaccaaacattttgtcgaacacccgaggggcgagctgctgtttctgtccgccttcggcttgatgatggtgaaggagcagccgagcttgcggtagttgggggcagagaagaaggtgacaagctgacagtcgacagagaactcgtattcgtcctccatcacctggtgcgctctgcaaacgatgtccaggtcctgcgcgcggcggcagtccgtcgcgacgtcggcgccgaaggtgcaggacacgtatcgatccttgttgtccgcccactctctgtcctccatggaagaagggtcggaccagagcaggtcacagaggagaccccgg

SEQ ID NO: 200855 - DNA, 278 bp, Zea Mays
ccgacaatgtgttgccgtcggtaaccgctgatgtcggcctccagcttcggggaatccaacactcttagacagagtgctgattatcttcgccccggcgcggtcgcaaatacatcctaaaatttcttcatcaaccccaccgaagagcaaagaccctggctagtaacacaagatattgcaaactctttcagttcgacatgtcttcctcggacagttcctgatcgcccaagtgtcgaagatcaaaatccctttcgttcgaaggagtattatcaatttatttt

SEQ ID NO: 200856 - DNA, 365 bp, Zea Mays
gtgccagacagttctacaagttcctatgaagtgcaaacttctagattgttaagtcctattttccaggggcaagggcatttagatgcttccttaacttacctaacgggggcatctggaccaacaaaggtacatccaactcatgtgtgcatttttttggtgcattgtttagcagagactattaggatgacattgtcattacggtttgctgatcacctgattgatgcatgcaatattaggtgctcaagcttgtgcaagaagttaatgtttgtagtaaggtgaaggcattctgggatgaaggattggagaactccaacgttatttacctgccctgggttcctggagttcaccaggaagttgaaatgatg

SEQ ID NO: 200857 - DNA, 377 bp, Zea Mays
tcaaaagttatagggtcagtctggttgggaacatgggtggacaccggtggacatggaatgggtggtaccaattgtggttgaccgaaagatgtttgtgtaggaggacccccaggatttgtcataccaaaatatgggttccatggagtacgaaaggtacatgcagatgggtcattaggtccctgggaccaggtaggattgatcatatgggaaaatgaaggattactaaatgttgaaccctgtgttgggtcgaacccttgggcctgccacatctgaggatcccacatgggtggggggaaaatttggttacctgtatttgggctagcagcaggtggtcgaaaaggtgtgtttgtgttgttgtctgccattctggaatgaaa

SEQ ID NO: 200858 - DNA, 323 bp, Zea Mays
aagacaagtaaaaaaataatgtgttctttgatctctctcggcccgttggtctttcttctcttttgtccacatccacaccaaatataacctgtcccgttctacgtccacctgaacatgatgtgagttcgtggtcatcttcaatgcgcgcaaggtgagcttgaacatgttgtgagttcgtgatcatattcattgcacgcaaggggccataaagctcacggtcacagcctcgacagacatcacggccgccacggcgagctcagggacatcagatataggtcggcagagacgtaaggtattggccgccgggtacatgtcgcggcttg

SEQ ID NO: 200859 - DNA, 954 bp, Zea Mays
caaagtttccaccatagaagagtctgaaaggctagaaaggtgcttaaaatcgttgactgatattattgggactgttacattctcacaggataactactgtggtaatattgatgttggtaattctgctgatgtgcaaaacgacaaacccgatgcaagtctttgctcagggtcattagaacaaaacatgcagattatatctccagagagaaacagtgaatatcctgtgtcttcatctgtacaccaaagaacactatctcagttatctgataaaggtgaaaaggtagttcccgctcctcagatattaattacattgtccttgttttcttcatatcacatgcagttgttgagttggtctctattgtaaacaaaggcaaaacaatagtatatacagggtcaaaccattttttgctacaatcttatgaaggtcacacataaattatttataagttgaagatttactagttttgttgctgctcctgattcttgttgctcctgttctgggcagccccagaagggatgcacaagggaggagataaagaaactagctttgaaactcaaaaaacaagaagtttggatgctacatgatagtatgatacaacacttgattgccactttgatcctattattctagttggcctgaaatttccactttatggaatgatttctctttcataaacatgttcttttgttatttatcaattgagcttgtctgcttggaattgctcttttgtagcatctggatgctgaggctcttggacttttaagctggctggcctcttcacaagctgcagaggaatcaactgatgatgaattaactaatgaagtcatcctcagccctttgtttgccaataagtccattgaagttgctgtggagtctgctcaattggattttgatagcgcttctcagcaggagtgtcaggatattcttgattcagttgaccccattagggcagt

SEQ ID NO: 200860 - DNA, 317 bp, Zea Mays
aagagaaattagcattggaagaaatgaacggacgacggcgacggagtcgagaggagaaaggcgcttccgctgagtagcaggccgacagaaagagaaagacaccagcgaaggggctccatatatgtagtagaaagcagcgggatgggcgctacggcgaaggacagaagaacagggagtctgcgctgttggaaaagcacaggcgacgagacggatttgtgggattttaaaatccactgaacagccctcacctaacgttatgggcacagcaccggagcacagcgacgggcgacgagctggacagaagatctacaccggcg

SEQ ID NO: 200861 - DNA, 459 bp, Zea Mays
ccaagttggaccgagtctcctacagaccaggaggtggctgaggcaggggctttgctggctgaggttgggctgctgaaggagaggggtttgactgcagaggctgtggttgctgattttgttttcaagaacatccagccgttgaaggatagggcatactcagcctacttgtaccaaggtttagctgactcaacccgggtcaccaatagaagaattcccgctgtagacttggtgaaccggcttgaaatgatacttagaggcaaggtgtccaatgttggtgcccctatcgcatactcggcctagaacctgcctccttccaaggcttttacccattttgtgtcgaatcctcctgttgctgactgcggtttggtccttagagtacgaccctctaccgaagaagttagtgccttggttgcttcgattggagaaattcccgatgatgaatggcaactccactttgag

SEQ ID NO: 200862 - DNA, 534 bp, Zea Mays
aacgcgagcgagcagtgagggcaacaaggctggcggtagcgaaactggcaacaacaagcgcatgagtagaagcatcggcggtagcagacctcgaggctctgcgaggcagtagcactagcagctctgcttctatcgataacaacaccaatgacgagctcagactggcaagggaggcaacacgagagcaggtggcgcagtggccagccacgcgtccccacgagcgtggtggtggcagcccattacaatatcattacaatatacacaacacactaacactctcttcaggagcacacttgtctattgcgacaacatcatcgttgtctatctctctgtccagcaccggcacacgaagcatgttgagatccatctccactttttctaggagcgtgttgtgttgttgttgggtacgtccgcattcatcacgtcccgtcgagctcgcaatttgctggcatcttcactaagggtctccccttcttgttgtacccagtgtttctgtctagtctcaacggttgtcgtggctagagttttgcctgc

SEQ ID NO: 200863 - DNA, 287 bp, Zea Mays
gtgaggtcagggaggcttcggtgatcacgtcgatggtctggtcgtggacagtggtggtcgaagctgctcagccctcgcgcgcaggtggtggtgatcggcggtggctccgaattccgatcaacggcgatggtagagttaaattccactgcctggggagcttcacgggaggtcggtgatgctctggtgcaaggaattgggtggtgttgtattgggtggctatggccacgttcacaggcaggcaggtgaagtccggcgagtggtggcatgttgatggaggggagtagagg

SEQ ID NO: 200864 - DNA, 572 bp, Zea Mays
aattagacataattgactatgttgctgtaatttagttaatttgaatgtttatgtaaattttgcatgccattggtatattaaatagacctatgcaactacatcacccaggatcatgagctcaataatcggatagtcaaagtgcataggggaagtggccattttgaagagacaaaatggaagaatatcaaagttggagatgtaataaaactggagaaggataatttctttcccgctgatatgattctgctttcatctagctatccggatggaatatgttatgtagagaccatgaaccttgatggtgaaacaaatttgaaaattaaacaagctctcgaggtgacattggatttacaggaggacacaaagttcagagaagtcagacaaacaataaaatgtgaagacccaaatgcgaacctctactcctttgtcggttcaatggaatggagaggccagcagtatcccctgtcacccctacagcttcttctccgggactcaaaactacggaacacagactacatatatggggctgtcatcttcacaggtcatgatacaaaagtgatgcaaaatgcaac

SEQ ID NO: 200865 - DNA, 2807 bp, Zea Mays
tcttggtgctgttggatattatatcgttgcaaagtttacacctgtggcacctgatggtgaagtcggtgaaccagcctatgctacatcagatggccttgtggaaagtaagtgcttctctcaagtgtccattctggcagttgtgtttgtaatcttcgtatgtcatggccattcttagtttcagcccactagtccactctctgcccacactcaactatcctgattatttccatgaatctcacctattattggtgccagtaattttgccttggttattatcgaaaaccattggacctgaaataaagagttttatggttcatgttttgcaatctgatttgagtgaaattctttgaagatgttatgggcagtcaggtggaccaactaggcctgttgggctgaaccaaataataagcaattccctttctgcagaagtgatgcatagtccttttgtttttagctgttaaccatcatttagcgaagcacaaacttgtgattttgcaagtccttttgtcgtttatatctttaaacagcattcttacctttcttgttgcagcactaccacccagcctgaacttcttaacagtcactggtgaattctctgagggtcagatattaacagcatcatatgggtatatcggaggacatgaaggaaatagtttatacagctggcaccttcatgaggtatgtattgtattttcttggttgtcaattcctgctgatacttaaaaataatcactgattgtgtatgatgcttctaaagatacataacagttgcagatatactggttgccattgctctgatcaggcatttcttgtttcttagccacttcactggtatatattgtttgacaggctgaagatgacgaaggcactccactttcagaggcaaccggtttgctacaatactgtgttacaaaggaagctgttggaaagtttgtttctttcaaatgcacccctgtcagagatgatgatattgttggtgaggcaagatcattcataggaaaggacagagttactccaggtgcttctgttttcgttttcttgaaaaaattacgacactgaagatattattctgtcacaaaagagacactcctctttgtgtgcttgtatggatgacaaaaaaacatgtttggaaattaagtgatgcatgagcctggattatgtatggaaatatggatatcacacatacttttgcattatggatatcacacataatatgtgacgaactacaaagatgtgaaacagaaaagaagtacaacaattgtagcacactcctgagggcctgtttgggaactcttcctcaaaaccacagttttataatgccacaatttattgtatgccattgacatagccatggtatattttacatcagtccaatctgatacctatttggagacacaatatttcagttgtagtgtagaagagaagactgcaggtgcgtgcaaacaaaaaactttgctctagactaaagtttttttaccccaaaaataccatggtattgataaaaccatgatttaaaatacagagttttacatgtgctcccaaacacctttgtctaaaataccatgctatgctcaaagaccatggcattgtcttgggactaaggaaatactatgttcccaaacaggccctgagttctttgttgtttccttctctttttcgtgtgcgttcaaggaattttcaaggctagttaaaaaacctcatttgccaggaacccataaatagtggtagggcgcctacctgtgtgggcaagtgtggttctacctgggggctgggggtagtgacagcttgccaaaccacgtggctgtgtctgcttgcctaggttatggtgcgtcactataaagtttgcactgtcagggtctgttgaagattgaggtttcttcttgtaaacaacaccatgggggttccttggggtttgttgaagattgaggtttcttgtaaacaacaccgtggggcggtctttctcctgctggctgagttttacatatgaattcatagtgtttccttggttgcagttatgatgtgttctagacacctatgattgtaatattttcatacataacacttaattttcgaatctgttgcactgctgtcagggatgccgacattactttctcttgaagtaactggtgatgcaattgaaggaacaactatgtttgccagtaaaaggtattggggaggagaagaaggggacacaatgttccgctggatactggtaggctgttgttattaagtactacttttcctttgtgcgtgcctgtgtggtgacgactaggaagcactaataaccagactataccttgatcacttaggcaattatgtccttcatttaagttcttgtggttgactgttcataggcaattacattatccatataaattcttgctgggtttcaactcttaggttactttggactgaaagatttgttgctgtagacaaattctgatggaaccgagaaagaaattgaaggagcaacaagttcatcatacaccttgaaatgcaatgacattggcttctacatatctgtcttgtgcaagcctgttagaaatgatggagttgatggttctttagtgtcgactgaagcgattggtcctattataccaggtagatagtctgacaactgttatttctatggaaaacaaccatattcgtgtgtgggcatttatttcaacttgatgattacactgggtaaacaaaccaacgtctttctgtaatttacttattacagggccaccaacatgtcaatctcttgaactagctggctctatggttgaaggtggccgtttgacctttcatgctgtgtatacagg

SEQ ID NO: 200866 - DNA, 342 bp, Zea Mays
atgggtgctacagcttcacgacgacatggcgcagctacgggcgaggtcaatttatagtgctagcgggcggtggccgtgaattttgaggaggacgcgcggcggccggaggtggaagagattactggtgcacgcgagttcgtggccaacggcgtggcaacctccccggcgatgatgggatggcccaagggagtcacggcgacgcggtagaaaagctaggccacgcggcggaggaccgagacacgatgattcaccggcgagcttatctgctccagccgtagggtagagggggaggcacgggaggccgtcagagtggcgtccagctcaccggcggtgaggattccc

SEQ ID NO: 200867 - DNA, 751 bp, Zea Mays
attggaggaacctctagtaagtgattcgcagaggactgacaatataacttcagttgaagagaacacaccattgcatagtgataacacaataggtaaagcagaacaatcaaacaaaccatcaccaactggatcccaaaccacagctgcgacgtatgaagtaaaggagtccttcagtcaattccatgcatcatctaaagacgtgacaggtttgtttctctatagaacatgccatcatgtgcacccagctatgggataatgatattttttggttcacaaaacacaattttattggtatgtcagataatctatagctgcctagaggctgtgccagtaaagctaccatgttgttttgtcgtttgaaatttctacttgcaaaatgtggagtaattctaaatgtttttcgttaataacaaaaccaataatgctgtaatgctgccgaaatgctaagatattaccatgttacacggagaaaggagcttaatacttgtgcagtaacactcttttcgttttccattaggaaataaccagagattgagttaggaaatttaacctcactaactacccatgttggttacagtttgttcagaactagtttaatatatgctagtgtgtcaatgtgatgaaaaggagtaacgaaaagtataaatataaacctcttatgcaggatccacgcaaaaagaggcaggacatgtggtaactgtgcagcgaaacggagcacgccaagagcaaattcctctctcacggcctgctg

SEQ ID NO: 200868 - DNA, 295 bp, Zea Mays
caataaagtaatatattttatcttaattaaaattctataaaaagctgatatgatattatgtagatattcaggaaggttaaaagctgatgacgtggcgacgtacggcattgtgcaatggaacgaggctgagtagtttggccaccttcaccgtcgctgcgtcgcataacctcccgtcgcgcgtgtagcaactagcaacacctcttctccttttacttcgcctcgcctcgccataacgacacgcgcatctccctacctcgatacgattcttcgtcttctcttccccgcgatcgcgcca

SEQ ID NO: 200869 - DNA, 642 bp, Zea Mays
ctgaaggctggtggagagctgagttctgttcccgaactgtgctcctattcaagagcttaagagttgtccagttatgcgatggaacggggcatgaccgcatgtaccattgaattagactcgtttttagaaatgaacagataattcaaaagattactatcaaattgcagagtaggtactaagaagatcgaaatccaatagagctagacgggtagagcggctgcagatgcgatcagagcctgtcgggatgtatgagaagtcatcactttatgacatcaggggattgacagactttcatacatgcatcatcacctcgcatcgaagatcaactaacaagaacaaatatccgacaagagaacggctacgaaaaccaactcacaaaagagactatgccaacgataaaaccgggtcagttggaagaacacgaggaatgaatctaagagaagaaaagaaataacaagtggctcagaacttcttagagggtttgtgcaaccaacaccggcgtccgagggatgcctccggcacacggatttctttcctcatcgccatcaaactgctcaaaacgatatagtaatcgacaaacagaaacaaagaaaaaatggagaaaacatgaaggcgaaagaaccatcggacacagagagctag

SEQ ID NO: 200870 - DNA, 526 bp, Zea Mays
gtttggtctttacggccgccgccgcttctgcagacgtcccgtgccctttgctgtttcagcgttctttcttgtagtttcatgaagcatcttggttggtttgtttcttgagtgtctcttccttttctcccctttgctcctctttgtgcagttttgttcagagagacgatgttttcctcttttttgtcgtccttaagaatttatttctctcttctgttgcgagctctgatgaggactgtgatgaaaaacacaatcaaaacacaccatctttcgggactgattggctcgatacgagccatgctgccaactctgcaattctgacgtccccattccagcccgcagattttcttttgcatttccacgcttttattcatgcgtctgtatgctgcatcgtaaaaaaattgatctgaaatactttgacagtggcctgtgacgaaactcagcaatcaaaaacaccatctttcggggctgattggcgcgagccatgctgtcacactgcaaagaattctgaggccaaacagagtataac

SEQ ID NO: 200871 - DNA, 395 bp, Zea Mays
tttggctggtgggaaaggcccaggctcccgcatcccgtaatccccgcccacgacaacccccggtgagcaatctccgcgcatttgtgctacaatctcctcaatctgcgtgcccccaatctcctacatcagcctcgatggaatctcccccatcctcgaacatggaaacccaattatccaccgcaatcagcattcgtcgtcgattctcaccttccatcttcggcgagtgaatgggaaccatcctcggtgccgatgacaaccatcctctgctagccgatgtgcccctccactaggcgcttcgctccgcgtcgccaattgccaacaaccaccgagatccagcgtaggaaacgagataatctggcggcgagaaacaaaggcaaggtcgtgcccctgctcag

SEQ ID NO: 200872 - DNA, 368 bp, Zea Mays
gtcgtgagtaatttgttttttattatccaatcgaaaagtttgcacttgttttacgaacatgtgcacgagatgatgttggatctataccatcggatagtaccacaaaaaatgaacacggtaggccagtttggtgttgtattgtgtagtgtttgtccaccaactgatttggttgtcacatctggctctagttgtaccttcttaatgtggatccatatgagacaaactcttctagtttagtgttcatggttgtttatctcccatggtttgtatctagcatcatggtttagttctagttgttgttttgttttttcattcttaccgttggtacgctagcttcgtcgccctcgggcccctgcgaaggcgagccg

SEQ ID NO: 200873 - DNA, 400 bp, Zea Mays
tgtcaccatagcgagctgagaaccaatgcagaatggccacagctttctgagacgacattttgatattggatcctaaagcatcttctggaagctcccattaggaagccctttatgacatggcagaatgaagggaggatatttccacccttatctccaaaagatccataacccatataatccttacaggattatagcaagttcacttcatcattttttaattgcaaaataacacggttttaggactattgtcaccatagcgagctgagagccaatgaagaatgggcctagctttctgagatgacattttgatattggatcctcaagcattacatcagagctcccataaggaagcccatggagacatggcagaatgatgggaggatatttttcagccttatct

SEQ ID NO: 200874 - DNA, 271 bp, Zea Mays
aaaaaagagagaccatcatggccatatgctatggagccccttggctcatgccagtgccccgcatgatggcatcaaggttaggtggaaagcccttaaaaagacaaaatgacactcatttatatgtttccaaatccaccttgccgccaatacgaccaatgagctgaaacccatgcgggcatctgtggtatagatcacgacattccaaacaagcatctcggtgtattgataacaccccgggtttccagccacagtgcttgctgctggcgtcgac

SEQ ID NO: 200875 - DNA, 388 bp, Zea Mays
cgagcacgtgcaataggcttcttaaaatcctttagttttcctatgtcctccagcataaggtctaagcagtgagcagcacaagaggtccaaaacaaggtaggagtgttctgaaccaaaatgcgccctgcagccttgtagttggcaccattgtcagttacaacatgtatgaccttatccctgccaatttgctcaattctcttatctagtagctctgcaagcatcaacgcatcatgagactcactcgatgcatccactgattctaaaaagaatgtacctttagggctgttaactaggaagttgatcaaatgtcgacccctcctgtctgtccatccatctgacatgagggtgcaaccatattgactccatgcatcctcatgcttcttctcac

SEQ ID NO: 200876 - DNA, 628 bp, Zea Mays
gaaaagggtaatcccctcctaaataataggctagatatcttctaacagaaaggagtaatcccttcctaaataataggctagatatcttttatttccttaatcctagcggctaattggtttgggcagccgcctcctgtgttgcatgctcggctgccctgcgtatgtcgcgggcgcgacgtcgcctggagtaggggatgttgtacatgacatctctccccccctcgaccaccagctcgtcctcgagctggaacgctgggtacttggcagagaaggcgtcgaggtcttcccatgtggaggatgctgcgggttctcccttccagcggatgagcacctgtcgaaccccgcgagcgacgcgagtgcgcacagcacgttccggctcagggttgatggctccatgatgaacaacggctaacggtggtggtgtcgcgggaggctcgcccacccatttcttgaggaggccgacatggaacacatcatgaagcttggcgcgtggaggcaactcgagacgtactgccacctcattgatgagctcggtgacgcggtacgacccaaagaagcggggctgaagcttgctcttcggcgcctgagaaatggaagccactggccgctgacggagtcggaggagcac

SEQ ID NO: 200877 - DNA, 465 bp, Zea Mays
gtggctgggctgttctcagcggcatgggacgcgcgagcgcggccaaggggccccatccaacttatatgtgcaagcggataggcaaccagtcagcggggcgaggagactgtggcgaagatggcgcgagtgtggcggcgttatgttgcgcccgcacgcgagttccgcggagaagaagacctcagccggaggggtccaccagtcattggccagcggcgcacgcacgggaggaagccctggcgagtgggccccgcgtgtaagcgagcacaagcgtaggcacgcgcgtctgaataatgctggtgcgcgcagtaaatggctaatgggccaagtgagtttgggcccatttcgggttctggctccttttctctttttttttattcttttctgttttatttttcttttcattttcgaatttcaagtttgaatgtggatcttgttatgaatttaacccttggccaaatgttcaac

SEQ ID NO: 200878 - DNA, 443 bp, Zea Mays
aaaaaaaagcagtgacgtgtacggcatacaacaccatgagaatacgcaagtggacgagtcgcaaaggaattaacggcagaatatataccatgaatatagatatcagcgatgcatttttccgtccacgtttttgaagcaaaacctgccatagcccataggccagtcttttttctgtgggccgtgtgcgcagtggctttatcccggccgtcacgctcacgccgctgtcgactccgccgtgcgcaacactataaaaaagaacagctcccgccgtggcagacagaagacttcactagaatctactcgtcgagtcaccaaagataaggctctatcggactcggagtctcggacagcacagcaaagcaagagccgctactcaagtatagtctctgacaccggccgaccctgccctccaacccaagccatggcggacaacaacaaccggc

SEQ ID NO: 200879 - DNA, 456 bp, Zea Mays
gcctcattataaaacaaataaaaattagagagcctcatgctctgttcattggtgcaaaatccagaagaaaaaaaaatcaaaatattcaagctttatcacatgagagtgtccagagtatccattcttgattttgcgacagcagcacagtcacgtgcctgcgctcatgctgagttgccgctggcagaccggagactggagtactagacccgggactcgggaggcgatgtcaacgggatcccctgtccccattcatagcaattaggtgcggcagccatccagcggtccagccactggcgagcatgtgaccagtcaccagcatcagcatggatggtgccatagagcgtggagtgcccttgactcggtgctgctcctgtcctgagtctgtccatcgacggagatgccactgctggaccagcggtgatgctgtccagtggcgacaacctcgagctccatccg

SEQ ID NO: 200880 - DNA, 298 bp, Zea Mays
gtggcattgggcatgacaagcagggtgacagagggtgtcacaacggtggtggtggagatggacgagaacgtcatcgccttgtacctcgacatcatgtagggattcatgacacccacagaggaggatacctcttggtgctctagtgatgacatgcaagtggagggattggcaagctacatggtgatgtccgccaaggccatcgtagtggtgtcggcgcgtaatgatggtgggattggcgactgcttctcggagtcatagtcacctggtatctctaataccagattgatagggtttgaaa

SEQ ID NO: 200881 - DNA, 335 bp, Zea Mays
atgaagagggaaattgccaagtacatatccgagtgtgacacttgccagaggataaaagctagtcacttgaaggcggcaggccctttgcaaccccttcccataccatcttggaaatgggaggacatttgcatggatttcatcgtaggattgcccaatacctcaaggcaccatgattccgtttgggttattgtggacaggttgaccaagaccgctcatttcttgccagtgcacaccacccacaagacggaaaagtatgcagaaatttatgttgatcaaatagtgcgattgcatggtattcaaagaccattatatctgacagaggagcactgtttgtg

SEQ ID NO: 200882 - DNA, 775 bp, Zea Mays
cacaaataacacacacagaactcttggacttgaagcctcttccactgagtgctcttggcaacaaaacgtatgaggatctgtacagattttcccatttcaacccgatacaaactcaggtgcctttggaacccagttatctaccgttccattgccaatgccattatctgcattatagggattgtaattaaacttttaaagctattccaaccattgttttttgttttgcaactgttccaggcattatcagttctttttgcatagtggtgagttgtttgtgggaactgggaaacatgtattcttgattgaacataaattggagaatcaagtaaaaattaccaaatgctaaacaatttgcatccatttttttgaagttcacatgatgctttttgtatgcatctcttgttgtataatgcccaaacacacctagtaccattgctgaattgtttgctcatttgtatgtaaactattaaatttctactttcttcctttaggcttttcatgttctttatcacactgataacaatgtactcttgggagctccaactgggagtggcaaaacaatttcggcagaacttgcaatgctccatcttttcagtacacaaccagacatgaaggtttgtttatcaacttccaaaaaatctgaaagtttttttttggcatgatggcaatttaatgccttcccaatacctgttttaggtagtttacattgctcctctaaaggcaatagtacgagaaagaatgaatgattggagaaaacgtcttgtaattcagcttg

SEQ ID NO: 200883 - DNA, 298 bp, Zea Mays
attgttttcttcaccttaccatttggtgagtcttgccttgactctgtccatggattatgcttttcatccttatcacatttacccttatcacctctatatcttaccttgatgtttatcttatactggccctttaaaatatcctcttttccttctcaatctgagcgttgtactttacctacttttcccttggtcgtatcctcttcctcagcgcttgtgagtcttcaactccatcctttgttgtgcctctgtttagcgttgccttgaccttttcgatctctcaatcttaccttggtaatta

SEQ ID NO: 200884 - DNA, 287 bp, Zea Mays
ctaaggtgctcaaaaacattcttaaggatagttagaacttatccaaatttgtgaactagtcatacctcaactcatccaagttttgccctactttgcctttgctgaagctacaagttgagttaatctccacaaattgacactaatgaacatgcaagtgcacactcagcaaaatagttagcactcagggttgtgctgatcattgatcaccaaagccaacttagcaatggtgtataacacatttccctttcagtcatcatcattgtcgtcgtcatcatcgccatacaccc

SEQ ID NO: 200885 - DNA, 498 bp, Zea Mays
tacggctcctgctccggtggtgcgacctgcctgcaaccgggagaaatgcgattccggcgtccggaagaggtttgtgtcgtcgacgggcgttgctcaggttgttcggaacacagagaaaacagagccgctagtcgatggatggcagttggtggaatccaagcagtcaaagcgacgccgattgaagatggagcggcaacgtcagagacggcccgtcccagaggacctggctggcaggtgctttaactgcctctctcatgatcactttgccttccagtgtacgcagaagacgaggtgttttcggtgccggaagcaggggcatcgctcctttgattgcaatctacttaaaaggccggtgaggcttgaggctgtgaaggtggcggtgaacaacagtgctgcctctcgacctgagactgagatctcggtttggaggaggatcaatcttccggagccaagtacgaccagtggagacagactaagggagcaacctcgacctgagac

SEQ ID NO: 200886 - DNA, 431 bp, Zea Mays
ggagaattttggggagaggctgtcacaactgcagtatacctgctaaaccgtgcccctatcaaaagtcttcaaggcagaacaccttatgaagcttggtacaacagaaaacctagtgtgcaccacttgagaacttttggttgtgttgccccatgtgaagaaagtagggccgggcatatccaagctgaccgacagatcgacacccatggtcttcattggttatgagaaaggtactaaaggttacagggtgtacgatccagtagccaagaagcttcatatatcaagagatgtgatattcgaagaggccaaagcttgggactggattggtacagaacagctgggaccatcagcatctgtaattgatgtggagcattacagtattgcaggaccaggaacagcaactgaaagtgtagagaacggaacacaagaaacaa

SEQ ID NO: 200887 - DNA, 282 bp, Zea Mays
gaaggtcagcaaggcttcgcgaggcacgaagagaagtgctattgttggtcaatggagaagtgtttttgttagacaatgacaaacctacaacaaacgcagaagcgatgacggacccagattttgagaaatggcaaatcgccatgacatccgagatagattccatgggagaaaatcaagtttggaacttggttgacccgcctgatgatgttagacccatagagtgcaaatggatttataagaagaaaaacatggatggaaatgttcacatctataaagtttgac

SEQ ID NO: 200888 - DNA, 303 bp, Zea Mays
cacaaagaggcatgaatgttattaattgtaaataagtgtgtatgatcaaacgtaatgttgatggaagtgttttcagaaacaaagctaggcttgttgcaaagggatttacacaacaacatggaatatattatgaagaaacttttagttctatggttaaacatataattgtttgagttattctgtcattgaccatatcaagaaattggagttgggggttgtcggtgttttgaactagctctgacaagtaaatttgtttgtacgcgttctggattcggatggtgtgctcaatggacgcaagattta

SEQ ID NO: 200889 - DNA, 298 bp, Zea Mays
cacggcgagcgaggggtcgaacggtcgcagcgacgtcatcagtcttcgtcctaatcctcctcggccgcaatccgacgaacaggcgggtgtcgcctcgcttgtcccaaactgggcgactttgagatatagaggagacggtcacggcacggggcgggacggggcgcgagaaggacggtgttggcaacggaacgtgtggacgtcgtttccgtggctgttttaggccagcagacgccgaacgcggaaaaagctcatatgcctgatcccgtgatccgtcaatcgcgtcgccaaaaacaaaaac

SEQ ID NO: 200890 - DNA, 319 bp, Zea Mays
tccatcagcaagatctgtgccttttgatacattgccaacaccatcagaggctaattgaagtcttggtgaaatccctcgtgacactcctttagaggttgatggtctgttagcattatcaccaaagtccatgcctttggttacagcacttatgccatcagaagcaagccttcttcggggagacattccacgtgatgtggaagatgaggtggatggcctgttatcctttccagaaaactccgagctcctgcacatagtatcaacaccatcagaggcaagtcttctccttggagaaacccctcgagatggaattgatgagctg

SEQ ID NO: 200891 - DNA, 489 bp, Zea Mays
tgttccaaggggaagagatatagatgggtcattactaaatatgaactatgaggacctacaaactcgcatggaccgataaaaggaagattgaggttgctttagggtcactattatgtgtgattcatggacagggccaaccatgatgtgcattattaattttatgatttgttgcaatggtcgcatgttttttcataaaaccgtggatgcaactggtcaaatacaaaatgcagaatttatttatgattgcattaaggaagttgttaaagatgttggatagagttgtgttgttcaaattgtgaacgataatggttccaattacaagaaagcatgcaagcaacttatagccgagtatccacatattacttggcaggcatgtgccgctcacactattaatttaatattgaaggacatagcacgttgtgatgaggttgatgaactattgtatagtgctaagcggatatgcagatttttgtacaagcataataggta

SEQ ID NO: 200892 - DNA, 357 bp, Zea Mays
atgatccagatccgtccgatcgcgcatcaaccgtcgagattagatcccccctaaagtgaacaggtataacccacaacccttggatgcggcatccatggttccagacggtcccaacatgattccaccccatccactcgatcaggcgccaaatgcttggattcaatacgcgaaggggtaaatgctacttctaatcccagccctccatttaacatctgacggccactacgtttcttcctccctacgaacgacagctgagcacgacggtgcatccaggtcggccgacgatgcgcacagcggtggacgcgccatcctcctagccacagcacgccaaaaaaattcaaacggcaccacacaaac

SEQ ID NO: 200893 - DNA, 604 bp, Zea Mays
ccctgtttaggagattgtatacttgtactccaagttaccttggctatatatatgagagatcacccccctcattgggtgtggtgtcttcccaattctatctctctacatggtatcacgagtccagggtctccctgattttgtgccctccctcccgcttcctctaccaccaccatatgccgccgcctgacctagggcgcggcacctacctgcgccgcccctccctctgctgcgcagaagccttggatgtccacgatcacccacgtggactcctccgccggtgacagcgattccgactgctccgtcggattttctctcctgttcggcgacgacgttcttgctgcccagatccatctccccatggcgcttccctacgccacgatctctgtgcagtcctacgtccccatgaagctcgacctccacgcggacaacttctccaagtggaaggcctgcttcgaagccctgtgtggcaccttcgagctgctgtcccacatcgacgggacggcgcctcccaatcccctcacgccggtttggctccaggaggactgttgcgttcgtgcctggctctacggcaccgtctccgacgccgtccacgacctcatcatga

SEQ ID NO: 200894 - DNA, 565 bp, Zea Mays
taaagatagtctgcctcccttacgttctgccgttagacaatctcagccgcatgttctatccttctgtgatctaagccgtacgatcccacacaacagtcccactccctgatcctgcccaccagccccgaagccgtcgcgcaaccgccccgctcgcgaggcgcccctccctcccccgaacatgagctcgtgccaccgtcctcctgctgcccaaatctgcgccaccgccatcctccccctgccccgctcgcgatctatgagatgagacggttgccgccctctactccttttaatcgtgtgtcacgcgcttcgcgttctctccccacgtggtcgcttcccggcttgtggtcgtcaagccccatacaggtttttgtgcatcagagctctgcggtttcacccttctccatcctcatctcggctacgacctcgccatagtttcaggtatacaagccacaagccaccaccctactcgcgctcaggtttcttatcatcggctggctcctatggatggcgttgtgggggctccgatgtctaaatttgggtggggaatgtgtttgggaagggttgg

SEQ ID NO: 200895 - DNA, 469 bp, Zea Mays
atcgtgacatcgacgtgcaggtcggcgagtgggtgctgcttcgtctacgccagcgcccgacgacctccatgcccgactcgtcggctggcaagctgaagccgcggttctacggcccttaccgcgtcgtcgagcgcatcaacgccgtggctgtccgcctggccctgcctcctcaagctcgcctccacgacgtcttccacgtggggcttctcaagaagttccacggcgcgcctccgcaagagcctccagctctacctttggttcgccacgacgcagttattccagagccagagcaagcagtcaagatgcggctgctcaggggagttcggcaggtcctcattcgctggcggggagcctctccggcatcggctacatgggaggatgtggacacgttccgcgcttcatacccactctttcagctcgaggacgagctgcctctcgaggaggggagagatgtgatgtacggaaatac

SEQ ID NO: 200896 - DNA, 440 bp, Zea Mays
ccccacgccactaaacagtgaccaccattggcttgctttcttccgttccaaaggaaacctcttcttatcttgtcaatagctttgatggtccaaatagggaggtccaaagccatcgcagcataaatcatttttgctgtgagaacaaactgaacataaacagcacgacccgcctttgtcatcaggtcggccttccaacctgggagaacattagctgccttgtccaccaatgcctgtaactgggcctttgaaagcttacccaaggacaggggcagtccaagatattgacacggaaaatcagaaatggggcaggggagagaagcttggacccgcatcaaatcatcttcggtacaacgaatggggaacacactacttttcaggacattggtcttgagccccgaggcttccccaaaaagccgaaggatctccaggaccaaattgat

SEQ ID NO: 200897 - DNA, 275 bp, Zea Mays
gaagtgccttcgggttcctgattgaactatcgatgtggtggatgttgccttggaaccagacttaacttattcagaacatcccattcgaattttggatcagaaggacaggatcactcgaaaaaggactcttaaattctataaggtacaatggaaccagcacaccgaagacgaagctacctaggagactcaagacttctaggaaaagaattttcctaggtttttaacttcatgtaacctgtaagatatgtatatttgattgtaagagtggaataaac

SEQ ID NO: 200898 - DNA, 643 bp, Zea Mays
attgcagaaatcactctctatcacaattttatagcctccctcctcaagttgaccaaggctaactatgttactttttaacttgggtatgaaataaactaatgtgagtaccttgtgacctttattcctggtctagagcagcaccgatcccatgcctttgatctcgaccaaggaaccatcaccaaaacaaactgtgcctcccactgaagtgtccagcgacttgagcactgcacgacacccagtcatgtgattgcttgcacctatgtcgagcacccatgtttcatcatcgcgatccactggaaacgtcttctcctcattgagatgcaccacatgatgtggaacatgtaccccaactcgttcagcctcgtgccatggcgcgacagtacgcaccgtattgaccgtggcgagcataagcactggctgttcatcatcagccttcacatgatgggcttcctcacgacgctccttcgttgggcgtttgcagtcctgcttccagtgcccgtaaattccacaattacgacaccttcctttgcgtcgcggtgtgcccttagatgtcaatttgacaacaggctccttcttgtcaccttgagacatgttcttcggcttggcctcggtgaacccaccttgacgatctcctcgattccca

SEQ ID NO: 200899 - DNA, 824 bp, Zea Mays
aagccatagccatccaggaagaagaagccatagcaaaagcagctgaggggggattagagaagaacagcagcgcatcagatagggagaattgaagctgatcttttgtatcatatatctttcctgcatgcttcatcagtccgacacttgagagaggttcgagagagaagttattaagctgcctccacactggtagcaagtgattgcatgcatgggggataggacatggcagcagccacatgcgcaggcttcttccccagacgcagggaccaaggtccaagcttcatcatcgtccgtccatggcaacatcatgtaaaccctaacacacatggatatatagctggattcggatcttgctctattttcttgcgaatatatagatatatagatggatcggaattgaaggtttgctttttttttttttgcttgcttttgactcctttcttctgatttctgaagcatatggtggattatatatactgtggcgtcaatctcttctctggttttcatcagatttttaattttccacggtggatttaatttaactgttcaacatagaatttgctcgatcggaaattttgtctttacataaacttattttttttattggtagcatttccagtatatcattttagtaactgaccaaactaaaatgatgattgataccagcctaatttataattttgcgtgtattgatttgtgcaagtgcagcagaaaggagccagctggaggcggcggatacgacgacatggccgagttcgatcaagcgctcttcctctatcttaacagcagccaggatcaagcatcagttattcaagatcaacctc

SEQ ID NO: 200900 - DNA, 359 bp, Zea Mays
gtcaactagatggtcacccctctacaagcaacatgcaggctaattaatccatctcattatctggatcagatgctaatctctatgccctttcggccgtgcaggcgagcttgccagcaatagcgcagacatgacagcctcgaatcaagctagtttgataatgcagttcttggttggcttcggttgcaacgtatgagtcggtcacacatgagaatgattctccctgtctgctggttcagctattcactggcatccacctccgtagctatataaacaaggaaaccgaagcccggaagacaccattgcagcagcttgcctttgatctttcttctttcccactcccagaagtttcagaggttcac

SEQ ID NO: 200901 - DNA, 281 bp, Zea Mays
gtcacatttcaagcgctcatgaacgacgtcttgcgcccgtttcttcgccggtttgtacttgttttctttgacgacatcttgatctacaacaagtcatgggccgaccacctgtgtcacctccgcaccgtccttagtgagcttcgtcggcacaccctcttcgtcaagtgctccaagtgtgcattcggggtcatctccatcgcctacctcggacacacaatctcggaggtgggggtggccatggactctgccaaggtgcaagccattcacgaatggaaggtacc

SEQ ID NO: 200902 - DNA, 404 bp, Zea Mays
tcggagacaggtgacataaataatcttgggccacatcctctttctgcagctgctccaacactgagttagacaattccatgctcaaatcttcagtggagagaacgtgtaattgggctgcgtttcgtttggcacacttggcaagatgccctggctcaaacctttcaccacaggcataacagagaccatgcaacctgcggtattcccgaacctgtcgctctttggacaagtcggaaggaagattcactggaattgcatcagggcgagcagtagaggcagatggtttggactgaaagaagcctttcgtcccccgggctctagctttgtccaggttggtctggtgcagttcagctaggatcatggctcggttcactgaagatggtagagctgtctgcactaacccttgt

SEQ ID NO: 200903 - DNA, 351 bp, Zea Mays
aaaggaaatgggagtagtcgtccagaatgaccaggtagtatttgtagccagagaggctaaggacaggagacgtccagagatcacagtggacaagatcaaaggcctgaacagccctggacgtggaggtggaaaaaggaagacgtgagtgacggccaagctgacaagcatgacagagacgctcagaagagccccgagtatatgatatgtcggagtggtcggcgagctgggacatgacgtcaggtccagggtgcccgaggcgacggtgccaaatggcggaggaggtggtggtagtagtaagggcaggagatgaggctactcgggtgtggggagtggtgggcaagtgaagggaat

SEQ ID NO: 200904 - DNA, 382 bp, Zea Mays
gtttagatatcctacctgttctgtttggaccactggtgggccgggcgccttgctccgaccatggcaccaccacctgccagtgcgcgccgccacggcttgggccgtctaggaagaaacgcgtacaccgttggatctacgtaggacggatgggattagatttgtgagagagtcatcatgaaccgttggatccatgggcatcggtcatgatcagatctgcgtactggtagggattggatggttctgcgccatcggatgtgaagtggacgagtgggattgaagtagtgttctgatttgggcaaatgaatcggagccgtagatctcggggcgtgcggtatggatagcgtaccgattaataatcacgctcatctaatcttgcgcgtac

SEQ ID NO: 200905 - DNA, 387 bp, Zea Mays
gacatttcagttaacatgcccttgaccacccttatttcttaatgatccatgagtggtcattttattttgcacatccttggcgatctcattaatttcttgtgacttccttcggtaatgaattttacttcaacccttctattggaaccttacctatcttacccttgattgttttatccacttcgccacttcgcgattcttgccttaactctatcctttgtcatgcattttgttattattaccttcaccttagacacctctatatcttacttgatgtttgtctcctacctgccctttaaaatcacctctctcccgtcttattctgagagctatactttacctatctttaccttggtcgtatcctcttctttggcttgcgagtttgtaact

SEQ ID NO: 200906 - DNA, 308 bp, Zea Mays
ggccatttagtgcgatagctgaccaccggtgtcttcatgtctttgcgataagcaaagttgtagcagccgaagttctcatgcagtccatcttccctagccttcgtctgatagtgaagttcatgtactcggcagaaggcttcggcgagtggctccaccccttgactttggagggcccagatgtaaacgttgagtctaacaatggcgttaggggtcagctgatgaaggtaaatctcaaaattttccaagacatctccaatcatcccgtgcagaggaaatcttagccctgctttgaagaagctcttaaagac

SEQ ID NO: 200907 - DNA, 276 bp, Zea Mays
ggcattcactccggtgatcaacggagggctaaagcagatcacggcgatgcggtggagatgcctagacacacggcacaaggccggaaggcagcagtcaccggtgatctcatcttaatccaccgcggcgagcgtagtacggtggccggaattatttactagccggagcttatccacgacggtgtgactccgagcgttatccgatcaacccgagcacgaatcgagacggcagcggcatgaatcgcgacggagagatcgtcggtggcgaaaaacttagct

SEQ ID NO: 200908 - DNA, 501 bp, Zea Mays
cccgaccgtaggtcgagcttggagaaaaatttggcgccgttgagctcatccaccaccgggatcgggaaggcgtccttgaccgtcatggcgttcagggcccggtagttgacgcagaagcgccaggatccatcagccttcttgacaaggaggaccggcgacaaaaacggggagtcgttgcgtcggacgatcccttgttccatcatggctgcacactgccgctccaactcatctttgtgggcagctgggtaccgataggggcgcacggcgaccggctgtgcatcgggcttcagcaggatgcggtgatcatgtgcgcgcttgggggggcagtcccgttggagtggcgaagacccttgcaaacgcgccgaggagagcatccaagagcgattcttcagcggacaaggcgcacaccgccgggcccgacgtcgtggataggcccgcccatgagatggtgcggccccctcgctggaaggacatgcgcctgttggccaggtcccagacaat

SEQ ID NO: 200909 - DNA, 478 bp, Zea Mays
aatggatcgaagatataaattatgtgacatgtgattagtgtttttaagatgagatgtgcgaatgatcggttagtgtttcacttgtctagtcgataaatgttgtcataaataattgtgctaaaattggtcatgagaatgcagtgggcacgtggtgtgtttggatgtgacaagtagattggaagtgtggggtctgtcgaagcactgtgatgtcgaacgtgtatatcgaagtgcattgtagtgataattgcgttaagttaatcggtagtgtctcgggtgcacgccacgacatggttgtatgcgagacaaggtaatatacggtgtgctcgacacgaatgttcggtcgatataagtagaaattgttttggcttaattagagaggtggtgacatgccaaagtagtcatcgctttctctatatttataagtcgagtcgtgtcgatgcgtattatgcgttcgttaaattatgcttcgcatatagtg

SEQ ID NO: 200910 - DNA, 296 bp, Zea Mays
gaaccatagggtgactccacaaaccaaactcaccattaattgaactgttcattaattagttgctcgtgcgttacaacactttgtatacattatatagatagtccttgcttaaatgagataattattcggtcaccatatagattctcagaatacaccaaaaagagacaaccgggaaccaggataggctcaacacatgcaccagcagtcggcgcgcctccgacgcctcacacggatctaaacacgcggcgatacggttctgaggtcgtatcacacggattgggctgcgtcttgtggtg

SEQ ID NO: 200911 - DNA, 275 bp, Zea Mays
aaagatccaacttcattacaggttcattatgatagcatcaaaaacaaataaacaacctaactctaactaagaccgactaagactaagacactgaattaagcattattacagactccgactccatcgatctatggatccaaatctatctaggtcctacagtcaggagtaccgtaatcgaagcgaccacggggcagtgagcggtaagggtgctgaatcccgacaggggcgggagaaccaccatctagatagtggcgtgctgcgcactcagcacgcaa

SEQ ID NO: 200912 - DNA, 562 bp, Zea Mays
cttctatagaccttactcatgtgagagcctccggcaacggagtctgcccctagatatctgcatatcatgggaatatgaaaaggctatcctgtcctgtatatctatttctgttttgtaggattattaaggatttggaaggatcctagggaatagttgaatcaataattttggggggaaattaccctcatccctccagaatggagaacaagtcagatgaccttcagcacgagcatggtatgcccgatcagacgtctcgtcccttcacttcactcttactgtcggcaacatctgtcgcccaagcagcacaacaagataccggttctgacatcaaatcgcttagtctgctgcatggaagtagcttactcccacctgatgatggttacatctggaaggcgcgcgcgcagaacattgttccaggctgtgaatatcccaccatgtattacaagtgcgcccaggacaactgcaacacaaataaattggtggtatgctctgctgatggtcatcaggttcttgagacggttcttagtggttgccacaaccacccacgtcagcaagattgtga

SEQ ID NO: 200913 - DNA, 307 bp, Zea Mays
gttgctctttacaacgtgcttgagcttggcaaggatgacttgacgatgacttgtagcggcctcttgcttggccccatctgactggcatcactagggtggatcatggggccttccatgggaagtcgaaactattgactgttatgcaaccttgttcgccaatgatgactcacattagttttatactttactgtgtcacgtgggtgggttagcctttcgtgtgtccaggtaggcatcatgtttggcaaccctttcttgtacataaaattcattttgtcttaattgaaagacagagctcctaccattgttt

SEQ ID NO: 200914 - DNA, 285 bp, Zea Mays
gccccctcgcatgtctatatttaacgcagttgagtcacgacctcgtgccgttgtctagcccggtgactccctatacaccctcgccctctttcccttcctactcggccacaccttccacccccgtcgcaaccatcatgcacgctatcattgccgtcgtccactggagggggaaggtccccgccatcgacgctatcatctgatggatgcgcgatctacatcatcttcccactcattgggtctccaatcagagtcgtggtgaatgtggacggcagaggctggaagagg

SEQ ID NO: 200915 - DNA, 504 bp, Zea Mays
ctggcttgggaggcacgttgaggactcccgagcatggctatgacttttccgtgcgcaattgtcaacccgggattggcggatcgctcgcctgcgctggggattccgccgtgacccacacctccccgtcggtagggcactgcagggcgccatccagggtgagaactcttcccatcgattcgctatttccgcagcgtcgcataggtcggggcggtgtaggaaccgggcgccaacaccggacggtggcggctcgccggcgtgtgagccaccgcgggatgtgctccgtcgccgtgtctggctttggggggaagatggcaacagctggtccattcggttcaagatgtacggatgggattagatctagggaaagaatcactgtgggcctttgatcgaccgatgatcgggccagatcaagtcatgggataatgattcagtgttctgaatctcgaccgtccgatttggattgatcgggcgaaatctggacttaggggttttaaatctgggacg

SEQ ID NO: 200916 - DNA, 408 bp, Zea Mays
ggacgacgcgtgcggccacgggacttgccgcccggccatagatttcgtcgtcgagtccatgtacgcggcgtctggcttccagatctcggagcttgcctccctcttccagcgtcgcctctctgacttcgtttgcgaagcgctggacgaggacgtggtgccgattattcatgtcgcttccacctgcgatctccaggacctgctcaatctgtgtattcagagggtcgcagtctccgctctcgatagccgctacctggacaaggagcttccggctgacatatacaacaagatcaaggagatccgccgccaaccagagaacgccattattctggaccctgagcatgacaagagggtcaggaacatcctcaaggccttggattccgacgacgtcgatctcgtcggcttgctgtt

SEQ ID NO: 200917 - DNA, 437 bp, Zea Mays
atatccagaatatcctttctaatggtatttcttgacactaatttaaacaacggttgcagggaagcacaaaactttctaaagcctacatggtcaaccatatacagcgggtactcatgcacacagatcattaatgcaagttctttcctagcaacatcttgatcaaatacatacttctctaaacaaacactgccatctggattttgtgaaaatttcaaggaggattgttttaggccttttctagcttgtcgtgactcacatgtatttatgtggctttgtaaatggctggtaccacttttactttcggctgtcaatagtttgctacaccaattgcacttagcttttcatttaccagatatagtaactctaacaaaatcctcccatactttagagttcaacttcctcttacacccaacctgtgcagcatcatctatttcaac

SEQ ID NO: 200918 - DNA, 340 bp, Zea Mays
ttgatggaggggaccggtggaccgagcctcacatgtcgctggtagatgcgagctggattggcgaagcgagccaaaggtggttggagaggcggcacgacacagggtgtgttcggaggcaatggggccgcacatggcacactcaaaggtgatagggctgcacattgcgcggaagatgccgctggaaccaggggtagggaaagaggaggtacgtctatgggattggtatcaaggataaaatcaatgtcgagagatggggaggagccaacaaggggaaaaatgtcctgatcaaagacaacatgtcgagagatgatgacacagtggatgagaagatcgaggcact

SEQ ID NO: 200919 - DNA, 299 bp, Zea Mays
tggtgctcttgattttgaggcagagaaagcagtccaggaagcactagacattctaatgcttgggaggtctaccatcatcatagctcggcgcctcagtcttatcaggaatgctgattatatagcagtaatggaggaaggtcaacttgttgagatggggacacatgaagaattgttaaaccttgatggtctttatgcagaacttcttaggtgtgaagaagccgcaaaactcccaaagaggtttgtcaacccatcctcttgacagcaacttgctgagtccttagctctgttttttggttctc

SEQ ID NO: 200920 - DNA, 307 bp, Zea Mays
gcctccacgctcacatgatcatgaggctgggagttctagtgctgcccctgctcctcctcaggctatccgagaggaccctgctcttgcttcgattctggccaacctggcggccgagcaggcccggttatccgagaggatgctctcgatgtttcagaacatgcaggacaggcaggatgcccttcagcagcagctacttcaggatcgggctgagactagggcattcatggctcttatgcttcagcattctggtatctcagtacctccagttcagtctgctccacctcctccgcttcacgctccagtggtg

SEQ ID NO: 200921 - DNA, 365 bp, Zea Mays
gtaggatagagtggatcgaaaatataaattatgtgacatgtgattcgtgttttaaagatgagaggtgccaatgatcggttagtgtttcacttgtctagtcgataaacattgtcataaataattgtgcaaaaattggtcatgggaatgcagtggggacacgtatgcgtgtgtgtgccgtggtgtattatagtggtggtggcgtaagatatttgattgaggtgtgcgggtgtatgccgtaatatggttatactcgcgacgaggaaagatgtatgtattgtgtgacccgacgtttaggttgctattgtataatcgtgtgaaggatgctcccgatggtcatgtgactaaagggtggtgtagtggtaaag

SEQ ID NO: 200922 - DNA, 308 bp, Zea Mays
tgatgagatgttggaggagcagcttgttggagatgtgattcgtgcttacagtaatggcagaaacttcgattcagatggagtggattgggaggcagaggatgagatggagttcaatgacgatgctgacaatagtgattttatggatgatgctgacgatagtgattttatggatgatgcttatgaaggtggcaattccaaaccaattcaaaatcatgctaagttggaaatacaagactgggtgaaccagaaagttgttttgagtggagggaggtgtgaggcgaggggcgagggggatctggaggaagaat

SEQ ID NO: 200923 - DNA, 418 bp, Zea Mays
ccgagatattcgtgctatagctcggcagttggtcagtgtgtggattgaagtttttcgtagagaaaaggatagcaacggcggactcaaattgctgcgtcgaatgccatcaattgaatcgagtaagaccaagagtaaggatctgcaatcaggaaagcctaccttacgtgtgccaaatggaactttggacaacaataaagtagtgtcccagcgccagcgtacaagattcgcaagtagtcaatcaccaccaaagataaacaagaagtatgataacaaggaaatgaaattggaaactgtgacagctgctatgtctgatggcaagttgctttcccaaaagcaacaacatggtattgaatctaaggtggaggaatgtggcattcctatgtctgaggaagaagctgctgcattcgctgctgctgag

SEQ ID NO: 200924 - DNA, 497 bp, Zea Mays
aggcaatatagtttcctcccaagaaagtctggacgaaacgttgagcagtgagcactatgagcctacttggttgaatcaatgccttgcacttgtgagccaatggaccaccaggttgattcagccactcatcctccatgtcagcataaaacatgtcgccaatggcaaggacctcagcctctgtcgaaaactttggtgcaatatccccaacagatctcttctttggctccttcagctttgcatcctctggccaagctgcctcaatcttgctcagagaaatcccaagtcctttcagcttcttaatatgttcctcatcaaggaaacatggaggcgaggctgcatagcatatgaactgatcgatggccactttcttcctcttctccacaaactcctcataggtgatcacaaccttcctcccaatgcagtcattaatgtggttgatatcaagcacccgatcatactggtaatctgccttctggctgggcaccaccagggtacgt

SEQ ID NO: 200925 - DNA, 423 bp, Zea Mays
ggccgacacgttggaggagaagataccaaaattgcctcgcgaggacacaggaaacaagcaagtgatgaatagactctccttcctggtcacataaggggcaagaactaggatggggaagacccctcttagcgagccggtcagccacccaacatttattatgtaggaccaaccagaggaaaaactgacacttaggcggcgcccaggtgctccacactctttcaaagcccgccagggaggtagaaccacataacattatctcataagcagatttggccgaatagataccatcggaagagaacctccaataatgtttatctggaactcccgattgaagatcaacgtcagccacaacatctgccagcaaaatgaagtcaacaatgacctcccatgttaccactccccttaaatccccaatccatgatg

SEQ ID NO: 200926 - DNA, 437 bp, Zea Mays
cagaaacctggtaacctaagtaatcatctgactagctgttttggccgactaaacttactgggctagctgcttggctcaagcccaataggatttctctcctgtacctcccactcatactccctcacctcctcaccccgtgagatacctgaagcacaagccgccaccctgtgtgacggctactagccgcctctgaagccattcatgtggtcctgccatgctggagctgcatttcttctcatcctcccttctagttccagctgccgtgcgcccatggctcctctctcctgatgctgcctctcttccttgctgtagccatcagtgcacaggacacagggaatctcatggggcgtgcaagttgcagggatccatggaagcttgtggactgacaggccacagaggaagcttgctgattctcttctccacctgagctatgtcaa

SEQ ID NO: 200927 - DNA, 298 bp, Zea Mays
cagtgttagactattagtgtcttaggcctagagcccaacccaagaggcatgttagggttataaccctaggcattgttatatggaggatttctccctctatcatggtatcttgagacaagttggcccctagagccctgcaacagcaactgccaccacagtcgacgtgcccctctcctccagcattgccaccactgcgacctctccctctagccggcatgctgacccctcctaggcatccattgcggttggtgtgcccactcgtcctcacagccgtcacggccttccccctgccaccaac

SEQ ID NO: 200928 - DNA, 410 bp, Zea Mays
gtccatactcagtttgggcgcacgatcaagcaagtccaatgtgataatggtcgggagtttgacaactcctctacccggaccttctttctcaccaatggtgtgaagcttcgtatgtcttgcccctatacatcgccacaaaacggtaaagccgaacgcatgctccgcaccaccaacaatatgatctgcaccttgctgatccaagcatccatgcctcctcgctattgggtagacgctcttcatacaaccacttatcttctaaattgccttcccactaaaactgttcgcgcctcttgtccctttgctgccctgtacaacacacctcccacatatgagcagcttcgagtttttggatgtgcttgctatccgaacctcgctgccaccgcaaccgcaccacataagcttgctccccg

SEQ ID NO: 200929 - DNA, 506 bp, Zea Mays
tcagatttggtcagacatctcaatggatttcatcgaagccctaccaaaggtatatggcaaatcagtcattcttacagtcatcgattgattctccaaatatgctcacttcattccattgagtcatccatatacagcaaccacagtagcaagggcattctttgatgagattgtccgactacatgagttcccaagctctatagtcagtgaccgagacccagtgttcacgggacacatttggacggaccttttcaagctagctggcgtcaaactaaggatgagcacagcctttcatccacagactgatgggcaatccaaagtggtcaataaaactatcgccatgtacctgcgctgcatcacaggggattgtccgagggcctgggctgactggattgcttgggctgaatactgctacaatacctcttatcactcagccctgaagacaaccccgtttaaagtggtctatggcagagacccccctccactcatcccatacgaacaaggagcag

SEQ ID NO: 200930 - DNA, 364 bp, Zea Mays
aaaactcaatcctttggatttccacccaagggaccaagcttcactagaccagctagacccaccccgtcacgtttcagtcagcacagtcatagctcctatcatgccccctcagttgcaagcaaccaacccccggcgaatgcgtgttggcactgtggggatccaagtcacttcaagaacaactgtccccagctgaagccatcaggacctgcttactccaactcggtgaatggccccaagaatacctcagcatccgcccccaaggcgccctcctccatcaaccagcagaacaagacccagtatcaaggaagggcatgagtaaatcacatcgatgctcaggaggctcagcaagctccgagagtagtgc

SEQ ID NO: 200931 - DNA, 1793 bp, Zea Mays
atgatattgtggatgacacttactctgaaggtgggattgccctattccggattcagggttcaggatcagaaaacatgcaagcacttcaggtagatccggtaagtttgtggtcatactttggtttgtcaagatatttgtgagaacattggtataatcttcataaatgagcttcttaatcttgctcatctttttgttagctggcttcgtccttaaactcgtcctattgttacattctacataatggaaacacagtgttcacatggattggcaatgttacgacctcattggatcatgacttggttgagagacaactagatgtaattaaggtatgaatattctttctcataggggtgaatatattcatacttatgcagatttcctcatgattaacacattagtaatttggtatcgatgtaaaattttgactaaaactctctgcaaaggttgtccatgtttctaataaaaaatagtctccgttatacacgaagcaatgctcaacaacacttttgttctttcacatattagtatgtgctctaatggcttaacaaagcagaagacatacatgtgagagttaatgatttgatttctatgtttgatgatataagtctgatagttaccgatggctactagtattgggccaacatattcttggtcttgttgtaatttatatttttcttagtaattaagtaaaagaaaattagccaagcacatggatggagtgcaaatctacatgactgatgtttacttggtttagtttttttgttacaaatgtgtattatattgtagatgtatatcctattgagagcctttactatgttctagttgtgctacatattggtgcacttgtgttagttagattgtatgatggcaaaaaatgaataggtgttcctctggactcagatttagtataactaaagattggatgtttgtaccttgttataatatcactattgatgctgaatcaaccaacacagtggtagggctagattgcctaaggctgcacatggcctagatatgtaaccaagttaggtctaaacggcaaggttgatcagcatgtcgacgagactgatttaatactagttattcgtctaaaaaacccatgaacgccacctataaaacccattgggaagacatgcatgactggggtcccaacgaatctcatcgagtgacgcttgacaacaaggggttagaagaggtaataagtagtaggttgatttccaatcgattgtgtagttggatacctaaatcgtccatgatcttgcaatatatataaaggggtggtcgtaggaaatctcccaatacataatctacaagttttccacgagaacatagaattttggatcggaattatgagaactggacttgaacagggaacatcagaacttccaacgccaactcctgacacccgagagcctcgcaagttagaacatctaacatcttagcctcccaagtggatgtacctcctctgagcctttttgctatcaacagtcaccctccttgtcataattggctcgtatgcttttttatcataatggtaggagctctgcctttcacttaagaagaaataaaatttcatttcacttgtatgttattcatccattttctacatatttgaattcaatatgcttttcctttaccttaacttttctttgtgcttctattttttattgtacagccagaattgccttccaggtcactaaaggaggggagagaaaccgaccaattttgggaagtactgggcggtaaatccaagtatccaaaccaaaaagttgaaagagaaaatgaaaatgacc

SEQ ID NO: 200932 - DNA, 338 bp, Zea Mays
aaagaaaatgaaaaataaaaagaaaaacacaaagaaaatggaaaagcacgcgcgacccactcccctaacttttcacccatgcggcccatgttctcaccgcgtgcacacacctcagaggagcgccgacgtcggggacccactggccagctgctcgccatcacacctgcgcgtgttgccccactgactagtggccccctcccgtcagatcttcccctcgcaacgaactcaccgagcttggcggtggcgcgcgaatgccgcaagagttgttgcgacgccctggcccagtccatgcctatttacatggccacgatcccagtgccgtcctagtctcctccttg

SEQ ID NO: 200933 - DNA, 532 bp, Zea Mays
gaggaccggtctgtgcaagactggttggctgataggactgaattctctagtctgctcaaggaacaattggccagagcacagaatagaatgaaacagctggctgacaaaggaaggattcacagggagtttcagataggtgaaaaagtgttgttgaagcttcaaccttatgctcagcagactgtggtgaatcgaccatgtcccaaactagctttcaagttttttggaccatacacagttgtcgctcgcgttgggccagttgcttataaactggggttacctgcagatgcccaagttcacccggtgttccacgtttctcagctcaagccttttcatcccaattatacaccggtattcacacatctgcccaggttggctgatctctctaaaacaggggtagttcctattgcagtcctggatcgtcgtttggtgcgcaaaggcagtcaggctgttccacaagttttgattcaatggtcagacattccaaaggaagctgctacctgggaagactattatgtggtaaagaacaggttcc

SEQ ID NO: 200934 - DNA, 3157 bp, Zea Mays
ctacaaggttcccaacactaaggatctaaagttggatggatatcaagatgtgctttgcagctatattagcaatcctcatactgcatttgtccggagatatgcaaggaggctcttccttcatttatgtggcagcaagactcactattacagtgtgagggattcgtggcaatgttcccatgaagttaagaaacttaataagatcataaacaagtctgggggtttcagaaatcctgtgccttacgagagaagtgtcaagctcataaaatgtttatctactctttgtgatgtggctacggcaagaccaaaaaattggcaaaagttctgtttgaagcacatggatcttcttccatttctcatggacaatgtttatcatttcagtgaagagtgtgttattcagactctcaagcttctaaatctggctttctattcaggaaaagatgctaatcataatgcacaaaaagcagagactactgatctaggaggttctacgaggactagctcacagtctccagatatgaaaaagaaccggaaggctgatgatggttctgaaggttcctcagaaaagtcgtgcatggacatggaacaggttgtagagatgttcagtgataaggaaggtgacatgttgaaaaactttatcaacatattcttactagaatggaactcagcaggtgtccgtcatgaggctaaatgtgttctatttggagtgtggtaccatgcaaaaaaccgacttagggagacaatgctatcgattctgctacagaaggtaatacatcttcctttatatggacaaaacattgttgagtacactgacctcatcacctgtttacttgggaaagtgaacgacttcagtgcaaagcagaatcactctgaacttgtgaataaatgtttgacatctgaggtcataagctgcatctttgacacactccattctcagaatgagctattggcaaatcatccaaattcacgtatatacaacacattgagttgcttagtggagtttgatggctattacttagagagtgagccttgtgttacctgcagctgccctgatgttccgtattcaaggacgaagcttgaaaccctcaagtctgagacaaaatttactgacaacagaattataataaaatgcactggaagctttactatacagtcagttacaatgaacgtttatgatgctcgtaagtctaaatcggtcaaagtacttaacctgtattacaacaacaggcctgtgactgacttatcagaattgaagaataattggactctttggaagcgtgctaagagctgccatcttacatttaatcagacagaattgaaggttgaatttcccattccgattacagcatgcaatttcatgattgaacttgattcattttatgagaatcttcaagcttcttcccttgagtcactgcaatgcccacggtgtagcaggtctgtcactgataaacatggcatatgtagtaattgccatgaaaatgcatatcagtgccggcagtgtagaaatattaactatgaaaatcttgactcttttctctgcaatgagtgtggatacagcaaatatggtcgttttgaattccacttcatggcaaaacctagtttttcatttgacaacatggaaaatgatgatgacatgagaaaaggattggcagcaatagagtcagagtcagaaaatgctcataggcggtaccagcaactgatgggatttaaaaagcctctcatcaaacttgtgtcaagcataggtgaacaggaggtagactcgcagcagaaggatgctgtccagcagatgatggtgtccttgcctgggcccacatgcaaggtaaatcgcaagattgcacttcttggtgttctatatggtgaaaaatgcaaagccgcttttgattctgtgagcaaaagtgttcagacattgcaagggctccgccgtgttttaatgacatatctacaccaaaaaagttctagtgacaccaatgcattaccagcattttcaataccaaggtctccaaatagttgttatgggtgtagcaccacgtttgttacacaatgcttagagttattacaagtgctttcaaaacatgaaaactgcaggaagcagcttataagtgctggagttttgtcagagttatttgaaaacaacattcatcagggccctaggacagcacgcactcttgctagggctgtgctatcttcgttttctgaaagtgatgaagatgcagttcatgaattgaacaacttgattcagaagaaagtgatgtattgccttgagcaccatcgttccatggacattgcacaatcaacacgagaagacttactgctgctatcagagacttgtgctcttgtggatgagttttgggaggcacgattacgtgtcacctttcaactgttgttctcttctattaaggttggagcaaaacatcctgcaatttcggaacatattattcttccttgtttgaggataatttctcaggcttgcacgcctccaaaatctgattgtggggacaaagagtcaggtttgggagtatctagcttgacgttgcactctaagaatgatgatacaactggtaacacagcatctaataaccccaatactaagattcagtcagatatatctggaaaaatttatgatggaagtcgaagagaccaggatattccacttttgagctattctgaatgggagggcggtgcgtcatatttagatttcgtccggaggcagtacaaagtatcccaggcagtgaaaggatctgctcagaagacacgccatgattcatataagtctgactatctggttctcaaatatggactcagatggaagcgtcgtgcatgtttgaagtcaagtaagagtgacttctcaaaatttgccttgggctactgggtatcagacttgatcttgagttcgtgttcccagtcaataagatctgagatttgcactctcataagcttgctatgcccatctaactctcctagacaatttcagttattgaacttgctcatgtcactacttcctcgaacactctcagctggtgaaagtgcagcagagtactttgagttactagggacaatgattgattcagagtcttctcgtctattcctaactgttcgtggttgtttgacaacattatgttctttgataacaaaagaagtgtccaatgttgaatcacaggag

SEQ ID NO: 200935 - DNA, 323 bp, Zea Mays
ttgcggatcggtctcggggggcctcgaagaaatggaggactggcacgaccggctgctcgtggggcgtgatcaccaggagctcgactaggctgaggacgccgggtgcggcatgcgcgctgtgggcgcagacgagcatgcgcagctctttctctgcgctcaacgattccatggcttggtgccttgtcttgtactcttccttttccctcctcagaaccgcggcggcggccagcccggtgatgatggtgctgataaggttgccgatgatcatcgcgtacagcgcctgctccgcccacacctgcatcggccgaccacagcgatcagat

SEQ ID NO: 200936 - DNA, 301 bp, Zea Mays
ggaagatttggtactgtatataaaggaattctacatgatgacagtaatacagaaactgtagcagtaaaggtactcgatcttaagcaacaaggagctagtaggaccttctttactgagtgtgatgccctcaaaagaattaaacatcgtaaactggtcaaggttataactgtgtgcgacagcttggataacaacggtgatgaattcaaggcgcttgtgctggaattcattcccaatggaaccttggatgaatggttgcacccaagtgcacttgtcaccaacagagcaactgggagtctaagca

SEQ ID NO: 200937 - DNA, 375 bp, Zea Mays
gctgggctttctaaagctacaatcgagatcccaaattctcatcaaaaccaaatcatcccctagggcgagatcaaaccaatggtatggcgcagaggcagagggcaattagaaacaacgagggcagtaatttacctgtggttggttgagagaagaggctggcctgaggtgcgcatgccgctcttgctggtcgccgcctctgcctcaacacacacatgagatacgtgcgtacctgggattcgatatggatgtttgccatctcaatatagtaccatctagaacttctagttactgtcttgatactctggtttctgcttcattgtctctgggtgtccagtctagcacctaggttaaaactaaatagaaattagatgagtt

SEQ ID NO: 200938 - DNA, 330 bp, Zea Mays
gcaatgaggcctccggcccagatcaaggacgtccagaagcttacagggtcactggctgagagggcgctacccttcttcaagctcttacggaagtctggcccattcacttggaccgaggaggcagaacgggcctttcaagagctgaaacagcaccttgtgtccctaccaatactggtagctctagagctaggggagccattgtacttatacattgcagcggctatagaggcgatgagcatggtgctggtcattgaaaggatggcacaacatccctaggggggtcaaaaattcccctagaagaaggtggtggtacgaccaccatgatgctga

SEQ ID NO: 200939 - DNA, 624 bp, Zea Mays
gtcaagtgaggagcaagtagacggttcttgtcctgcatcggaaagccgggagcaacctgttcctttcaaggtggttatactcggaccatggcatgatgtgccaaatagcatcctaagatcaaggcctccttcaaactactcacagtccatgcaaggatcagatctatatgttggaaatgtggatgtattggatctttctaaggagcagttggactcgaggttaaaacctgaagaacaaggagcggaggatggcttatttgcctcagtggaatatgttgagcaaacacatcccaattttactgaggagaaagtagatggttctattcctacaccagcaagttcggagcaacctgatcagttggaggtggttagaccatgggatgatgcgccgaatagtaccctaaggtcaaagcctccatcaaactactcacagccaatgcaaggatcagatctagatgttaggaatatggatgccttggatccatctaaggagtggttggactcaaggttattgtcaaatacggtagagccatcaagttcctcaaatggaggaggcacatctgttgagaaagacaacattgaaaaaacagaacgcttgtcaggcattgacaccgtcacccctgg

SEQ ID NO: 200940 - DNA, 294 bp, Zea Mays
cttccattgtgagacgtgaagctaagccggcggcggcggattccttcgtacccaattcgtctacgctatgttaggtttccttcatttgattttgctttctcgtttgtcgctgtcattcgcccttctttcttgcctctcgttgcgtaatccttggagcagtgatgagatcttttcagtaatgatctttgagacgtgattatcgatctctatattgctacgttcttgctgagctcctagcgccaggcgcacatgcttttagttctatttgggttcagggtttaatctggttttcag

SEQ ID NO: 200941 - DNA, 756 bp, Zea Mays
atagcgtcactgctgagcttaagatttcagattgagcaggtatatgcatagtgtcgctctttttcatactaaaaaagggactggggaagggatacactgatgcaacccttccccactaatgcggagagtctgagattggtcaaggaggttgcttgtttttttttttgtgggaacgacacttaggagttcacttgctcccactataacattatatatgtaccagacatttgcatataataattgtttcctttaactgcagtttacttaattatactgaccttctcatatggcgttggatccgtgatgcctcctccattcctgaagctatttggaattcattgcctgaatcagtgttctgaagtgctatctaacagtcagaaatggatggatccgagcttgaaaatcctacttctagaagctcatcccagaaatctagccgacgttcgagtagtaggcgttctcaaaagtcagctggacagcattctttgaccggtgctcaagagaaaagaagcaaatcgaaatcttcaaggcagaaacacttggttattgacgacaaagaggctaaaaaagggaaaaaacatgaccacaaaattgacgtggcagatgagaggtccaattttctaggttatgaagtgtatgctggaaagctgattcttcaaaagaaaaatagaagtgcgagtgataataatcagttaccgtcaaacggaaaagctgatgcaattgatgctagactcacaagtaaagctctgatctggg

SEQ ID NO: 200942 - DNA, 339 bp, Zea Mays
ctactacatactattgctttagtatgtgcgtgtgttgctagtacgtagatttgctttgtatttttctcaaaattagtgtaaccgaaacatgtaataacagtgaggctatttggttggctaatattggaatgctattttctccaggtttgtctagtgatgatgttgacaataattgcaatgcagaaggggaagacgcagtgttgggttcaaatccctcatgtcctaatagtttggatggcgaaggagcaagtcttgagagcactgcgggtggtgacaacaagagaatgagaaccagagcatcgacatatgaggtttggaaagatctaaagcctctattca

SEQ ID NO: 200943 - DNA, 360 bp, Zea Mays
cagcaccagctccttgctgccacgcgaggaagaaggcctcgaccggctagggctttggtcagcgacgacgcgaagagtttggcgcagtggcgggcgcagtgctcggcaaggtggtgtggcctaggtccagtagcgcatgtcgacgagcaggccggcgcgacggagctcgcagcggcgtccatggatgaaagcaatgtgcgactaggcagtgtggcgagaacaaggcgaggcgtggagaagagagagagggacaggtctagcgtcttagagagaagagggggagttgtccaaccgcctgcgcgacgtgggcgcatgcgtcgcggagaagaccggtgcagacagacgattattctttggaga

SEQ ID NO: 200944 - DNA, 851 bp, Zea Mays
cacttatgtctcctggcttctagcaaccttagttgcaatacgagatgtctgcaagcttgttgtcaaagagttaacaagttgggtatgtttcattgttatattcaaccttagtattccatgttatcttctttattgtggtatagttgttaacattaatttttctcacgttgagacaagctgagttacttaattatgttttgattttgtgtcgttccatttccattttatatttttatactgtgcacacattctatggctgatgttgaaatttgatagttcataggtttctttttattagagtgaagctttttttgggtcttcgacacttcaaattttgtttgagtattgcttctttatgtttgtatgtttaattgtgtgatcagcacatcaacaatataaaacactagcaccaaatattaacctttgagctatgatttggtgcgagtgcgaggtctaaatatggaactcatactctagtctgtacctttttgtttcaattatagactatagtaccgtttcattttcctttttgatgaagttgattagcttgatgttgccctaatttggtttgattcttttgtttcttagttcatcatgagggatttggaagcgaactaagttcctttatttgttaattgttatccttttttcaggtaatatattcagatgaagagaagaagtttaacattgatatcatttttggccttattcgttcggagttgctgaatattggggagtacaatgttcatttggcaaagttaattgatgggggaagaaatagtatgttgagatacaaaatattccctttcatatctatttttttatacttgtgcacatttatcaatagaaac

SEQ ID NO: 200945 - DNA, 873 bp, Zea Mays
gtgaacctggagcacaaccacgcgctcaacccatccgccgcacgcttcctcaggtgctacaagacgctgcctagcgggttgagcaaagatctcgtggtgagggctgccagaggggaatgctcggtggcgggtgacatcgatgtcccgatatttgatgaatgggggcggcttaagaccgggcaagctgatgtcctggccatcaacgctttcttcacccagatgcaggcaaagcttccaaactccttctatgtcatggacttctatgtggagggccatctgaggagtgttctctgggctgattccagatccagggcagcgtatcagtatttcagcgacgctgtttggattgatacggcatgcttaaggaacaagtatcatgtcccgcttgtttcgtttctgggtgtcaatcatcatggtcagcttgtattgctaggctgtggattgctgtcagatgagagcacagagagcttcttgtggctgttcaagtcatggttaacttgtatgaagggacagcctccaaatgccatagttaccgatgaatgtgtggcgataaaagccgcagttcgagaagtgtttccgaagacacgccatagaataagtgattggcatgtagtgagaagtatttcagaaaaaataggtgacttgccagaatatgaagcgatgagaaccaatttggttactgtaatatatgattctttaaacgacaatgagtttgaggcaaggtggaagaactggattgatagatttagccttcaggataatgaatggatcacctttctgtatgagaatcggcacttgtgggcccctgccttccttagggacactttctcagctgggctctgtactgttagccagcgtgaaagtccaagtaca

SEQ ID NO: 200946 - DNA, 286 bp, Zea Mays
ctttcatacaatatacatgctactgagttttgtaagtaatgttgagtctgatttgtcacatggagagcataaaattcaaaagcatggtgacgaaaagggaagcagattgactaccagcacaaccatgtcctcaagtggaagtctaaaagttcagatatccctagcacaggcaagaattgtcctgtgctttccatctgagttttcatgggatttgagccacccatctgtcctggataagttcctggtgatcgaccatacttcatgtctgaacatggtagaaactgca

SEQ ID NO: 200947 - DNA, 352 bp, Zea Mays
cacatttttaaggaccttcgaaagaggaaggcccccaacagcccccacagaacaatccctctacaagcaatagataaaagaaagcctttggggttactacaagttcctgttgctcaagtcacaattaccatcagtcaaagaccatgtcacaatttactagggacccactcaactcactccaagagctctataagctcttcaaaaaagtttgcacgttctaagaagttgcattacaaaaagctataaacacaacggaagccaaaagacacaccacaccaggagccgaccctaggccaaaaatcagcacaacaagatcgacaacaaccccaagtaaataacatcaccaattagt

SEQ ID NO: 200948 - DNA, 478 bp, Zea Mays
gagaagctaagcacaagaagataacagtcgataggatgacaaaagaacgaatagctacctggaaatctcacacgagagggagagaatccaggcaggacaggagacgactcacgggcaggcaaggtcactgaaatgacagaagatgtgagcacgtattagtcacatagtcataagtatatgaaatgtgaataaatacatatacagagtgttatggcacagaaatcgagagatatggcgatcgagaggtcaaacgacgcgtttgaacgtgaaatagtgccataggaggtttgaaattgaaaatgaggcatgaaatgatttggaattgagccgatacttcacgaataggtttatatgggtaaatatgagtgaagtgtgcgcttggtttgatttgaggcgaagaaaatagaatttggacactcgactcggaatcgatcgctagaaacggggatttgtgtacaattgaagcctgggatatcag

SEQ ID NO: 200949 - DNA, 397 bp, Zea Mays
gggaaacctgggtcgggtcctagccccacggcagataccataccaagaggagctccgcaactctcccctagctgggaaggacccatcaaggaaacgagagtacaccgacccatggggaaccatctagctacgactggaggagtaccttaccctgatgccaaatatctctgtaagttctatccatagagcaagactaaggggtcgagtctgtttccttcttttctgtaactagataacgcatacgtgtacgacaacccgatgggtctgcccccatgaacccggactattggtctgcacacatgcacgacaagttatgaagaagaaactacccccctcagccgtgctcttgtgatagttccatcttgctgttccatgatcctaccttgcaatctttcag

SEQ ID NO: 200950 - DNA, 320 bp, Zea Mays
gtggctctacggcggacattggcggcggcgagaaattccccctgctccgagcaccgcaagcgcctggatagaccacaagaaccttcaagggggttcggccgagagcactggttggctaggtgagacccggtggtcgcgcgttggttttatgcatgggaacaagggagtccgagctggatcgtttcaaccacctgacgacttcggcgaggcagttttcatgtccgtgcaactccagggtggaagaagagtccgaccagtgggggccactggccagagaccgcgtgcaagtgatgagagagctgaccaacgggacccacatg

SEQ ID NO: 200951 - DNA, 441 bp, Zea Mays
agacaacttacctgattggctgcgactgctttcagaaacccctctctcatgctgaatgcaggtaattgctccctaaaagattgcattgatctagcacttgttgtcgtctgaaataaaaaaatggatggtgggatccctgaagaattcttaccgatactttttaagaagggaaatggagggggcatggtcactgacattaccttccttgaattctgcaactccctaagctgggaactgagcttttctttatcaattggtgctgctggttcaactacagacgaggatgcgccagggaaaatttgtctcgttgagacagaagatgtgcttgcataattgttgttccactttgacctggacaaaaggtcttcaactcgcgcctttgtctgattagacatcttaatctgccctagtaaaaatataagcattgatcaagaagaggac

SEQ ID NO: 200952 - DNA, 837 bp, Zea Mays
ttcatggtcatgcggttgtttggggacaagcaaccatttgtgggggtggaaaggatatatggcaacacaggttaaagtcgtgttttaaaatggaaatgcatgctacagtcctgggtgtcaatgatgtattgcagcatatcagtgcttgttctctattcctgcagcttggtcgcagaaaactatatagggtggtgatgacttctgttctaaggcccagagatttgctgctgaagagctatacaacattcttgaccaagtcgatgaactattgttgcttcctgaccaaaagctcgggagaccatggtgtgacactgatctaatatgtgaaccgattctgtcttggagactcaatggtggcagcccaagcaaatgtttgttgcaactcaagacatacatagtcagacagtgggatccaggaatttctgggatctttagtcatcgagatacaattcaaggtcatgcggttgcttggggacaagcaacattttgtgagggtggaaatgtaacatccatgaatagcaacatgtccagggctttagctgacaagcgggccacccacccatgggacccaggtggaagaccagatgctgggtataagttccaagagtctgtatgggggaaggcaagaaagaaaatacaaaaaaatagtcgtcttcttcctcgtgaaggacggtctaggtgagattgtcctcttgtcgagatcctcacgtcccggtcctcaccacgggtggccacggggtgtgacatgatactaggagatgtaacggagcaaagaattctgagaggagccaaagatgaggataagggatactgaagatcctcgtcgagctggacaag

SEQ ID NO: 200953 - DNA, 395 bp, Zea Mays
cgaatcaccaaaactcacaaaagggatgaatgcactttcaccagtggtcttcccaaacatggtcgcgatggtggtccctaggaggcgactgacggcgtgggtcgcgcatcctctcctgagccaatcggtctggtgctgggctatttgtataggatgttgttgactctgtccttgtcgcgcggatacatgctggagcgtcgtgatcctgatcatattatttttgccaccttatctcactctcatgccagcgatcttgtgaagcattgatgttgctccacgcgtctcgccgacttttgatgaagtggcacatgtatgggtccggatgagtgggggagaagatggttcgccgcttgtgtaaggatctgtcggtagccttccgcgtctagggtacgggg

SEQ ID NO: 200954 - DNA, 385 bp, Zea Mays
acatgcagcagcggaacctgagctatcagaaggtaatcagatttaatgaggacagtggaatccggtgggggatcttgtctcctgggctggaagagatggctgaagacaggcaagacaaccctgatgtcgtcaatcctacacttgagaaggtgaagcagctgaaggtttactctcgtcaaaggctcaagaatgtcttgacattggagggggctggagatcccaatcctgccactgtgcttccaccctccccctcagacgtggcagctgtcgacatggttccatctgaggctcttgtcttagatgttgacgatgtgctggcaactccgtctgaagatggcctcccattgtcactttctctacttgagcctggaacgctaccttcctc

SEQ ID NO: 200955 - DNA, 349 bp, Zea Mays
aacgcgagcaagcagcagcagtggctgcaacgacagcggcgagggcagcatggctggtggcggcggaactgacagcaacgagagcgggagtagaagcaatggaggcgaatgctgcacgtgcggcagcgacagagctcgaggctctggcgacggcggccgggtcaacggagatcacagcctctacaggcggcgagactctccctcctcgaatcagtacgatggtcatcgcggggtccaggctgttgttagggacatcggtcccggtggtgggtggtctaccctcaccaagactaactacgtcgagtgggccgcagtgatgagggtacgactccaggttcgccacatgtgg

SEQ ID NO: 200956 - DNA, 310 bp, Zea Mays
tcagagccggcttgctaagttttcttcttgattggttttcggtagaggaaagggatgatacagttattgcaatcacagagttaatacaaatacttggtgcacacagtatatgtggcaaggacatcaggaaaatctttgcccttttgcgctgtgagaagattggtgccaaacacaagcacacatctttgcttctgacaagtctcagtcacatgctgaaggaaaaggggccagaagctttctttgagttcagtggccatgattctgtgcgtgttgtcctatttatttagcaatttaaaatgtcatctgttgt

SEQ ID NO: 200957 - DNA, 387 bp, Zea Mays
ttcttcaccaagcggcatgtatacccgtgtttgtgaacgatttgtgcttgccgcccgccgcttgtgatgcgatccggtactttttggtgaatattgcggagtgctatgcgtacaaagaaacatcacacggagagcacaatggagccacattcagttatattttacatagcttcttttaaagggtaaagggtagatggatgataattctgcatgtttttgttctgctctttatgttacattcaacgacttctccatacttcacgcttgtatttgttgggggacaaacagtaggtggctacttttgcctctcttttcttattttcttgcttcttggctgcaataccagtctccctctacctatccaactccatgtttaagaaagtattg

SEQ ID NO: 200958 - DNA, 330 bp, Zea Mays
cggggggtaattaagggcgtgggcctcgtagatctggatcgacccgtggcttggattcagtctgcgcgccagactaagaggatcggtggaagcgcgggtgcgatctgcggtgcctcgtggatcatgcctggattcgacggggtttggtagctggtctttgaatcggatcgcagtgctgaatttcccgcgtttccgcgagtagccttagtccgttgtcttgtatgtttcgagtttcttcgggttcaattcgtgtgctgaattttctgttgcagtattctgataggattgactctctaacatgttattggaacggatggactgtgtccatta

SEQ ID NO: 200959 - DNA, 365 bp, Zea Mays
cagaagaccaccaggagtaccaataatagttattgaagagccctgaatcaatccacatggaagttttaaagcaaacctatcccctaatcttgtggcattcatccgtcggacagaataagggcattgctttcctttgtccttctgctgaatgctgccattaacagaaacaactgaatcatcatatgcaagggctgtattgagttccctccatgcaactccagcttccttgattgcctctactccatctggtaggatatgggcatgcgttaaaaggtgtttcaaatgattccaagaatgtaaagattgaagttctgtatcagagagatttctggtaatggaaaggttggatgccaagagtctggttg

SEQ ID NO: 200960 - DNA, 593 bp, Zea Mays
gttgctgggtcgactgctatactcggttgcaggcatcttctcgtttctaacgctggccacctctcgcgtactgttgccgagcaaaccctcttgccctcaccttctcgatctcatcagttcggtggtctctcgttgttgccctcgtctctcttgcaaatggccaacttcccggtggatcctcgtcccttcctcccgccggagatcgtcattgaaaatgctcagcctgctagtggctaccagcctccctctgcccccctttgcctttcgaacctattggctcattttggcatgatcaggaggttttaaaggaaaagcaagtgatctccaaagtctacaaaaggcaggcgcctaagaagattgagcacattgacaagaagactaggtctgtgcgtaagaaggctgctcaacaatctcaccctcttccagccagaagaagtgcaaggatcaatgctgtaacaaagggactcaaggtctccttcgagcttggctcgacctctgggtcccgggaggtacccactcagcatctgcctctttcgttggaagatttgaatgatctcaattcttttcctgggccggttaaattaaaattcttg

SEQ ID NO: 200961 - DNA, 356 bp, Zea Mays
ggaaaggtccacatgtagtgagaggagtcatccaagatgactatatagtattgttaacgggacatgctcggtatcagggatgtccaaaggacacaatggacgagatcaaaggagtgagcagttcggggcatggaagaggggaagggtaagcgggtgtggcgcccaagctgacaagcatggcaaggtgagttagggttgccacggggacaacggatggccgaggtgcctgagagtctggagaggacctcggggttgccaagacgatagtgccaagtggaggtagaggcagtgacgacgagggcgtagggtgtgccaacatgggcggtggggcgcggaagtgaataggatataggggg

SEQ ID NO: 200962 - DNA, 347 bp, Zea Mays
gtttttaggaatgtgtgctcgtgactagggaacaaatcgattttttctcgaccattgctaatggtcgttagtagatcttgtgctcatgcatgtaaggttgttcacagcagatcatgtaaaatgaggatttacattgtagattatacttatttgcagagtgaggattgaaatgagggatgagacagatgatgagttaggatagctgctcgagacagtctaaatatgggagagtgcattagctagtaaatatgttagtttggactaataatattctaccatacaaaatcaaatgaccttagagtacatcatacaacatagtaaatattggtgatttacttatgttcgta

SEQ ID NO: 200963 - DNA, 291 bp, Zea Mays
aaaggactcaccggtaatccccttcaccaggagttccagctcctcccaggatagatcggtacctagcctgcgctggatcctaccgatatcattcgggccggtgaaccagcagcacaggcgcgacctcctctgcagcggcatgacctggcgcttcaagaaatcatcgaccacatgcatggaggtcaggccaccggttgccaaggtctcgatccgatccagcacgggcaagagctctggcgatagcaacagctgggtcctcaagagcttgcgatcgaggtttggcccgttgct

SEQ ID NO: 200964 - DNA, 379 bp, Zea Mays
atgtgataaggcctgtcaaactaaaaggcacagagccagcatttattgactatgttgctgtcaacgggacaggttcaaaatgtggcctgcagaaggtaagctaacattcaagtaaccttcagtagattttgaattggctaaaaactagcagagtattgtggatcctctatttcttaaaatcacataacatccttgtattttatatcttgaactcatcgcatttcgtgcagtgagttttaaaagtactagtatttctgatgccaacagttatgaatttgttattgtgatctcgtcatgtgtttcactacttgatctttttgcaggcgaacattcgtctgcgtcgtgtaagaaaccctataatcggtgacaagttcagcag

SEQ ID NO: 200965 - DNA, 1953 bp, Zea Mays
caaatatgtcgtcattatgtttgttctattcactcctttgtaccacacgtgatgttgtatgtacaataattttgtattgcatggtttgaacattcttttgatacaacatcagccgagggttcttcgtcaacattcagcatgtcactatctatgaaggatttggacacggccttccatggagctggacaaaaggagtatcctttttcattggcttccctatactatgtgctttttcagggtctaacatctttatatcatcgagacgcattgcgagaacataggatggctctcttaacctaaacaggtttggatgataatttgtgaactgattccaacagtaaacatgccatgcttaccataaagcacctaatttgtgtgtctgcatgttaatctgagaaacatacacaagttgcatattgtttgtcagttaaactgtcaaataacatttaggggggtgtttggttcctttactcacccttctaaagtctttagtccctagaaatcttatttgaaagacctattttagtcaccccgattggtattttaaagactaaaagtgaataaactttagtcgctaaagtttaagaggtgggaaccaaacaccctctttgtcttctcagtgctctcatgtagtgattgttgtccggactcttgcagcatatcttattttctgtgataggctgctaaagtttgacatgaattcatgacttggtgagatgactctcaccatattaggtatgttcttcttattctgcataacatagtaaaacttttatttaatgtaactgtaaaaatgtctattgtcatgtcgcaaatatttagctttagattaaattaaaagttcagatatcatgcagacttcctatcccacctcctataatataggaaataaaataatttggtagaataatctgaaatagtataaagtaatcatttatttgatactaccactatatgctaattaggatatatatatatataaaataaatcgttgttggaccaagctacgagccacctcgcgagccgcagtgaacaaagaaacaagctagacttgggcttgttttcagcccgagccactccgagctatgtcacgagctaattttccacccctaattgtgctccttaatttagttatagcggtttgatggtatggcgtattgagaattttaagccagttcctgtgccaacatcattacatggaaaattttatatgggtgattcatatatcatcttgaaggtatggatttactgatacacttttcacgaacatcttttatttaggaaaattgttggtgcatcttaattgaagggtaaaatagttggtcctgcttgaagcaaaagcttagaggcgctgagaaatatgtgacaaatgttttctctaattttttatatttctcatcttgtatcatttagtttaacccttaatggtgcatgatacactttactgtctaatgtccataaagttctcatcatgatagtacattctatttatgattgatcttagtattgccttattttttctgcactgaatattgtttcctgcagacaacagctttaaaaaatggttcctttcgccatgacatccattattggcttggtaaagacactagtcaggtagatttttaaaccatttgacattgcatcactttattttgctcttcaggtatgatatacaactattttttgttaactaacaactttctaaaaatgtccattcttttccttggtaggatgaggctggaactgctgcaattttaactgtggagcttgatgctgcgcttggaggacgtgctgtccagtaccgggaatcacaaggcaatgaaactgaaaggtttctctcatattttaggccttgcatcatgccacaatcaggaggggtagtttctgggttcaaccatgtagaagtcaatgatcagaagcatgttacccgattatatgtgtgccgaggaaaac

SEQ ID NO: 200966 - DNA, 649 bp, Zea Mays
tgaattgatcactgtaggacaaaggagccaacatggaatgaagatttcacgtttaacattagaaaatctcgtgaaaatcttctgcaggtatcaagaagttataacttcatgccccccccccaccccattctagccccccttttcatttattcaagggacgttccggttattctatactatctgtcttgttaaacacctctccctataggcccattaatcttcctcttatcttggcaaagaaactgctgcatactttaagtaatattagactcactttaggtattataaatttgttttggaagttggatggatcaactccagtgaagcttaaactgagttggaaacatttatggcaaagatcgtaacaagcggaaatacatatatatagctttcaggatggcatagtacatggtcaagactatttctatttatgcaacttaaaggaatagatatgaaatagcaagcgatagtaaacaaatacatgattttgttcttcttttaattttcgttttaatcatgtactttgctatatcttggttttactttgaatgatttctgtggcttttggcatctggtgccatgtcgctcaataggttgcagcttgggatgcaaaccttgttaccccacacaaacgcatgggaaatgctgg

SEQ ID NO: 200967 - DNA, 572 bp, Zea Mays
tgtcgcgcggattacgtgctgtgcagcaaggattgatccaatggtcgtcactctcaccgtcgctagccacctgggaagatctcgaagcacttcggcaacgtttcccattagcgcctgcttgggggcaagccggcgctcaaggcgggggcaatgtcagcactcaagacaatacacttcagacatctacgccttcagctactgatggagacatgggagcagaggaagtgcaggtttcaaggcctaagaggacggctaggcccagtagccgtgttacgggcccagaatgggtgcgctagaattgtatctcgctaagcccatgagcttctatatgtatcgttgtatccgaacgagacgagaacaagaaaagagaacactcatttaccaccatcttcttctctaagcttctctcctacctgtgcttccctgctcttccctctgcctccgtagcctctgctaacagtgatattggtggcattgatgcattaattttttacacttactctagtggcgtatctagtatattactttatagtgatgtttttgatatattatttatttttacgttacattat

SEQ ID NO: 200968 - DNA, 444 bp, Zea Mays
caaaagaagagtggcaacatgttcaatgctggctattttctgctgtctatgaagactgctttggcaactgaaattgaatgcatcacgttccaggctgccatgtgcagaattaggcatacactattgtctctgagaagcaaagcatctgccgagtttaacagtgcaacatccagcttcatacagacaaatgtcagcaacaaatcagatctcacccccaggtatgacatgagaaaaaaagaaattatgactgtaaggttatctagtgatattgatcatgaaatgtttgacagatccttaatggacaatgtgggagtttggaggcctgttgttacacctaaagggcctaaatctcttgagtctttgtctgctaacacattaactggtgcaagcccaagtctgtctatacaaagacaacctgttgtagatcttctctgtgccatgact

SEQ ID NO: 200969 - DNA, 279 bp, Zea Mays
ctccagcatggcttcacactgcttcacaagcttatacaggagatcagtggtgaagaaaggctgctgaagaactttctgaatgaagggcagccggatcagggctccagttctcttgtcatatttcttgagaatcttaaccaatcctgcaaatggcaacacggtaaaccataatgatgatgaaagatctaaatagctaaggtatcaagaaagtgatccatgagcataagtggtacagacaagctagaaggctgactatatactgaatccactgtagtcagt

SEQ ID NO: 200970 - DNA, 274 bp, Zea Mays
gttgaatctggccagagcgttctcaatcatgggcaatcccaccagatcaaacacatcggcctgcaaataaccaccaagattttgctgccacatgacggcaataccacgtggatgcagagtccgagggaaggtgactcgaggcgggagcaggctgtgagaaccgcggagaggtagcgggagtcggggacagacccctcctcctaggaagcggtggcgccggttgtggtggtcttgtgctcgtggagcacgcggagggatgacggcgggcgcgggg

SEQ ID NO: 200971 - DNA, 500 bp, Zea Mays
caaaaactaagacacaatatgtcgaaaaagactgcatcgacggtcttcggcattcgaccacaccgaagtcaccgcgaggggcagcgttgaccaccctcgcgtgcgacactccgcgcaaaagtctcctaagggtgcagccggaatggcacaataagtgcgcaaaatcgaagtcttttccaaaagactcttcgtgcaaaagtcgcctaagggtgcagccggactctccgtgccaaagtcgcctaagggtgcagccggaataataggtgtgcacaatcgaagtcgctcccaaaagactctccgtgcagaagtggcctatgggcacggctgtatcaacgaagtcgtgcagccttatcatacaaattatggttacatacacacagcgagagcatcacatattacattggctcaaccttcaggatgatacccatctccctgtagttgaacaacattatcctcaattcctcaccctcaaaaatatttcgcagctccccttcacccac

SEQ ID NO: 200972 - DNA, 442 bp, Zea Mays
gaaggcaggggcaaagaggatgccatcaatatcacttgtatgttcagcgatgagaacccaaacgcatgcagcatagcgtaagatccatgtgtttgcaatctgctcaaggaattcctttctgcatgattgatgccaaagaaggttgcatagctgctggctagtgccgagggggacagatcatcatgtaggctttagcctacgtacagcggctagtgtgtagctgctgtaataaggcttgggttgatgtaattaaaagggtgagaaaggtaacagaatgggaacaataagatgcttaacttgtgcacatagtcactgtgggagacgattttcctggcaatcgccacggttttcactacgcccttcatgcttctctagtcctgtctcagagaatctataaagttgtggtcctttgtgtgtttacaaggaagtggcacaggtgctc

SEQ ID NO: 200973 - DNA, 444 bp, Zea Mays
ctggagtggctgaggagcgcggccgccgcgctcgccatagtaacccagatttccgtctcgctgccggcgaacgcggtgctttactcgcctgacactaaggtgccgaggaccggggagctggccctgaggagggcgatccccgctaacccgaacatgaaggccatacaggtttgcctgctccttatgatttgcatgtaggtttgcttattcgattcttccgtctgggcgttgccttacattgctacatttggcaggaatcgctggaggatatttcgtacttgttgaggataccgcagaggaagccgtacggttccatggagggcgatgtgaagaagtccatgaaagtaaattgtctgtctccatggcatgttaatttttctggttgctcttcagagttgagagtaactatttcctggagctatctagactgatggcacatgtttg

SEQ ID NO: 200974 - DNA, 296 bp, Zea Mays
gtcagttacacctcctgcaccgttttctcctcgctcgccacgatacgcagagcacggtgaaatatccaagtcgccgtgagctgatctccaacccaaattccctggccgccgctcacgatcactataaattgagtgcacccgcggctccatagggtaatcacgcatctattgcaccaatccttgccccggattatccaccagggaccgagaattgctcacttcccccaatcacggtttccgccaccgtaaaacgcacctcgccgtggccagccacttccaggtttgttcatgctctc

SEQ ID NO: 200975 - DNA, 302 bp, Zea Mays
atggttgtcgtttgactcatactctctcaatgtttcttcgcaacgataacaaactttcttacctcaagcacgtactcgagttccattctctttaattcatacatccattttgatctttccatttcctggaaattagaaataaacataatatataaaatttggtgagattaattgaaaaagatcgagagaagaatatgatgtggagggggtgtatatagcagtctaacaactttgtagtgtcctgctataaaaaatatagcaaattgacaccaacatcaactttctctcttctccatgcaaaa

SEQ ID NO: 200976 - DNA, 414 bp, Zea Mays
gacgtttgggagccactcaatttccggatgcttggcatcccggtgcccaagcacaactcccagagcaagatcgtcttgacgaccaggatcgaggatgtgtgcgaccgcatggacgtccgccgcaagctcaagatggagtgccttccctgggagccctcgtgggagctcttccgtgagaaggttggcgaccacctgatgagcgctagccctgagatccggcaccaagcgcaggcgctggccatgaagtgcggcgggctgcccctcgctatcatcactgttggccgggcgatggccagcaagcgcactgcaaaagagtggaagcacgccatcactgtgctaaagattgccccatggcagctccttggcatggagtttgatgttcttgagcctctcaagaagagttatgataacctg

SEQ ID NO: 200977 - DNA, 450 bp, Zea Mays
attgcaactattggtcggagagcactgtcccttattggtgttgaacaagtggttatgaaaaatactaggtttaacagtggcggttcacatcgaggagagacatctgcgtcaaattttggaatggcacgatcttcttcctggcgtgatatgaagtctggtaagttataaccgctttacttacgatgtgcttggatgctggaacacttagcttcattgggtgtttagggaaagacaaggattttttaatcgagttttcctgtatttttcaggaagcatcttgatgaaatttatgacccctcctgttagcccccctcagcatgattatcttccaggattacgccgagtgtgttctatggagtttggacaacatcctataaatccccccaatggcttagctgatcgccttttaagctctgctgcaggtcccagtaatgcagaaccacttcccca

SEQ ID NO: 200978 - DNA, 496 bp, Zea Mays
gacaaatctaatgaaaactaggttttgatctatttttctgtcgacgcttcactgcttagtctactcttcacctgagccatttgattctcttccctagcgcaagcccagttgtggctcactcgcttcttcggtcatcgactgaccagtaagtcggtgacctaacccgcccgacgcagcgcaccttgccttctcatcactcatcagcttgtcgtctcgtcaggatcctatagacaacgttgatattttgactcctagtccgcactagcagatgggcaagttgttggtgggaccgtggcgtcacctgtccctcgctgactcattagagtcccatcgcgccgttgcaacacgacaatgggtgtcgcttgccgtcaccgtcatctatcgctaccttgcttcctgcactcgctcctcctagctgtcgtcgtctcaccaacaccatctcacgacaatttcgatgactcgccagaacgacgcgccgatgcggctgctccgccct

SEQ ID NO: 200979 - DNA, 663 bp, Zea Mays
ttgtggtctttatttcctcctgatttatttgccaaagccctcaacattctaggcaaggcaacagccactcctgaggataaaggttttagctggaatcagcgtggggagtgcccatcttttgagactgactgtgtcattactattgtacgtgcaaaactttgcttattaaattttatgtcttttagtgactagatttcaatcacttattgtttgcaaaatatcttacaggatgatatatataagtggctcatatccacatttttcttgtggtttgtccttgcgatatactttgacaacatacttccaaatgtaaacggcgttcggaagtcagttttctactttcttatgccttcatactggacgggtaaaggaggcaagatggaaggttagatattgaagtatttgatagctactcacattgtttccgctgtcgtatcttacactgcccattaatctttattccagagggaggcctctttagcttttttggttcaagccgtcctgcagatgatgctacccctactgacgaggatgtccttgcggagcaaaacctagtaaaggaacaagctgcaaacaatgcggtagatcctaatgttgcagttcaaatacatggtctacgtaagacatatccaggaactttcagcattggatgttgttgcaaat

SEQ ID NO: 200980 - DNA, 372 bp, Zea Mays
tagttgatgaggttcaccagggagatgaaatgcaggtcaagaggtggacatctctaagagaatacatccaagatgaagttcatggagctatgcctgatcctcaagtctttctcaagttactctcttctaccagccaaaaacatcaaagttattctcagagcatacaaaagaataatgctcaactttctgagcctcctcaaaagaaacgaagatgcagtccttcctgtgaagttgatgatattattattggtggcattgatgttgagcaggataaggacgcatctgaagaacaaggcctggaattaaaaaatgaccgcacaaccaccttgtgtgagatatggagcttagataaacaagatccaaagacgaaag

SEQ ID NO: 200981 - DNA, 286 bp, Zea Mays
gccagctgagaacctttataagtagtattgaccggaatgaagtgagccactttggtcaatctgtccatgatcacccatatagaatcataaccctttgaggtgtgaggcaaccaggtaatgaaatccataccaatttcttccgagttccattcgggtacctttaacgggtgcagtagtccagctggtctttggtgttcagcttttactctttgacatacatcacacacaaccacgtgtgcagctacatctcttttcagcccataccaccagtacttttgcttcagat

SEQ ID NO: 200982 - DNA, 409 bp, Zea Mays
atcgtactctgtgatatatgcacttaaccaatctaaaaataatagtttctataggatggagggagtatccattaggcgtgtgtatcgatctccatgcgcaagcgcaacgccgtataaagattgagcaatgctcagcagcatcggccggcactaaccacatatcaaataatgcagcaggcgcgcgatcgatatgattctcctctacttttgcatgcatgcacgcacatttggtcaagtacgcacatacgtagtagtaggtgcacgcttttggtgccgtcgcccatccatgcatgcactgcacacgcaccaatgtctccccttctttaatttatacgtatacatactattaactatatctctagctttgagctaaacaaaattcagtttacaacgaattttgtaggattaa

SEQ ID NO: 200983 - DNA, 382 bp, Zea Mays
tgcttgaaggccttggaaaatattatgtctgattgtctgccacgcttcaattgtcgaccaatacatcatgcacggtgaagcttatattacagttgattaccatgatattgctgtgtgggtaatatcttagccgaaggtcatcttgagtgaatgttacaggcatatgaaccacttagatctgatataggacccctgaacacctatatgttggaccctcctttgaagttcttgtttttatctcttattgagtggcccgaagcttgatcttctcattattgggaatatgtgctttgctggtggaactaagttgttgacgtctgagctttgggctcttcccttctactgagctggctatgttctcgtatgtggcgtttttgtggag

SEQ ID NO: 200984 - DNA, 393 bp, Zea Mays
ctctaaagcaagaactcgatcagctaaggagaggaatgattggtggtgccagccgggaagaaattttgagtttacgtcagcaggtatgttcagtttgttttgtagaactacagaataaaactgttagccaactgttttgtgctccttgaaattgactctgtagaataccttttgtgttggtaagttgataactgcctcaaaagtacctttctttcttgtcttaagttggaggcgggtcaggtcaagatgcagtctcgtctggaggaggaagaggaggcgaaagctgctctaatgagcaggatacaacgtttgaccaagttaatacttgtttccaccaaaaacaatattcctgccttgacagatgggcatcagagtcacaattctctcagtgag

SEQ ID NO: 200985 - DNA, 298 bp, Zea Mays
aacaggattttggcatagggattattccctgacagggattgtacccccaacgggattaagtgaccgcatggggatcactcattccctgggtggaaaaattcaacttggggattatatcccagggaaccgaacatagccgaacggtgtgaatgatgacgaaggggaggcgaacaagaatcaagaatattacctgcaccaggggtcgtagagacacccgataacgacgccacaccggctcaccgcgtctgccacactccggcgagcgattcaacgtggtcaggagcgtaatcctccctgg

SEQ ID NO: 200986 - DNA, 327 bp, Zea Mays
gaggcactcggcttgccgagttgggtgggagaaagaagacgtgccaggaccgtagatctcataataaacgaccctggtgtgatgatgggggagaggtgtttagaactgttggatctgtgaatagcggctaggattagatttggtggcttccgtttggcttaatcaatcacagccatcgatcattgatcgtgcggccggtgtgggagagaatagatagtgtgctgcagatcgtaagattcggatccgacgtgtgaggatgaactcaggttcatgagtgtctcggtctaatctggaccgactattttagatccggcagctcttgtaccc

SEQ ID NO: 200987 - DNA, 680 bp, Zea Mays
cagaatgaggaaggtcattcattatccacttatttttcacgttttagttttctattcacttcaatctaatatgcagtaatgtcaaacaggaccatcttttgaaaagtgaaattgaagtgttacagaggaaggttaatccctaaaagcaatgtcccttttcttatttcaaaaggatgatcatgcatggaagttactgacatggacatcgcaacagggcagcctaattcaccaggaaaacatggagctcagtagaagagtacatttcatgtcacagcaaaaagaggaactatataggaaggtttgatgaatgatctttgcagaaactttaactaaataaagatgctttgtcaacaggaagctaaatgaattaattttagctccaggccagtgaaccaagaggtgctgctggtgcaagctctagcactccctacagcttttgtattgcaacacaacaagcagatgcccctgttaatcttgaacagaggcactcgcaaccaaaggagggaaatcggtgccaagaatttatggctcctgaactggggtaactattcttcccagtataaaaaaatgagttactccaagcatgaagaagcatactaaaaaaatctatgctttgatatgttacagacttcaactgccctaagaagatgcagtacaaggtggaaaataccattgtgttt

SEQ ID NO: 200988 - DNA, 949 bp, Zea Mays
ctcaaggccaccagggtctggtactgcatcaggtacttccagtcagaggcaaacagttgcaaggtaaaggggcaaaaggacccttctgtgatacattcaaaggatctgtgctgtttgtttatgtatatttttttgtcagcacacttatgtttactttagaagtttaaagtgattttctgttttccttcacataattttgttgtggctcgtatgtctatttttttgttactgcttggtgttaatttctttggtttagtattgttctttaggtagttcatttcatttagtttatgacattctagttcttgtgaaaaagataatttgcaatattgtcggtgtttagaatcaacataatgatctccaaatgtttgaatgatgcctatctctataaaatagagaattattctcaacttcaatattttcagaccatttagttctaattattacattttgctgattgctggtgttaatattctattttgtattcacagtccttctgcaaacaaacatatggttgctgatggaccagctgcatcattgcaatcatcgtctgggtttcagcatggtggttggtctgggacacctggtcagttgtcgatggctgacattgtgaaaatgggccggcctcagggaaagacttctatcaaacctgtggtcacagctgacagaggttatgctggacagtacccatctttgccaagcacaaaccagaatctgaaacaatctggaagcatggttcccccaacagagcttgacaaggggttacaacctgcccaagattcggttcaggttaaggatcatgatcattctactgctgacagcaagctcccatatggtactgactggtctccacaagatggcccgacatttgcgaaccaatcttcccttcctgagccatctggtgatccgtccttgtatgaggcatcgtttcagtcatctacattggtta

SEQ ID NO: 200989 - DNA, 363 bp, Zea Mays
taataagacagctgctgctgcatcagccagccacgggttttttattattaattcccagcgacaaatgttaccgtacagtacacaaaaccatgccattgccatcatctcctcgaatgctcccgtcccgtcgcatatggaaaacgcactgctgccgtcgcgtcgtctctcctgcggcacactacacgtacaccgtaatactccgtaataccacagtatgtgcccatggatgaatgaatggatgaatgaatgacctgaaacgatttctcgatcgtatgtacacgaacgaacccaggcctcttcaagtcgcttgtttctctctacttcgcttttaccacgcaccacctgttcaccccacccacccac

SEQ ID NO: 200990 - DNA, 296 bp, Zea Mays
gcagatttgttcgagtacacgaggggatatatgttggcggcggccagtgtgtacgctggactacgtgatgatcggccatcatctaggagttgtcgcttgggtgtacatgtatccatcttgctcgctgaggccttgcttggggtgctgataactgtacattttgttgtggttcaagtccttacttttgcgccggtggttgccatagttctttcattgtccaggctaattgcaaacaactatggcaatgttggtgacgatgctgccaattcagcaaagctcaaggcatccctgcagat

SEQ ID NO: 200991 - DNA, 3065 bp, Zea Mays
gtcggaggcgcctctcgagggtgacgtgaggcgtgtgagctctcccgtttgcttcccgccctggctcaatcggaggacggtggtgcgctcgaggtcataggagatcgaacagatggtgatttgacgaaggacacgaaggttattttacactcccgattgctataatgatcaggattgtcactttgtcagacatttctgattctatatcctggaaattgtttggagttttggactacggcttataagaaaactatgattacattaaatccgaattttgtataagcggtcgcaaacgtgccttagacttcctctgatttttgtaagaacaccttcaacaatcaacaataaaattaacttgctaactcatgaatcatgattcttttaaaaaatgaaattagagtaacttaacatactagtatatgtaactctctattctaaattaagagacattttgagtattctagatacatagtttttgctatacagatatacatgtcaagcgaatgcaaacgctatttccacttcacaagttaaacataaagttaagtatattttcactcattacggtaaagatgatcacatagtacatttttgctttagactagctaaacaacaaagaacagaaagtgccatgactgtctaatttcagaagggcttttatttctcttgagactgtggcatttttatttttgcatagggtgaaacaaacaccattatatgagatatgatactagtggagttaaaatcatttttaggtttattatttatcttaaatttgtcactaccaaaaggtctaacatatgggtgcataagtcttagaacgagcataaggatcaaacctaaattagttttatgtgagagggagcttgttttttgttctaaaatttgggtcaagcttttattttccatcttcctttaaagtatccaatatattttaaaggggtgaatgattatcacaagtgttattcttatatttatcttttttaccacaattagagtacaaaaaacctcatggtagctatattttttagttgatgtaatgtatcttaacatcaacatctttcaacttcaactcaatgaatttacatttatcatatgaagttggtttaacaatagcacaaacatgtttctcattttgttcttttcagttttaagttgttctaaagtaggaacatgcacatccattgttgaagtaagtttggataaattaagtcacatgatttgcatgagtcatctttagaaatcaaagttttaagtcttgcagtttcagcattttaagatttaatcaaagtatcatatttcttaatttttttatttactttctctagtgaagtaccaggttttttaactgcacaagctacatcattgtaacacgactctaatgcacgacctttacttacgttgtcaaactcgctatttgtggagctctttttacttgccgttaaacactttttacttgccgttaaacacaatccactcaaatggttcttacttttgggagttgcaccatcctcattgtttgtgtttgtgtccacatcactcaaattgatttgatcaaagaagaacatgatgtaccaccttgtggttcaagtagtctgttgttgctgaatgtgtttttttgtctcacttctttcaatttctttttcctgttcaccttcacccctgtcaatttactagaaactttgggcttttggagggaatatagttgagtggaccacactcaaaacacctttgaggatctccacttcttttatcattcttacattctttaaagcttcatcagattgagaagagaagtgtgctagttcttcttctagaaggtcctcaagctattcattagttagtgaagacaagaatgataacaaaaaaactagatggagattcaatattagacatgctaggttgagagatcaaatcaattgactaattattattatttctggccaaaatattcatgagttttcaatttaggttaacattagtaatataagtaactttcctctcctatatagacatattaaagctcgaagtaattgacgtgcatttttcacattagtataagtaacattgatatcacataggtcactaagaattttattatagtgagcaaagaaatcatctaataattcatcagatttcatctcaaaatgcatttaatcttttttgtacatgtcttggcgtacctctttttttgaagataaaccctcatgataatcaggaagtgctctctgtactcgatatatggatttatgatgcataatgggaccaaagtcgctccttacaagaattaagtgatgggtttcttgccatgatattaacctccacttgggccgtgtccatggctcttatctcacgttctcggacacctaataaggcttatataccttctcccatattgcaaagccctaaatttgaatataagatctaggttccatttcgctattgaccatgtttcgcctcaaaacaacacttgcacatgaacaaacacacaatcgtgttcgagcataagtccattgactcaattcaattaatccgcataccacctcaaatgtgtgtatcatgcgacaataacaaatcaccatgctataacatgcatatataagtaatacatgcacattacctataccaaaattttaatcattttgaaatatcaatttcatcttaaataaaattttcatcacttgatctcacattacatcaacctcttatgaagacaaatagcttgtcattaatcaagatctgaattgttggcacaacgttcctctttgcttggcgacctctcttaatgataacttcccaaatttctacataatttgaaatttgattgaatatatttttttctcttgtgaagatatccaaattggagccagtccattgtttgttttttctctggattcactacacaagtaagcattcgacacaatctatcaagaaagatcgcagagatcaacttaaggcttgaagacatcattaacaataaggagaaatacaagattgaagctgcacccaatgattttccattggtgacatggaaaccttctacggacatctctactgtggcaaaa

SEQ ID NO: 200992 - DNA, 369 bp, Zea Mays
aaccaaaacttatagaaacataatccttgagtgctcgaatccagtattttcctaatagagttgaactgtttacaagtgaaggtgccaattgctggtattcattaggagcattttccctcatcctcaagaattgataggtgttacacttgactgctgcatgggcagttagaaggcgaacttttatctgtcacttacaaaacctaggttagatacttaggacactaagatatccaaaacaaactgagtaaatgtgacagttttagaactgaaataccttgcacactacccagtcagcaaaagatggatatagtaggccctctatgtcacttaacgggcgtgttatcagagaaaacaagcgactaagagcta

SEQ ID NO: 200993 - DNA, 424 bp, Zea Mays
cagagaaataaatctgttagttgctgtctttagagatatggctggattacagctatatttgttagttacagatttgggatgtcaaggctataaatagagggctcttgcgacaaggctgaggtaatcaggtaaagaagaaagacccttaagcctgccgcaggtaggggttcctcccccttaaatctgttgtaacctttcctcttgagcaataaactccctggtttccaacaacttggtatcagagacatagatcctgcgcttcccagccccaccaccacccctgcaccaccgcctagccgccattatgttctccaccagcgctgccaactctgctactgtcgatgatctctccgcctagctgcaatgcctcaccaccaccatgcaggaagtgcttgacaagatcaccggcaacaccagccggcag

SEQ ID NO: 200994 - DNA, 391 bp, Zea Mays
aacaagtagggtcttcgaaaaaggataaactgaggcaatcctttcccgggaaatacggaggctgcttcaaacctgcaacatggtgattcagtgagataacccccaccattgtacctgccccttctcaagcttaattttgctgctgaataaaaaccgagcacaccaatcccttccttgaggtgcatgcaatagcaggttcaaatagccaacggtgacttgactccaggatcaatattttgaggacaacaatggggtacaattcccggtagctttatatactatcaattatgtagataaatttcaggaattcagagcgtagtaagtaaagcacaataccttaaggcagagactatatgtagcaagtaaatcgtatgttataacaagcctatat

SEQ ID NO: 200995 - DNA, 448 bp, Zea Mays
aaagaagcaacaacatataaatgatagtaccaagtgctgcagctgcaagcagaggcgaatagcttcatatataagtgaagctaggagggcttgcaggcttccacttttgataggcgcatctcctgtgtgttacggcgtgcctacaatcattaggaagaaagtaatgacggattctaccacgagagagatgacctaaaagtgtggtagtatcggcatggtattggtgactattgatagtgtgatctatggcgttgatggagttggcacgaaagtgtgccagctcaaatgcactgactaatttatgctttatacccagtgcttggacgcatggtcttgctggacgacctgcagtgggcgtgcacctattggtattccagagctgtaacgagtgtatattgaagtaaatgttctgtacaatggcgctgtacataactgtaatgtcactgga

SEQ ID NO: 200996 - DNA, 813 bp, Zea Mays
ggagacagggaggcagggcataaggtagaaggtgatggcgatggagaggtagaggtagaagaagatgaaaatactgagattgtgttatgtggagacaatgaaaacaatggggaggttgaggggtcatttgaaattactgaggaaggaggggaaaatgaaacaagtgaagaagcaaaacaggatgtgatgcccagtacaacaatgccattattaccaaacttgcttcagtgttgggtgacgccactatcaggcttgcttcgttgttgtggggaacatggcagccctcaagagagcaccaactcatacataaaagaaatgttgcaagtatccaagtttcttcgtgtcatcaatctacaaggcatcgagatcggtgagagcttaccaacaactattgggaatgtagcacaccttcagtacctcggtgtcactgcttgttccttgaaatatatcccatcgacaattgaaaaccttaaaaatcttcagacgttggatgttcgagacacgtttgtttataaacttccagaagcattttggagtataacgacactgcggcatgtatttggtgagggtcttttcttgcctaagcaggtgggtgacttgaaacacctgcagacacttgaaagcatagatcctgataaggataatggttgggacagcagcacttttgagaaaatggctcaccttcagtcccttcatgtttgggattctaaggagaatggagttaatgctgaggctctatctgctgttattgataaagctaatttcctcgaacacctagataccctcactcttgatgttcatgacatcccattg

SEQ ID NO: 200997 - DNA, 339 bp, Zea Mays
gatagcttgattgtgaatatacagaatgccataagcacgggctaccaattagacaggaaaaggcttctgggagttcctgttagcatacagccttgcagttcagctatttacagtatattcgtaactggaaagggatcttgttggattccttttgatatgtttatggagaatgcaatggatgggagacatcttcatactatatcatcagttgaatatctgacaggtgcataaatgcataaagctgttaattcttgcctttccactttctgtaaaacattttctaacatgaaacagttggttgacagaactatccaaaacacttcaagtgttgaatcgggc

SEQ ID NO: 200998 - DNA, 425 bp, Zea Mays
gtgcgataaaggcatggccttgggaagcccttgctaagtgcctctcatctacaccagaagaaattcatgaggctgcctcgttggttgaaaaatcctatatcgaccttaggaaccatgctacagttggtaacatgtgctctttgcctactgctgatgtgaaacacatgctcgcagaccactgccgattgaaagtttggagtgtaactagcatgacatttgctctttggtatacttcgataaatatagttgtatctaacagcttcctgaagttctctgtcccttattttcttacatgttttatacagggatgctaagactagggagcttttaaaagtatttggcatcgatggccaagtcgacttagctcgtcctgaggccccagtaatgccggaacaattcatagaggaagagattaaagcaaaacc

SEQ ID NO: 200999 - DNA, 369 bp, Zea Mays
gtggaaggcaaaggtttctaacaaatctgaaggtgctagctccagtactcctcacaaggtcaaattgacatcacaaggaacacccagaagaaaaaggagatgcagaaagtgtggcatctatggtcattgggcagaagactgtaaaagaccaaaaagagataagaaggatcacaaacagcaggaggcaaatgttgcagttggagatgtggagaatgcaacactactcttcgctgaggtgcaagactcattaggtggaacttctcaggaaatacacctgtatgaagaaaaagtagtgcctgcagtctgttcagatgaagtctgggtattagacactggagctagtaaccacatgtcaggcaccaagtctac

SEQ ID NO: 201000 - DNA, 318 bp, Zea Mays
tcttgacgaggaggacgggtgaggagaacgccgaggagctccatcgaacaagcccttgctcgagcatggcggtgcactgtcgctccagctcatccttgtgggacgctaggtagaggtaggggcgcactgcgaccggctccgagccgtggacgagagtgatgtcatggtcgcgggagcgtaccggtgggagacccacggttccgagaagacatcggcgaaggacgcgagtagctcgtctagtaaggatggtgacgccgatgtgttgcgcagtatggggaccaccgtcccctagacgccctgccaacagattggctggcc

SEQ ID NO: 201001 - DNA, 430 bp, Zea Mays
aatcgttgatcaacgatcgaacggtcaagaaaattcggccgacgtggataggctctctgaccacgttcctttgctgctttaataataaagaaatttgttttcacctttccctggtacatataaagcctaaatgcccatgatctatctcttcgtatatacggttgtggtgggcctattattttcgatttttggagaatatcttgggatttattggagatgattcatttttttggaattaagagatggagatcctaattttcttgtgttgggagatttatcctaggtatctcttgaagacgctcttacggtagttcattaagacgttaacatatgggtccatacgtctgtgactgtctcgaggatgcctatgcctatgcgtcctacgtggcacgtggtcccaatttatcagtacgctgggccgctggccacg

SEQ ID NO: 201002 - DNA, 299 bp, Zea Mays
gcaaaattgaatttcctggctgttaagggtcctgaacttttcagcaagtgggtcggtgactcagaaaaggcagtgagatcgctatttgcaaaggcgcgggctaatgcaccagcaatattattttttgatgaaatagatgggcttgcagtaactcgtgggcaagaaaatgatggcacgtctgttgctgatagggtcctcagtcagttgcttgtggaaatggatggtgagttttaatacttcattaggaaattcgtctttcaaatctccatatttgttcataaactcaccaataattaccc

SEQ ID NO: 201003 - DNA, 294 bp, Zea Mays
cgcaaaagggtgcagatccaggaccgaaaactgctgccatcagaagggataatacatacatatgttgtgatctcatcgcattcggcaaacacaagccacgaattgctcaaagcccttgcgcaatattcccagcatcacttggcagcaggaaaaacacacacgtagatttggggctacaaggaaatgaacgaatgaagcaggcacgcccaaagactgggaggagagacgaggtacacggggacacggctgtgtctggcaagaagcaacaaatctcccatggttgctgccttgctg

SEQ ID NO: 201004 - DNA, 273 bp, Zea Mays
aaaaaatatggtcatgcccacttgaaatgggaaaaagtatggtcactcactcgataataataaatagaaaaagcgcctgatttgggcacactcataaccagaaaacatcaaagctaagaataattaaataagccatgttacaagtctcatggattgtagtatttaatcaaataggaaaatttgtacactaaacaacattaacccaacaagttggcacctcctatctgaagtaacacatattagttcattctgattcagtgcaattaaaaaacc

SEQ ID NO: 201005 - DNA, 381 bp, Zea Mays
gtgggcgaccagtgtcctgcggcgcctcaagcgagcgaggtggacgagggtggcgccgcgggcaaggagcggtctgatggtggtctggcgaatggggcagttgagggcagcagcattgcgggggaagtgccagatgtggctcctgtggtatctgaagcacggatggacgaggacgggggttgctccacaggcaatgagtactctgaaatgaagatggaggtggatggcggctgcgtagcagaacgagagggcgatggtcaggaacaggaacaagagtgcactgcagctgctgtggaaagcgaggttaagacgggggaaggtgacggcggagtggtgaatcaagggactacggcacatgctgggggtcttcaggttaaagag

SEQ ID NO: 201006 - DNA, 388 bp, Zea Mays
ggaaatagtcacgtcattagccaactcatgttaggtaggagttgattgtgttaagtgattgttatatatatatatatgttgtgtctcgaattgtgataataataggcaagccgacgtgtatgctgtctagcgggctgtgtcgttgctctagctagccgactcgttagatgactttggttaagctcgtagtcacgataaattacttgttgtagtctaaatgcgtatggttatggtcgcggatgaaaagtattagtgctcatgtgatgtctaagttaaaatgcaaattattgggtgaaaagcgcttcgatattgattttcgtggagaatgcgttgttaattgagtatggaaattctaggcacgaaatgacttggataaaaagtagtaagt

SEQ ID NO: 201007 - DNA, 314 bp, Zea Mays
cagatatgcaggatgctttagatcatctgcagtctaggtggaatagtgttcagcaagcaaacaagcaaaatatggctgctgatgcatcagacaagtctgagagcagtttggagattttggtcgattctggggattaccagtcagatggacttcttgatgatattattgagaatgcttttaacacagaggattgcatggacaccaatttttgggagaacaattaccatcacttatttagtagcagtgagacggatgatggatttgagctgaatgcggccacttcacatgtatttcctatatctactccagaaggc

SEQ ID NO: 201008 - DNA, 434 bp, Zea Mays
gtaatatgcagtttccgggaagaagatcttataagtgatgggtgaggaactaacctcatgtttagtaagaaaatattattcttgcagtgcagctgagaactttttgttgcatagggagatggacttgttagtggttccttattcgtcagaccccagcctcaaattgatgcagtggcctctgttcttgcttgctagcaaggtttggtgaaatagatttgtaacttgtttgcacatttttaatagtacatatgagtgcaatttattatgtttgatgcagatacctatagctttagacatggcggcacaatttagacctagagattcagatctttggaaacgtatatgtgctgatgagtacatgaaatgtgctgtactggaatgttatgaatcattcaaactcgttcttaatttattggtggttggagaaaatgaaa

SEQ ID NO: 201009 - DNA, 452 bp, Zea Mays
cacacatacagattcacgcattgccaacaacggtctccctccttccatccaaaggctccgatgccgtgcaaactacgaggcgctaaggtacagtcgagagatcgaagagctaggtaatactctagtcggcagactgaggaacggatccaaccactacatcgcacttcacctaaggtgaccggaacctgcaatttgtctagtaacagggctgacagcatgcactttgttgtactgaggaagagatgcagatcagtgatacccgatgttttttcttcgttataaactggcaggtatgagaaggacatgctctcattcactggctgcagccacaacctaacacatcaagaggcagaggagctgagggaaatgcgactcagggtgcagcactggaaagagaaggagatcaacggtaaggagagaagactccaaggaggctgccctatgactcctcg

SEQ ID NO: 201010 - DNA, 422 bp, Zea Mays
agcattgcgttcacattgcctctgatggtggccgtgtttgtcgcccacttataattgctgatatggggatatcaaggatcgatgagactcacatggaaaaactgagggtcagcattttgagctccataatttcttgacttgttatcctttattctctttctcataagttggtttgccatcagcatggaacttgtggttttgatgatttcctgcgtgatgggttgattgaatatcttgatgttaatgaagaaaacaatgcactggtacatcatgattcttttgctttttttatggtttgttatccaaattatggtggtgtatactaatattttcaaatagattgcattgtatgagcacatggatcaagatgatgttgaaagaagcagcatcacacacattgaaatagagccattgagtatctt

SEQ ID NO: 201011 - DNA, 320 bp, Zea Mays
ggcgaaaagaggcaaaggtagaccacaacaggagacgtagagttatgcaagccgacactttgaatcccacatccatcgccatggaggacccaacatatacccttgattttgtacaccctacaacagatgcaaagggatctgatggatccatattatctgtctgcgactgggttatccctgatttcgtcaacgcacctttcttgccatctccaacccagaccgaggatgtcgcttcgcccgatatgtctaccaatacactaaagcgtaaacatcatgttcctcgtggggaaagacaagctatattagctcgtcgaaaccag

SEQ ID NO: 201012 - DNA, 378 bp, Zea Mays
ctcaagactacactagtgaacctatcatcacatgtggttaatttgagcaaaagacaccaaacttgggggtcaagatcctaagtaggtgtaacccatattagaagtcatgctttgaccttaccatgcacctaaagaggagaaaatgagtcaaaccctaattcaactcccttaggcaaatggagccctagaggggagtttagcaaaaaggctatgtaaaccacattgtcatgacttgggctaattataaaagttgtagtacacttaataccctacaaaaaatagaaagagagtgatcccaaaaagatttcagaaaacccccaaaaaggtcaccaaagagaagaacataaaagaaaaatcagggttttctcaagttcaaaa

SEQ ID NO: 201013 - DNA, 410 bp, Zea Mays
ccggccacgatagtgcgtacagtgtaaacgggaacaaacagcagggaaggggaggcagcagtggggaagatgaggcggcggtgtgaagtgaaggaaagggtaaggatggaatgttgtacggtgcggacaggagagatgggctgagtggcgtcaaagtgcatggacaaataaaatgggctaaaacgcctaagtcacgaggacggagggagtacatggtagttgtcacaccataaacaaacacacagttgttgtggtattacaagactacaaatcctttggtgtacaatcatgatacgctgaagtatctaatagcacgaggtatgcaaacctcactaacgttaaagctaaaactagagcaagcatggtttaactagctagcataagtacttcacaaaacaactatattaatc

SEQ ID NO: 201014 - DNA, 373 bp, Zea Mays
caaaacagcaatcaataaattccagcttctatataattcaagaattgccgcattctagagacttgaatcattctagcactttaccattttttgagttaaattaattaaatgaagactagcaagtagacttacaaattttatccaaatcatttagtgcactaaaattaccacattcatttaacaaacgcattcaccacgtaaatagcgtcatcacacatgacctcgacttaaccgcagagaaagcaatgactgcttcgatatgtcaccacctctctacagtccaatccatattaactacatcgatcgaacctcatatcgcgcaactcttataacttacaatctcaaatacaaccatagcacggcatgtagttga

SEQ ID NO: 201015 - DNA, 345 bp, Zea Mays
cggagctatgtccatgcttatgtattgttgctgacattagcagggtatccctcagacaagattgtagtaaggaactgtggcagggtatcaaggaacaagaaatttttgggtactattagacatcaatggaaaactgttgttgatctggaggataagattcctgtagaagctattgctagagcacggcgtgctgcacgttcaaaactgattgtatcacagcaactgaaaaagcaggaatcatcaaaagcagttctggtttctttcttgttgaaaattcttatgcccttcttatgtttatggaggtttcttgtgttcatatggaggccagtgtgggcgatgatgggc

SEQ ID NO: 201016 - DNA, 276 bp, Zea Mays
tcggaagatgcaaaatccgagaaagccgtagaagacgaaaccagaagcatcgtgaaagacgaaacgttccgtaagcaaggattgaaggttgtatctgggctgagcaatgagctcggcaacgtcaagaaagcagcgggcatggatttcgatgtgctgcacagctatgtatccaagctccaggccggccttagcaggatcaagtcggtcctcctgctcgaggagcagtgcgcccaaggccacggttttttcgcgaggatgcgtggttttctcgaggaa

SEQ ID NO: 201017 - DNA, 420 bp, Zea Mays
cgtgacgttgtaatcgcaatgcttggtttgcgtttttcggattttgcctgcgtccccgcgaatggctccaggggcgggttgctcgtcgcggttcgtgggccagacatctccatcgccgacgtgctggccggttcctactcggtttccgtcaagctctcgggccctaggattggggatccttggtggctatccacggtgtacggaccacaagggatagccgagaaagagctgttcctggaggaggtcgccgcggcgcgtgacgcctgcgaagggccttgggtcgtcatgggtgacttcaatctcattcttgacgagactgacaagagcaacggcagggttaaccgacggctcatgcaggagtttcggcattgcgtcagtgatttggagctccaggacttgcatttgcacggaaggttgttc

SEQ ID NO: 201018 - DNA, 440 bp, Zea Mays
ggcggacattgtttggttccctgcatatttccaaaccagcactgcatccgcagctgcaagacaattacaaaatacactacgtggttgcatgcgtgggtacgaagagagcgtacagtctccgacggaccaagctccaatgagacagaccaagctctctcacccaaccaatcagaccctgtatgaatcctgacgacttcgagatgtttaacacatggctcctggtgcagcccagcgtctctctatgtgaccagtgacctgaagtcctaaactcactttcattgaaacgcgtgcgtttctagtcttaccagcagggggaaacaaataaagaaaataacggggaaaagaagcatttgcattgctgccgttctaatgcttgccccttgtgcccattaatgggcgggcgggcggcgattctggccgtctggcgtctgctacatcag

SEQ ID NO: 201019 - DNA, 743 bp, Zea Mays
tcttacgaccggaaacaaactgccagcgaaagcgatcagtcatatgaaatagtatttgatgacaaaagaaggccgcagcgtgcagagacaggatttcttggtacgagcagcccctcacatgaactcgtttctgaagtttgggaagagatcgtcaccagaaacgatcaaccgcccctagggccccatgctgatgagcaaggcctggatacagcagaggaagagtatgtgggcacaggtgatcagccacatggtgcagtttctgatgagaagagcggtgcagagactccggagcaagaattcagccttaccgaccaccgaaacgtagcagttcctgacgccaggaacatctcggagaccagagaagatgaggaacaagccagtgcagatgatcattcggacaatgcagtcaccgggaaggcaaaggtatatgacgaagacggggaggaccgggaagcgaggtggaaggatctgacagacgaggaggaggacgagctggagtcgctgtgggagcaccaggatctggtagagcagctgaagctcgagctgaaaaaggttcggtcgtcggtcgggctgcccacgatcctcgaggagtcggacacaccaaaggctccggtggaggacctcaagccatggagtatggatgctaagttccttcgcgaggaccccatggacgagctgaacaagttctacaagagctacagggagaggatgaggaagttggacattttgtgctaccagaagat

SEQ ID NO: 201020 - DNA, 379 bp, Zea Mays
cttcttcgacacttttgttacacttgatggtgtaacctcagatttatcacaaagtgtcaaaggatgtgccttcttaaagtgtttttgaggcaaaatgtagagcaaaagaaacaaaaattacaacagatatgtttcgaattcttgacccagcccctctagtgcttcagtagatatgtttggatttcggaacagtgttgttgactgtttgagctttagactcttccctcgcatcacactgttgctgatcttgatattacccctgaggctgctgattgtaagatgaagttggaactagtgcgagtggttgaggtaaggcccacctagaatgagagtgacttgctgaggcaactgaagctgtagactatggaagtggttgttg

SEQ ID NO: 201021 - DNA, 639 bp, Zea Mays
gcctgggaggagatggatgcggcgacggaggcgccggccgagcgcacgctggacgcgacggagccggcgttggaggtcaccgtcttgaggcaggacgatatgatccgcagcgaactcggcagcaacccattccttgcccccttcccccgcctcatccctccccgccgctccctcacctcctctccctgccccagcccggagaccagcacaagcacccgctccgagtccaacttccccgccgccaccgctcctacaacccccgccccgcaatcccgccgctgcccatccacgatcgccgcctccggggctggcgaaagccagtaccatccgagtgccgccgcccctcactgcctccgatccccgctgccgccgcaatccgcagactcagctggccaccatatccctcctcccctcgcacacctcttcctcgccgctcgtcgtcccttcccctccgacgccgaccagaaccgaaattcaacaactccctgggccctggcttccttcacccttttcccttctctctcctcgctgttgctttcgtgtgcctatctccctccctcgcccttaaataatcccaagaaatcccacccggtttgcctctccccacccggcttcgcgtccccggagcaaactctcttc

SEQ ID NO: 201022 - DNA, 452 bp, Zea Mays
gcttaagcaatctagctttaacattccaatttctaaacccttcattaacgaaagcatctccaccagggaatttgttgttatctttgaacagatagcaaacaaaacaatatgcagcatctttatccacactatactcaagccaactaaactcggaaaaccactttggtaggaagcgacgcatacctccacattcatgttggggaaaatcatccttcttcatctttggtcgacatggccctaatgcaatataggcccttctaactgcatcttggatattaatagaatagcttgagattggagtcctcaatccaggatcatgctcaatgtcataaatatcattatcatcactatcattatcctcactcgatgttgtcccattcaagtgcactgattcaaaatcatcattgtcttcagcatctactattattggaggttcaggctcaactctctct

SEQ ID NO: 201023 - DNA, 533 bp, Zea Mays
aatcagaattccccccctagcaccctcggacggcagcattatatactgatcaaaatctgttcccaaaatagccagcacctttcctctgttaatttcctgcattttagtttcctgaagacagataacgtctgcgccacaagcatcaatgcaagttctaacagaacattgcctagatgtagaattgagaccccttacattccagctcaagattttttttggatccattacaaaactcttacatcagcgacctctacatgacaactcaacaggcactaatgccaacactaatgctgcccaccttgagatcatctggtaccacccatccaaaaaaggacgccaacgcttcatagtgtgtcggtgcagttcagccccagggatcagcaaccttggtggttaacttgtgtgtatggtcctcagggagattgcaataaacatcagtttatgcaggagctaagaggcttaagttctgtctgccttggtccgtggattatcatgggggatttcaaccttatatacaaagatgaagataagag

SEQ ID NO: 201024 - DNA, 291 bp, Zea Mays
gttaaagaaaaagtctagaaacaaattggagttgaggtatggtgctccacatggcaagtcttacagctctttagtggcagcatgtaaaggttacttggaaaatggatatcaggaggacagtgatgcagacattaaaatcgccaaccatggttctgctgatggttctatgcgtccatcaaaattgatagcactcagcggtggattaaaggattcaagtaaaatacagggtatgcctgttgtagacagatgtagcaacatgtttaccttgtctgcacatcatggaaaatgtag

SEQ ID NO: 201025 - DNA, 489 bp, Zea Mays
gtatgaattttggattctttgttttgatgaaatgatatggataatttactaccttgcccgtctagcttgcacatcaggtctttttttcaataaccttgcagggtctataagtttgtacttaagttttgtccatttagaaattctcagtttgttaaaaattctcagatttaaatttctggtgtgctcagaatggctcataaatggtgtttgttttgtgtagaaaacatacatatctgcagtgttgcaaacgcagaagtgaggttgtctctgcaggtgcgaaggtcatgttgtcctcttgtcagccacatattgtgctagtgattttatattgtacaccgtcattgaaaaatgacccaccatttatttgccatggtcacacttatagctagctggtttgcttccggaagtaatgtggcttcttcatcgataaatgaacagaactgcaattattacattattttggctgaattaaagttaacaagtagccta

SEQ ID NO: 201026 - DNA, 536 bp, Zea Mays
ttcaaccgaatacctaatgcattaattcggtgcttgtgacaagcattcatgcaaattcgtggatattaattcagaacctggtggcatattaatcttggatacttggtcaactgcaaacttgaagattcattttcatgcaatcaatggagagcctagcgcaattagaggtgttgtgtgaaaagctttataattctagagactcggctgagcgagcgcatgcagaaagcaccctcaagtgcttctcagagaacagcgagtacatttcgcagtgccaatacatattggacaatgcctcaactccatatgccctgatgctggcgagttcaagcttgctgaagcaagtttctgaccgcagtctttctttgatgctccgtctcgatatacgtaatgtttctttctgtacacttattgcatggcatcatctatagttaaggttttattgtttttgttctgttgcatcctgatccacatgtcattttagcattaaaatccatttatgtctatcaaatttagctctgttgctacagttcagttgc

SEQ ID NO: 201027 - DNA, 404 bp, Zea Mays
attgctcatgaggtattggtcatggtgtgcactgatccaaaaaatggattgatgccaggatcaaatttgagaggtaatgagaaacgcttactagatctcatgaaaaagttgaaagctactgaggttgttcatcacaaaaaattgttactggccattgtgagtaatagactgtctctttgttcggcgtacatgaatgagtttccttacaatattgaaccacgttcgtctccttcatggttagttcttctgagcatttacgtgcttatttttttgtagtgcagtatgctcatgctggtcaagttattatttgcaggttttcagccatctcccttgcagctgatgtcatagcttcagcaaaatgcaatagcattgttcaaactctttcatccagttcacatggtctg

SEQ ID NO: 201028 - DNA, 421 bp, Zea Mays
cgccctcggccacccatacaccgccgagtcggtggcgcaggccttcttcgccgacattgtacgcctccatggcgtgccgcaatccatggtgtccgaccgcgacccggtgttcacctcgacgttctggcgtgagctcatgcgactcatgggcactaagctgcacatgtcgtccgccttccacccacagtcagacggccagacggaggcggccaaccgcgtcatcattatgtacctactctgtttcacaggcgaccgtcctcgacaatggcttcgctggctgccgtgggccgaatacgtgtacaacacggcataccagtcctcgctccgggagacgccattccgggtggtgtatggtcgtgacccgccctccatccgctcttatgagcctggtgaaacaagggtggatgcggtcgcacgcaac

SEQ ID NO: 201029 - DNA, 304 bp, Zea Mays
gtagggacggtgcatgccatgcttgccgtaattctccggtagcagccacgaatcaaccagcatcacctagcagacgaagcaatcaccagttgaagaatcatgaatccaaaggtctgctagaattctcgtcacttcctccacatggcccacaagccgaacatacgagaagtcgaaacctcatgtgcaacgccagtcgacttccatgactgaggaaaaaacttggaacgcctagcgaacagacaaggctacaagcacaccaaccgagtgtcggacatacctcccatcatggggctccaaggagatc

SEQ ID NO: 201030 - DNA, 321 bp, Zea Mays
cggaaacggagatcctcaagacatgcatatatacctttgtcggaacttggggagccggttcctaaaaaacagatacaagtgatggaaagatctatcatccatgtcgatgagaagatggttgatgagttgaagcccactgcacttgttttgacctttggcaggtcagcgtctattccttcagaactggatcttgttaagatgttcagtctctatggtccactgaaagaaagggggacaaaagtacatagggaaacaaatactgttaaggttgtcttcaagaaacgtgtcgatgctgaaagggcttttagtgctgcaggcaag

SEQ ID NO: 201031 - DNA, 1457 bp, Zea Mays
tccaccgtctggctcgccttcgacgtccagtcacaggtaggcgcgccctcgctctggcctcttccgcatgagatcacggcatctccccgcttcccgcgcggcgatccctccgctccgcttcgtaatgcgattgcccgcctagatcttgcgctttgtcgattagcggggcaccgatagatcgcttgatcggatcgcaagtaccgctggcgcctcgtgcggttggctggcgcgcgcctggcctgccctgacctaggaccccactcgaggtcgaggggaatgggtgtgggattgggattgggattgcgacggggctgtcggatactccctcggattttataggcttcgtttcactagagtatggattcggtttgtcgtttctttcctcatttgggagttcggttcatccgtttgccgctcccatgggaaagcctttactcttccgtcacctagcaaccagatgggttcaggtcttacgcgctcgagggaaactatgccaaatcgaagttttcatttattttctaagagtacaattgcaaaaataaattcatttgccagtaccggaggcaaactcttttaatgcccctcttttctcatattaatgtggcttattacgtttagctacaaccatgattataattattgctctggatgaatagagttgtgaaattgataaaaaacaacaactgaacattgtttttacaaatggtactcctttctgcagagatacgtggccctgaagatccaaaagagtgcgcctgagtttgcgcaagctgctcttcatgaaatcgagttcctgtcagagatcaccaagaaggacccattgaactgcaaatgcattattcagctgatagatcacttcaagcacacggggcctaacggacagcatatctgcctcgtctttgagttactgggagatagcttgcttaagctggtacagtacaaccggtacaaaggcatcgggcttgatagggtgaggcaaatatgcaagtcgatcttggtaggtcttgactacttgcacaatgagcttggcatcatccactcagatttgaagctcgagaaccttctccttctctcgaccattgatccctccaaggaccccattcgctctggcctcaaaccttgccttgagaggcctgagggaaaccctaacggtgaagctgggattaatgcgattgagaataagctaaagatgagagcaaggagggtgcttgcaaagcttgctgagaaaagaaaatcagctgtggaatcttcacgctcagaaaggagcttgggtggaattgatcttacatgcaagattgtagactttgggaatgcttgctgggccgacaaacaatttacagattttattcagacaaggcagtaccgggcaccagaggtcattctaggtgcaggatactcgttttctgttgacatgtggtcatttgcgtgtatcgcttttgagctcgcaaccggagaaa

SEQ ID NO: 201032 - DNA, 784 bp, Zea Mays
catttgtcacaagacattcttgccagtcggaaggaggacatctgttttgacgagctatgtgatgcagaaccttctgttgataatgattctctgaatcccggagcaggaaatgaaacctggggtctactaaacggccatgtgttagcaagaatcttccattttatgagggcagatgtgaaagcacttatttcttctgcagctacctgtaggagctggaatgctgctgtgaagtattacagaaacatgtgtagattcattgatctgtcttctgttggccctctttgcactgattctgtgttttgtgatattatggtatgtgtcttgcctatctgtttgatctcttgagaaattacttctgtcatctcctaacgttgaactcaaaatcactcctctttctttcaggctggttatgagaagcaaaatattaggacccttattttagctggttgttcgaatcttagttcgcatgcccttggcagagtacttgagcagcttccacaaatatcttatgttgacatccatggttgcggtcatctaggggatctgaaaaataaatttcagcatgtaaaatggatcaggagctcattgaatccagaggagtcatatcggaaaattaaaaccttgaagcagataggtgatgggaacaactacgcatccaaagttgcaaggaacttcaccaatcatctggatggttctgatgagcttgatgggtattttgctgatatttcaaatagagagaatgctaacctttcatttggacaaggtttctataaacgatcaaaat

SEQ ID NO: 201033 - DNA, 387 bp, Zea Mays
gagaaccttagcattgttaccttctgtccgagtgtccgaggacagttggtcactgatgattcggaggatactgattgtggtaaacaatcttttgaatgatgctttcattgggcttgaagaaggtatactatagcagtttgctcctaatattgtttcagttctaccatttcaggttaatttttacccattctactgttacagaaaagaaaggccatgatattatgctgctgctagttccacctggaactgatcctctaccaacattgggagatgaagtaatgcctggaggcaatgtgcatatcatgaagaaatttcgtgtctttactgttcctaccatttcagctcttacgctttgctgcagcgtgatgctgactagttattatccag

SEQ ID NO: 201034 - DNA, 306 bp, Zea Mays
atcgcatatgaagggccgcctccagactcgacggacctgctgtcgagcgcgtggtgcagctcggctatccaagttcttgacacaggaggacacaaggagtgctcgatggccctggtggagcatccggtcatggcgcttggcaacgacaggaacgacgtgttggcagtaagtgcagattcagtactgcagcagttggtagtagcatgttcgtatttcgcttggagatgaaatttgagacgcgtacaaatctatctctatcctgatgcttttccagaagagcgaccgtagcttggtggttgacaacag

SEQ ID NO: 201035 - DNA, 429 bp, Zea Mays
gcggcttcgaccgtggctgctggtgacgattcgtttggctctggtgttttgtgtctgatgattctgggaattcgattgtgtggacagaggagtcttcggatgaggacttggattattttgcagcgttggatgtggctgcgggggagacttctccgcgtgtggtgggtgctgaggatcttacgggtgcgaggactgggtgtaggcggcgaagggcggtggcgaaacggagagtgagtaaattgtcgcgaagtgataggcatcatcgtggtgagatggagggtggttgtcttcgtgtggatgggactggcaaacgcgaattgaggataatgctgttcaactacagggagatgtgtatcatcccgaaggttgagccaatgtaatgtgtgatgccctcgctgtatgtatgtaaccataatttgtatgatgagg

SEQ ID NO: 201036 - DNA, 938 bp, Zea Mays
cacctacctcacagggttcagagacagtttggtaggaaccagctatggccggttgaatatgttcctacttctaaggagctacacaagtaagtttgcaatctataaatccagtttgcaatttataacatcaatcattcttaactttgtgttctttatatgatatgatttgtgtgtagatttgaccggcggaagcaaaagaagataacggactttcgtcaacatcatctaatatttataaatgaatgggaatcgggtgctgagaatgtatattccaacgatgagttgcacaacaacagtgattacaggcggtaccaagcttggtaccagggtgtgactcgttgtaagcttcgccagcagtggacagcggaagactacgccgacattgattcttctgacgatgaagaaacggagtatgacctgtccactagactgggaacccaagtggaggcggcacccatattagatcgagtggtaagttttactcgattttaatactcgacatgtataatttgtatgtgtgatgcaaattgtgttgtacagggtaacacattgcgacggtcggtagaggacattgatcgccaacttttgactgtgggcgacagcagcatgcgcagcttcttgcaggtaagcccacatgcatcgtttatagcctttagcttgttatgaatatgttgtaaactaatatgtctttggcatgcagcgtttatctaggcgcctacgtggagctgctgctcgctgtggctgcaggactaatgttgcacatgacgtccatgtaccatcatgtaccgacacagcaacgccctccacaggtcttggtgctagcttcgactacgatcacgacgagataggaccttcacagcttcagggggctccttcgacacagccattacaaccacaagatcgtaggtgacaccgctctccacaacgttacactccag

SEQ ID NO: 201037 - DNA, 311 bp, Zea Mays
ttgggttcagcatcatcaaggtcacacccattggtatcagcatcagtcgggtcacacccattgggatcagcttcagcaaaaactggcaccggcacttcctcagcagcaggagcagaaggaccggcatcctgatccaagcatgacactcggcgaagacgtctctttttctttttcttcccctcagcaagagaagttggttgagtggctcggcgaggacgctttgggcgaacactatcagacctctaaatatcgagagctttgccagcctctgggatgggtgctacatctagtgtttcagcaggggctgcatc

SEQ ID NO: 201038 - DNA, 518 bp, Zea Mays
gacctttgcactcttgttaccaggacttgagtcttgcccatgtacaatcaagtatggcctacaaccaccatctgtgtcaaaccgcggaacaacatggagaactattgaatccaagatgaggggtctgctaataggaggccattctgaaccacctccttgtcttgttatatagtgcagatatctcaaatgtgaaggctggggattcaagggaaagaactgctgtataaagtccctgcgagcctgcttgtagaccatttctagtgtcctctgctcgccagtatatattttgcgatacaaaagcagtccggccaacatgaatgcaagcactggccaaccccctctctcgcaatgcatcaaaagcatgttatgttgtccttccactgatagccaattttcacatgatttcaagaaatggtggatcatctcgagctgaagcaacggacatccttcatactgttgtgggtagtccattactgtcatgtcatactcagataaaatatctgatatccggcttcttt

SEQ ID NO: 201039 - DNA, 350 bp, Zea Mays
caatttataggagctttaggcggcggctccgaatttgggagaagagtggagcttatcttcctggtgaggcaatcaccgaggctcaccgtggagcgcatgcgttcgcctagcgactgccactatctcggggatgccacgatcatggcaatgtggtgaatcaggcgactacgtgtcccttgctgcgatcacggcgagcaccggtggcgatattttaccgaacgcggcaggcaagtgggtacggcggtgactcagctccggctaagaccttcttccccgagatctttttaaccctcacggttatctactcttcattggcacgaatcgtgacatcagcgtgaatcgcagtgcgg

SEQ ID NO: 201040 - DNA, 287 bp, Zea Mays
tcccccaccacgaggagagcctggtgagcccaagcagcctcagcaaccagaagggggagggggtggagcattcccacgcgttgacagggaggccaacgtcattttcggaggccacggatcgcaagagaacaaaaggcaacagaagctcaatgaccggcaggtcttggcggcaaccactagtgccctagctccttatcggtggtcagagcacgcgataaccttcagccgggtagattagtggctcaactttgaccaccccggtaagtacctgctgctcgttgatccgg

SEQ ID NO: 201041 - DNA, 293 bp, Zea Mays
ttgtgctatggcacctcagatcctcctcgtcgccctcatggcggagttgctgctggtacagctcacgtcgcagctttgtttcgaccgcccttcttagaggggtcgcaatgttctctgatagacttcaccaccgcagccaagtttttatatcagctcatgagacggacgcttctgccacggatgggttacagggaggctgctactcatatctagctttggctacttggtgccctggtctctcattccgagtttgatgttgtggatttcctcatttgtgagatcgaggacaccgt

SEQ ID NO: 201042 - DNA, 272 bp, Zea Mays
gaaggtgaactcctttccgtcgtcggtcgtcaagaacatgggcttgcatcctctgttccagttcgtcggatcgaccatctcgtagtccggggggcatctgcatctgaggccacccaggtagtcgcagagcccgttcctcccacacagtccatgcacatagcacatctgtatgacagcctgccccgtgacgcgccacgcccccgtcgacgcgttcaagctgtacatcctgaagttgccgtcgtagccaatcgtgatcctcctcttgacccctg

SEQ ID NO: 201043 - DNA, 587 bp, Zea Mays
aacctgaactccgcctatgttgattggaagacttccttgagtcgtttcaacatagccggtcccaagcccggtaaaggaggagggttgtgttaggtccggcaaaccaacgtaaaaaccagccaaatcttatggagatgaaaccacaaagaaaaccgttggggtgtaaccctcttagcgacgcgtcatatcggaacccgggtatggtgttaaatgagcaagggccgggccgtcacccctcaagtgacgcgttgtctcttgatctggagccggtgataagtgagcaaggatcgggtcgtcgcatccttagtggcgcgctacatcggcgcccgggtgtagtgaaaaatgagcaagggtctttgcatcttcctcggcgggtgcgaagggtaaggaagctagtcaagccaactagggtccgtgtaggtagttggaacgtaggttccttaacaggtaagttacgagaaatagtcgacgttgcggtgaggagacgggtaaatattttatgcgttcaagagaccaagtggaagggacagaaggcgaaggaagtggaaggtacaggtttcaagttgtggtacacggggactgcaaca

SEQ ID NO: 201044 - DNA, 351 bp, Zea Mays
ttggcaagtggtgcaagttctcaacatgtaatcatcaatgttgacaagattgtttttaccatcactcatgaagtctctgatactgatatttttttcccacttgtccaaacctgcataagtgatatccgtgttgttacgcaaatatttccatctaaaatcaggattctaagttcattcaaagtctcagcgcagtatttcattgcacgaagaaatctgtggtcagtcttgtgctaatatctatatttgttttcctgtctaattgcattttgctggtttcttccaaacttgcaaggagatttggaattgagttcttgctatttgacacacagggaagaactcatctctcctatc

SEQ ID NO: 201045 - DNA, 287 bp, Zea Mays
ggcggcgaagggtggtgggaaaacatagtgtgggtgaattttcgcggagtggcaggtgccgtcgtatggggatggagcgtggccgtctccgtgtaaaccgggttgataaatgagaattgttgtccttgctggctggggcgagcataggcgagggggatcttcagaagctttttgagggtgaggaattgaggataatgctgtttaattacagggagatgggtatcattctgaaggttgagccgatgtaataggcgatgccctcgccgtgtgtatgtaataggcgatgc

SEQ ID NO: 201046 - DNA, 677 bp, Zea Mays
tttaattcagccaaaataatgtaatagttgatgttctgttcatttatcgatgaagaagccacattacttccggaagcaaaccgctagctataagtgtgaccatggcaaataaatggttggccatttttcaatgacggtgtacaatataaaatcactagcacaatatgtggctgacaagaggacaacatgaccttcgcacctgcagagacaacctcacttctgcatttgcaacactgcagatatgtctgttgtctacacaaaacaaacaccatttatgagccattctgagcacaccagaaatttaaatctgagaatttttaacaaactgagaatttctaaatggacaaaacttaagtacaaacttatagaccctgcaaggttattgaaaaaagacctgatgtgcaagctagacgggcaaggtagtaaattatccatatcatttcatcaaaacaaagaatccaaaattcataccattgacaaatgagttgctagtgttcgcatgttcaaaggttgttgacaggtcgtcactgcaagggaacgggactgtcgaaaggggatctgaatgctcgtcaccaagggctgccagatgaggatggtctagtacataaccttccatgagaccatgaaaggatgcatctactcgtcgctgttgatccatcgggtgtgctggacgccga

SEQ ID NO: 201047 - DNA, 644 bp, Zea Mays
gaccaggtccctccaattcattcaatggggcacacacctcaggaaatgctactggggcgggaggaaaagattgacgcagagcatagaaagaaacatgttggggactcattaggaaatacaaatgatattgtcttccatcaatctaatgtgactgaatgtgaacaaatagaaccaacatctgtggggcatgaccttttcatcagagaccaaatggataaccataatcatggatcgtcccaatataatgaaactatctctgaaactgtgaccagtgacagttctcatcaaccaggatcaactacatatcaaaaccctaaacttgaaactactgagggtactgggatatcagtactattagtccctaagtcaaacagcaataaatggcctattgtagaagggagggccctggctgctacaaatatgttgtgttcagaaccctattatgcaagagatggtgtcagtatgatgaagcgtagctttggactggacagcacttcagctgcttcttccagtgatcttggatcttcaaggcaatcaatcatatgttttgagcgccttaggagtggtaagaggggtgacttcgagaagtctcagataagcagcactatgagtcgtcaaagcattgcttctgtgtcagatatgtc

SEQ ID NO: 201048 - DNA, 274 bp, Zea Mays
cgcgttcttcgctgcatctggttcttctcggactccgccgctccccccgcagacgcaagaaactgctggccatggagcccccatccgcccaggcgatgtccgcgactgacgacttccaggacaaggccgtcgacgagtggtaaggggactcgactgctccctccaaaccccgatccttctcgtttccgctttctcctttacgagttatatatgaccgacggcggtccgccgtttgtttggttgcagttgctcttgctgctacgattgctgctcc

SEQ ID NO: 201049 - DNA, 291 bp, Zea Mays
ccggtgggtcagaaccttcatctttttgcccttcaactcagctgctttagccgaagcagcagtctttctctttttctcttgccctcaaagcgggtaatggtgatcagggtatacaaagccaatagcatcaaataccctgttcaatctcttcttgccccgacccccgaaagctgcggacaaagcattatcttcggccttggagtatgccccaagtagctcatcactggtagcttcgatacatttcaactagtcatcgtctggctcatcaaacttctccctaaatatgaaggt

SEQ ID NO: 201050 - DNA, 275 bp, Zea Mays
gcgtgattgcggtgcgggtgaccgtggcgggcgtaccatgcgcgcctgggcatggaaggacgccacacgtcgataattttcggggattgggcacaggtgatggctcgcggggatttgcagggagtcctctcggtgtcaggatgctggtgaagctatgggtgattatgctgtagagtttcgtgaaaagagaatttttggtttcttatctactggctcatgaattgatgattaggttttggaattcaagggatgagaaatgtaagcgcagtttttct

SEQ ID NO: 201051 - DNA, 335 bp, Zea Mays
aaggtttgtaaggccattcatattgcatagtgcacgatatgcgattttaattgtctctatttaataatatgttagcataaattatcagaaagtacacatttcgggagttcgagaagatggcaaataaagaatttgtacggagatactctagtgctgcttgtcttccatcaaggtatatggaagaggagttttggcatgaaatagcttttggcaagatggagtctgttgagtatgcatgtgatatcgatggtagcgcattttcttcttcttctcatgaccaacttgggagaagcaaatggaacttgaaggtacttattttgtggcccagtttgtac

SEQ ID NO: 201052 - DNA, 324 bp, Zea Mays
attttgctgaccttgaaaagatctccttgccgatgggtatgaactactgtagccccgctgtcttcaccttttacgccggcgacgtggcttcgtggccatcgccggagttgccgttttgtgccgcgatggtgccacgtttccacccgttaaacacgtcgtcactagccgccctagctcgacgatgaccgccgtagcttctcaaccggtaagtgccactgtaagccgcgccgatgactcaccctgtcattccggccgccgcgcgtcctcctcaaattcgtggccaccgctttgcccttctataaattgagggccaggccggttgcg

SEQ ID NO: 201053 - DNA, 275 bp, Zea Mays
taagattacacgcggtaaagaagagaatataactgagggtgaggtaagtaaaacactgctcccaaattgggatgggagattggagattgtagataacatacataatgtaatcgccaaggtaaggttaagggatgagaaaggcaaaggcaataacaaacaaaaacacgacaaaggatggatttaaaaactcgaaagtgacaaagaagatgatacgtccaagagaaaattaggtataacatacaactctcagattgagatgggagagagaagatttt

SEQ ID NO: 201054 - DNA, 301 bp, Zea Mays
gagattcctaggtattttatcataggccttttccaagtcgataaaaaccatgtgcaagtccttcttctgctccttatatcgctccatgacctgtcttattaagaaaattgttccatgattgaacttccaggcatgaatccaaattggttcatggtgatatgtgtcattcctctcaggcgatgctcaataactctctctctcctagcttcatagtgtggctcatgagcttaatccctcgatagttggtacaactttgaatatctcccttgttcttgaagattggtactaatgtactcctcca

SEQ ID NO: 201055 - DNA, 303 bp, Zea Mays
actgaatctgaagtgactggaaggaaggatcagccttcacgatcatttggaaaggtatctggtggtgttaatcctaaaccaaaaacatcatccaattcccgagctaatgttaaaggctcatctggtagggctaatgtcaaaggctcatctggtagggatgagattacctttacagaaactgagttccgtgatgttagtttgcagcggaatcgtctaccacggaaggcagaggatgtagggagaaaggttacaggtggttctgattcagattcttctggtcgccagggaacaaatttgagcagg

SEQ ID NO: 201056 - DNA, 282 bp, Zea Mays
gaaaacaaaactatgtcatccactataaatgagcttaaatcctccctaaaagatgctaaggataagtgtgacaaattaaatgaaacaaatagggagttgaaagatagacttgtaaaaattaaggaggagtatacaaaaattaaaattgaccatgataatcttcttgttgcaaatgagcttttatcttgcaatacacatgaggctattaaccctgctattaagattgatgtagcaacctcatgtgatgatttgagccaagatgatcaaactagtcttcatgat

SEQ ID NO: 201057 - DNA, 304 bp, Zea Mays
tacgtgtgtaactatagtttgtatgatgaggctgtgcgccttcgcgcatccggctatgttcataggggcgttgcacacttggtctagcacatttattatgtcggtccggctgcgcctgtagttggtctttgcgcggacagtttctcgatgtagacttttgcacggatgtaatgtgtcttcgattttgcgcactcgttgtgctagtccggctgcacccttaggcgacttttgcacggatagtcttttgaagaagactttgattttgcgcgcttgttgtgctagtccggctgcacccttaggcgac

SEQ ID NO: 201058 - DNA, 334 bp, Zea Mays
ctcggtaacggggacagcaccgacaacaagtacagtaccggcggcgagagtcaacaatgtcacggtgcaaacagcaggacgctggggaagcagaaggagcaccgatgaagaaggacgaagctccagcaagggcaacagggactcgtcgtcatgcgcgcacgagaaacagcgacaagacggcgagcggacctaggtagcaggggtgagtacatggcgcaggtatcaacaacgaggggcagagcgagctgagcacgtagtgcactacagcgagcgggagggcgagagcgctggagaaaaggtagagcagagaggcaggagggcggtttcattttat

SEQ ID NO: 201059 - DNA, 410 bp, Zea Mays
cggtatggactggctcgagtcatgcagccccatgtacatcaattggaagcataagtggatctctatgtcatcagtgcaggggccaatcttgctttagggcaaccaacatcagattccaccgggcactattgtggaagtccaacacattatccaccactcaccacctgatgctcagctcaattcgctgtcgggtttgaatctacctgagtctgtcaccaaactgttacagtcgtatcacacattatttgaagaacccaccacccttcctcctagtcgctcctgtgaccatacaataccactggtacccggcgcccgtcctatcaatgtgagaccataccggttttctcctgctatgaaggatgaaattgaatcccaagtaagcaagatgctggagactagagtcattcaac

SEQ ID NO: 201060 - DNA, 326 bp, Zea Mays
gcttgccaggtcatagtgaacgcgctcgtcgtcaggggttcgctgcgtctctcctcctccgtgctgcacgttcacctctctctggacgacgcttgcaaagcggccatggcagttcaggaggaagtacagtttgatctcaaggttgacgaagcagttattgccccaccagaacagggcgtgactcccaaccccgtgtttacttcggtctgctctgatgttccttcgtgcactgctcaacacaatccagctggaaaggagcagcctctggggctctttttggatttgccagatccagggataccggacttcgggggagcaactcgtcc

SEQ ID NO: 201061 - DNA, 297 bp, Zea Mays
gaagagctgacgtaaaatccccagccctgccattttcttccgatatacagacacagcttctgcgtcttcatttacacgagtccctgaacgacaccgtctcatctcacctaatgcccgcttccgaatgtgtaggtacgactacttgtttgaccctgatgagtccgaagactgcagggttccatgcctgtgcaaggctcctaactgccgtgggtacatgaactagaagactaaccaacctcagaaacagggactaaagactaacgtgaccccccttacagttacagaggccaaaggctg

SEQ ID NO: 201062 - DNA, 437 bp, Zea Mays
gtcgttgatcgccgtccggattcgtgcagggtattggatggataacgccagaaaaagggtaactcgtacgtggcaccatctcctgagctcggccggagttactcaccggccgccgtgactcagtgagctctcgccgcgctgtcgcacatgctttgattcacctcactatgcctcttccttatgtggttgccatgcgttaatagcccacctcgtagccgtggatcgatcaccggaccgccgtgcctatatataggacagggagccacggcgaggtgctcgctgttcttcaagtaagcttgagtacaaccaggaattcacattgccctctccaccttctcccaaatcgaatgcgcacggtgaaagcacagcctctcacggtcctatagccccgatcccatctcccaatttcgcccagagccgccacgacaccgttttcc

SEQ ID NO: 201063 - DNA, 290 bp, Zea Mays
gccctgtttccagtttcgagtttcgacatacggtatgagctacccaatcacacatctacgcggagtaattccaaaaccagctgacacacgcacgcacggccaccattactatacccattatccctcccgccgctcgtgtgagagacatgttggatctaatgaagacatcttgtcccacgtcaaatcaaaacggtggcatatggctcgatcttaaaaccaactgtagcaataatatgtataaaattgtaaaataaataaggagattaaaagagctatgatttatataactc

SEQ ID NO: 201064 - DNA, 580 bp, Zea Mays
gggcagttattcttgaagtgactggggtctccgcagtgccaacaggcatttgctggtggttggttgcttgcgactgagggagcctgaaaagagctctgactctgctgattgaaacgtgacggagtgggtccagctggtctattgaagcttgatcccttgggtggaaacccaaaggatcgagttctctggtgccggtcttgctgctgagctcggaggacttggaatttcctcttgaggtgacttttttcttcttcccttgctctttccacttgtatggctttgtttgagaggtgcgagaagctgaggaaatcttggctggcaaggatggtcttgagttctggtcttagccctttcagaaaatgggccatcttcttggcttctgtgctgacgtcgtcaggcacgtagcgagccaattctgtgaatttgtgcacgtactcactgacagatcttccaccttgagttagttaccgaaattcatcttccttgagctgaacaatcccttggggcacatgatgctctcggaaagcagtttcaaattctgcccaggtagcatctctgacgacagcgctgaaggtatccc

SEQ ID NO: 201065 - DNA, 475 bp, Zea Mays
ccctatgctgctcggcgctcgccaccatcgctccgtatctggctaacagccctgctcagcgctcgtgctcgccactccagtgctctagcttgttgtctctgctcgttgtccctttgccgttcacgctcgccactgcctccctttgcttcccctgcccctgctctcatccttctccccttcccgattgatctgctcacattctcctctgattttggttatgatgatgaagcaacaaacaatagtgttggctatgatgatgagcaagacaaagtcaagaatgatggtggtatagatgatttggatgatggttattgagatatgatagagggagattgaataacgcttgtgtgcttgcaattgtggacattgtattctactttagttgcttttgtgctatgtttgtgcctttgtggttgtggacattgcatttcactttagttgtttttgtgttatgcttgtgcttgtggactattgc

SEQ ID NO: 201066 - DNA, 457 bp, Zea Mays
ctggccaccctggcctattagaagaagggaggtgggctgaactgtgcccgtggtaaaccgaagcattaaaaaatgtttatctaaacaaaaacaaaccaaataattaaatttgtacgcacaatgtagaacgcctagagtaaggaggccatataaagaccgtccgccaaatcattccaagggtagccagtgtttgtttcaaagcgcagaacattatactattgccaaaggcagaggggcctttaatcactacaacattttccatctgattccatccctacaatcggcatttttaaaattatattgtacgaccacggggcttttattacaagatgatctgtttatttcgagatgaatgttcgtgagaatcagtcgcagaactggcagtgacagacgcctctcttggagccttcgcaccagctattcttgtacttggtatggtactgcttggcgtcgatca

SEQ ID NO: 201067 - DNA, 354 bp, Zea Mays
tgagtttgaaaatgatgaaaatgattccagaaaaacgccaaacatgaacaacaaatgatgttgattccatggcttcagttagtttttctttgtacgttttcacccttttattagattgtgttatggtgtgaaattattgctcaattagttattatcgtttgtagttgggggtcatatcttttctttaagcgtagtcctgaaaataacacatctctacaattatgtttcataggcatttgtttgaagcaatgtgcacatctcaatgattcttgctgtcagttacacttgacagtaataaccatctaagaccccctcacgcagtgcctctaggtgggagaaaacaaaaaaaggttc

SEQ ID NO: 201068 - DNA, 529 bp, Zea Mays
ggcattgattttgcaccccgagatttcattatggattgctctttcccattccataagcaggacattattagcctggtacctgtacataaggtaaagtttgcaagatagggttattatccttctgaaattaattgggttcatcatatctaatcagttatattgtttctttgatgaaatgttttgttaggcttgacaggaaataacataaaaatgcaactaacttgatttttccataatatgcagcaagttgcatgctcatctgcagatggtaggcaactgctagaatcctctaaaactgcccttgacaagggtaaacttgaagatgctgtcaattatgggaccaaggtatctttcttaaatcacgtgtaaatgtcacatcttttttcataaaatattcactgatttgtattttctctacgacaatacaggctctttccaagctcataactgtatgtggtccctaccaccgaatgacagctggagcttatagtctgctagctgttgttttgtaccatactggtgattttaa

SEQ ID NO: 201069 - DNA, 325 bp, Zea Mays
ttgttttcgagcaggaaagcagtaatcaggataaaaaattcgatcacatcgaaaactctattcagcctcctcttgccgcgagcgccaaaggcagttgtcatggcttcgtcttctgcctttgaataagctcccaacagctcatcgttggtggcatcaacagcctcaagccaatcatcattcggctcgtcaaattgacttctatagcgataggtgtatcttaagtaaccagaccaccttcgcttggagctgacagcagtttccttcggtatttcccagtcattcaccagtggccacactttgtaagcaatatgctcttgtaccaaat

SEQ ID NO: 201070 - DNA, 413 bp, Zea Mays
tctacgcgactgtatggatagacccagatcatcactggatgaggtttcgttttgagcgagaggatgtcactattactgccagtcagattcgccagctctctggatttcccgagtcgtcgacccgacttcacagcttatgctgcggcacctctgaccctcctcgtcgccctcacggcggtgtggctccgggtatagctcacgtcgccggctctgttccgcccgcccttctcagatgggtcgcgacgttcaccggcagattttactacagcagccaagtacttatttgagcttatcagacggactcttctgccgaggatgggatacagggaggctaccacacatatccagctctggctccttggtgccctggtctctcactctgagtttgacgtcgtggatttccttatttgtga

SEQ ID NO: 201071 - DNA, 331 bp, Zea Mays
ctcgagcggtgcgcgggtttcttggcctggcgggctactaccgcaagtttgtgcccaactacggcacggtcgccgcaccgctcacggccctcctcaagaaagacggcttcacctgggatgacaaggcagcggcggctttcggcgccctcaaggccgccgtcacctcggcaccggtcctcaccatgcctgacttcacaaagaccttcgtggttgagtgtgatgcgtcgtcacacgggtttggcgccgtgctcacccaagagggacatccggtggcattcttcagtcgtcccatcgcccctcgtcaccaggcgttggcggcctacgagcgcga

SEQ ID NO: 201072 - DNA, 740 bp, Zea Mays
atcagggctgtcatacggggaaggaggaggatatcggtgaggagagaaggggatttatgtcccagcgaggtgacaggggcgaggggcacgccaggagacccggccggtccagcagcttcggcggccaccgcggaggcggagtcggcggcgcgggcaagggcggcgcgggatcctcaggccagcctcctctttctaccaaccgcaggtaaattactgacctcgttgattctgatcgtcctctgcttctgcgccgcacgattggtttgatctcgccagggatgatagggttttgatgagacttttggatctcgattgcagctttaggaagcccggcaatggccacggcgggcagcagagggtggtgaaccagcccgacacaaccggtttccaacctgcccccgcgcctgccccccaccaaactcctgcgcgaccgccacctgcacctcagaatgcggctgtgcatgttcccatatccgcaccatggccgcaacctcaaggtgagtgagtgaggtgtcctgttcttctgctatcttgtattgcctctggaatggtgcaaatacgaaccgatgtgttcctttgattgcatgtgtttttctttgactcaccaggtccacaagtgtcatcttcatcagctgccagcgacaggccggctaatccgccattacctaaagctactcatgctgctccaagggctccaccaaaaagctctaacccaccccttcctcagggaggatcgaaag

SEQ ID NO: 201073 - DNA, 697 bp, Zea Mays
caaatgtgttgatggctttgaccatcactgcagagtaagatctgtttttcttatgatttcccttgatactaagaaacatgatacctcataagaattatggtcttattttgcctgctgcctctgctcttttgtagtggcttaacaattgcatagggaaaaggaactacaaaggtttctttgttctaatggcttctgcagttatcctggtaagtgtggatctcttgacaaatgacaaactgacacaaatcggaatgtaaagaggtcccctctgttattgcatttacctttaacatctgtaccaagtggagcaatgcatatagttagcaatgttgttctgcatccttcctattatggtatcatggtaggttcttgacaggtctccatggtttgtacaacttgatccagcttgtgatgcagtggttgtcggggggacttgtgttgattctctgtattgtgaagcgaggagaattctccaggcaggttgtcacaaagttgggaagcagcttctcaacagtggcttttgtaattgttgtggtgagttgaacaattttttcttcctttacttactgaatatgtgtccgcttcattgaagttcatatattttttggtaaactaaaacaatgctctttgaaaaaggttacaagattggatgttctaattttttgcaggcaacttgcaccattttagcaatggttgc

SEQ ID NO: 201074 - DNA, 326 bp, Zea Mays
cgccaatgcttgcacccgtgcgaagccccgtagccagcaattccattgtttgcatgaatgaaatcatcgagacgattgacacataataaatccttacagacttgctgtagattcatagtgctagatgtggacaataaagcgtcgctgtatgcttctccttttctttttggcgtgtgtagcggcatcctttgttcctgcctggcgtcatcccacttagttgttcttttgcattatgattgaaagccttcatgcttcctcggtcaatcaccggtgcgcactgggagcatcgccggaaaaaaaatcttccgctaagagtagcttctttc

SEQ ID NO: 201075 - DNA, 271 bp, Zea Mays
ctcctccccgtgctcagccgctcagcctcgtcccccgtgctcagccgctcaacctcgtcccccgtgctcagccgcactccagagtccagatactccagcccgccgctccaggccgcgctccaggcctgtcccgctgtccgccggccactacagagaccgccctctagctttgcttcactggtgagtaatggcagagaccatcctctaactattcagcctgattaatcgaaatctaccattccattattgcagaatagattggaggagaaat

SEQ ID NO: 201076 - DNA, 350 bp, Zea Mays
ccaggagcagttgagggtgatagacctcagcaacaacggcttctctgggctgaatttcagcagtgggtatgccggctcggcgttggtgtacctcgacttgtcaggaaacgagcttacaggagaattcaccattgccggccggttccagaacctgaggcatgtgaatcttgcacacaaccagttgtccaatgctaatttgctggtgtccatgggtgggatatctgggctagagtatgttaacctttcaagcactgggctgcatgggcaaattcctgctgatttctcttcccgattggttggattgaaggttctcgatttgtcacggaacaatatcagtggggtagtcccag

SEQ ID NO: 201077 - DNA, 412 bp, Zea Mays
caaccctctggttttgctgatgctgctcacccagacttcgtttgcagactgaatcgatctctatacggtctgaagcaggctccacgggcttggtacagtcggtttgccacgtttctgctctcgatggggtttgtgaaacaaagtgtgaccctccttatttgtttttcgccgtggtgatgatatggtatatttgctgctatatgtggatgatattgttttgacagcttcttccaccagtcttctacgacgcaccatcacatccctccagcaggaattctcaatgaaggatcttggcgaactccatcatttcctggggatgcaggttcagcgcacaccaagtggattattcctttcccaacgacagtacatgattgacattcttgaccgcgctgggatgactgagtgcaaatcc

SEQ ID NO: 201078 - DNA, 277 bp, Zea Mays
cttccgctgaagcgtctccctgtgacatccttgggcggtccaagtctcaacgatggacggacagcagccctgactcgccggacggagatcagtccatattggcggcgggcaaccggccgtcttttcgtgacgtcgtcctccacccgcgatcctctcctagtgctatttcaaggtcgccgtcgcccagaatccttgccgagcagtcgtcttccggggcaactgctacgcagccatcatcgagtgtgccctccccacttgagatcgcggtacagagccc

SEQ ID NO: 201079 - DNA, 310 bp, Zea Mays
cggggtcactgggaggcaagaagctgattctgaaaggcaaggcctcaccaagttatttccatggctatctaaacctggaaataaaccatcaagccctgatgatttccgaggattgatgggttatcacacattaagctaacttagtagctcttgcaaggtatgtcgagatttgagcacagcctcacttgtttctatcccctcagaattacactgcttcatattcttgatgttcaccaaaatgttcctttcaaactcatttaattgggtttacttgatcagttggatcaactctattcactctttaaagtac

SEQ ID NO: 201080 - DNA, 335 bp, Zea Mays
ctttgccagattgatcctgaatctcatatacacttgatggcatcttgcagttatgcccttagttgctggcaactaattgcaaactgtttccatcttaaactgccgtcacaagtcccacatggaatatcgcattggtggcagacattggtccggtcggcgcggaacgcacatcaactgcaggtgatgatctacactatatggaatatttggaaagagcgatgtcgcagggttttccattgcaaggaacaagccttccaagtgctggcctcacaaatccaagaggagatctgctcatttcggttggctttcgctacaactctgtattccatatcctt

SEQ ID NO: 201081 - DNA, 422 bp, Zea Mays
aactgggtccgtgtcagcagaggtaatggacttgttagtggtcattgaacgcgactcaaaagcctccactaggcgtttcatgtactcttccctcgaatcttttttcttctttggttttggagaatcatgtcgcatcttacgcttcccagtcgcatttgtgcatgggtcaggtgtgttgttttcacccccacctaaagtggcttccaaatgatcgtcagatgatgaattagcatcctcgacgccaggaacaagggttctttcatttgtgcagacaatgggtccaaacataacctttagctcgtcctcattctctagggggggtgttttgaacataatacaacctggcattgcctgcagcaacatggtagttcctagtttcagatggccaatactattgttagtctacaaaaaaaaagatctac

SEQ ID NO: 201082 - DNA, 569 bp, Zea Mays
ggggtatccgagaaatacacaagctgtggagcgtggtgccagcttgtgtttggaggtggctgtgaggttgggatagcaaaggcaaccaaaaacacgaagaatggtgtagtcagggggttgctggtggagttgctcaaagggaactttatggccaatggctgagcagggacgtctgtttaggagataggtggctgtagctagcgcctctacccagtattggggcggcatgtgagcatggatgagcagtgtgcggcagataacgctcagagaacgaatgatgcgttcagctttgccattttgagaggaggtgtaagggctggagaggcgtgagtgaatgccgctggatgcaaagaatatggtgagggcattattaacaaactcagtgccattatcagcctgttgatagggaggctgaactgtgtgtggacataagcgcaaaaattaatgatgtgagaggctacctcggacttgcggactagagggaaagtccagcaaaagtgagtgaagtcatcgaggatgactaggtagtactgcgcaccagagacactggcaacgggagaggtccaaac

SEQ ID NO: 201083 - DNA, 390 bp, Zea Mays
tcgttggatcggcaatggatgggtgaggggtcgcggaccggtgatccatccgtgaacggtcgtgattaaaacgtcgacaccgttttgggtagatcacttccacatcgttcatcttcacgtctagggtcgagatcgggtccatgttactttgaatcgccaccctcggttccggatctatggtttcatataagtatactacggtgatctaatcggggtcgttcaattctgatctggcggctgagattgaagcataccccttcggcccgtacgttttacaaaagagaccccctgctttaaccaaatcaacccgtcgtccgtaggttgttcgcctgagtctaggaaagttatagtttgacccgtgtactttacagaatttgatgtgtggtccag

SEQ ID NO: 201084 - DNA, 431 bp, Zea Mays
aaaggaagggggttttgcaggtgagccaaaaaggtttagaaaattgtggggcagtaacagtacaacagttctgagaacagtgcatgtaaatcaggaaaaagatgctatagctttcgtggaggctgaagaaaaggcacctaggttttcggaagttcctccttgtgatgaaagggtggcatcccaagaggcaactgattcccgtttagaacaatgtctaggggtggggaattctctaggtcacgaaaatggtgcacaatttgagacttcatgcgtgaataatttaccttcagaggtccatgcagacccagaaatctccagttcattttcggaatgttgttcatcaggaagtcatgccaatggtaatgaaaatcattctgaaagcacagctcaggaaactgcatttgtagggaactctagccaaaatgtcaaca

SEQ ID NO: 201085 - DNA, 1005 bp, Zea Mays
ctaacatagggtcttagttctatgcactttatataatcagctcatggggctcaatgcaatataattttattctcaaacaatacctcctctaacatggtatcacaaatctaatgttgcttttgctcctcccctggtcgccgcctttctagggcagtggcccctctagggctgttgtcaccgttgtgtcgtgtggtcgtagcaacgtacacacatcttctccctctttctcccgcacccatgacaggacctcattgactgacgaggagcgcaccacgctgaggatgaggttgtggcctttcgcaagaagatcgacgacatgttcgctgcggctcaggatgcggacaaggaagctgccaatgcacacattcgtgtccaggtagccactcatctcctcgaacaggagaaggccgccgccctcgagtagaaggctagcgccgcttgacatgatttgttcctacaacaccccacgatcgcagcttacggggctgccgtcattgccaacctctacgtctaggcagctactgtttccaacgttcgagtgttggtgatggttgtccccgtgtcctcctttgacaattatgccggttggcttgattaggtgttgcttgctctcaagtgatacgcctttgtcaaccacatcttgtttgacccttcgttggacaccggtttgtgctgggatcgaatggacatcatctgttggatctccgacaccatctctctaggttgtgtcaggtggctagggagcgcaatggcacgacatgccatctttggctcactctcaagaatcagtttcttgggaatcgtgagatcgacaccctctagctcgacactaacttccacaccttcatccagggcgacctactcgtgggtgactactgttgcaagatgaagatgtttgactttcttgccgacttgggcgcccccgtcaacaaatggatcctcatcctcaatattctttgaggcctaaacaagaagtttgagtgcattggggccatcatccgacgc

SEQ ID NO: 201086 - DNA, 415 bp, Zea Mays
tagcacaataagtgcgcaaaatcgaagtcttctccaaaagactctccctgcaaaagtcgcctacgggtgcagccggactagcgcaataagtgcggaaagtcgaagtcttctccaaaagactccccgtgcaaaagtcgcctgcgggtgcagccgggctagcataacaagcgtgcaaaatcgaagtattttccaaaaggttcggatcaacgaaggctcgtagtttcatataagttacggttacatacatacaacgagggcatcacactttacattggctcaaccttcgggatgatacccatctccctgtagttgaacaacattgtcctcaactcctcaccctcaaaaagatttcgcaactccccctcacctacactcgccccaaccggcgaggacaacaattcccgcttgctagccc

SEQ ID NO: 201087 - DNA, 387 bp, Zea Mays
catccagcagcttgatcgctattttaattggtaagttctttgacatatttttgtgtgtttaagctttcttttgtgtgttactatgaatattaactatcttttgtttatctgcgctaattcatagctttgttgtctgataaattgatcaataaacaaatcattaacaacagttaggtctgccatgtgtgaactaaagtaatgtatgtgcatcactaaccatttggctttgtggtgctaattgttatttctacacagcctcaaggaattggcttcaaagcacagtttttcagaaatacttactgcggaagaagcctcggtgtatgttgtcacgtctgagaccagtgctcaagcgcctgatggtgacacacatcctgatgatatcgataa

SEQ ID NO: 201088 - DNA, 282 bp, Zea Mays
cacagacagaggacaagctaccagaattggacgtgctcttatcctggaacatccgaaacagtagtggggcgtatccattccacaaccagcatcatcaaaaaatgtggacgaaacaaggcaacccagttaatcgtgtaggcaggcatctccatgccatgcacgagattggcacggagagcaacggatgggaatcctcgccgtagggacataactccgcgtcgtcaagctaatcgcgatctgagacgcgggaggagcaaccgcgctttcatgagccagagccta

SEQ ID NO: 201089 - DNA, 1060 bp, Zea Mays
tataccagagaattggaatgataaatgctttagagcagctatcaagatctcctccaaagcaaataggcagacttgccccctcagtatcaactttccttctaacgtgttacaaggatgatggtaaagttccattttatgctttttagcctcatctaatgaaattgattcatagtttttctgtattatcttattacaggtatcgaggaagtgaaattggcgattctatcagcaatagggtcctgggctttggtatcagctgaagctgtccaaccagatgttgtttcatttattgctgcaggcttgaaagagaaagacactttaaggaaggggcatctgaaatttttacgagttatatgcaaaaactctgagtctttaacaaaggtaagggagtaacttccagttttgtatacataatgaaccatcatcctgttcactacatttttttaataaaactagactctggggaaaggtgccccaatggcatttattttaagaagagactgtaattctgggtctagacaaggtcctgaaggctgcctgcccaggcggtgtccgttaggaccctttttctcctcttaatataatgtcacacagccctcctgtggttcagaaaaaaggggaacaccaccagggctcaaaccctggtgggggcatctaatttgacggacctaccacctagtagtgcgtctgcttttattatcattattatgcttttctttgcttaaggaagagtggttcaatggctgaaaaaatgcaggcactaaaggctcatattaactattaataaaactgatctgctccaggttgcttctttattggatcatttgattcagttgtcaaaaactggcttcagcaaggcaacacagcggttggatggaatctatgcactctttgcagtatcaaggcttgctgctgttgatacaaaagcaggttttctacaatttcttcttgcatccaagttcttttttgtatacttgccagcatattttgccttaaatgtggtttgatgaatatgcagatggtgccattctgaaggagaaactgtggacattgattgctc

SEQ ID NO: 201090 - DNA, 343 bp, Zea Mays
aaatcatgtggctaggtggagaaggtaaaaagacttggactggttgtgaataaccaggttgctagtgagaagggaaagtcaagaaacttgggtgcaacgaaacaacatggtagtgaagctagatcaagaacttgttgccgatggactaagtgcaatagcgaaggccaagcgaagttgtgattgatggaccaataaggtcacctgatgacatagagtggatcatatcatcaatgaagacatttgttgattacaagtggcttgatggaaccctaaaccagattgcttgtgttcaatagaatctgaagtgtgaaagtgattgagctttcgtagttcagtgtattct

SEQ ID NO: 201091 - DNA, 318 bp, Zea Mays
gccatggtacggcacgtcaggcttggctcgcccttgaaaaccatttcattggaaatcgcaagacacgtgctcttcacctcgacgccaccttccgcaactttgtccagggcgatctcactgttggtgagtattgtcggaagatgaaaggcttcgctgatgctctctccgacctcgacgcccccgtctccgaccgcattctggtgctcaatgtccttcggggcctgaaccccaagtatgccaatctccggaccatcatcacccgttctgttcccttcccgacttttcacaaagtccgagatgatttggtcttggaagaga

SEQ ID NO: 201092 - DNA, 315 bp, Zea Mays
agccggaccggggtcgtattaccactagctttaatagtaatcaagaagctaaagctagtagcggtgtcatcatcagctacctacttgctctctggctgggtggttaagctattcgctaccgtacggccggtcgcggggggtcatcacatcacatcacacatgggaggtgctcttatccatcattcgtctagactagatctacttcactactagaggtgatggtgtttctttcgggcttgttcctcccttcgatccgctcccaggcaacaacaactcagctactactagtagtttgctggtgagtcacaactcaac

SEQ ID NO: 201093 - DNA, 386 bp, Zea Mays
ggactggtggcagcgtcacagtctgatgaaggtcgattgggacaacacgtggacaatgatttcctacaacagttccactagaagtttacaaggcatactgtcctcgttctctataggaacagttgccgcacttctcttgatttcagaagaacaccaagggaagagctctgtggatcagctgcaagctattgaagaattttgtgatcgcctggctgaggaagcgcagatagaggtggtgcccgagctttctaaatatctattgatggtgatctctgctacggcctggactgattatgatgcagtgactaccctttgccccaaggaccaacttccacaacatgaactcttgagggtggctaatggacgaacacttccatgtcgacatc

SEQ ID NO: 201094 - DNA, 810 bp, Zea Mays
gtgatttagatgctgactatcttgatgaggtagacacttctttatctgtttttgttgacatgcaaatgtcctgttttttgttgtttttattattttatttcatgtgtctgtctctaggagatgacattcattttattcgtttcaccttttcaattgtgtggatgtctgatatctgtatctgtttttgatcttagtgcattctcaattggtcatgattttatacagatttaacttctttgttggttctctttttcttaacattttgatccttagacttgtgttttagggtgctcggttgctttataggaaccatcatcactataagaaccatattcctctgattaaattaatttaatttgagttctggaaatgatgagatagggaaattcaatgcgacgaaaccaaatttctcagtccatgcattgtaattttctcgtaatttggatgttttttgaataatagttagtagaactcactaaattttagccagaataaaggttagttgctaaaccttagggtactttggttttattgtttttccattgtctgcaggaaacaaagtcattgtttattgtttagttatgtttataatgcaatttggatgttgcatttatttatacttttattttgcttaactcaggatgcaaaggaacacctttttgcactggcagataagcttggtccatctctcaaagacattgacgtaagttatcttatgcgtatagttaatcttacttatctatttcattaccaaacaagttaatactatgttgtttgctaattagctaatgaagtcttctccagcaccaa

SEQ ID NO: 201095 - DNA, 447 bp, Zea Mays
gtcggctatgttttcgaagatcaatcttggtgccccaaacttgagatcatcaggtagcactgcctccgaaccatagaccataaagaagggagtgtttccgtgcaaagctcggctaggttgagttcttaggctccagaccacatacggcaactctctgatccactttcctgcgaacttttcattcttgtcgaagactttctttctgagtgcttccaatatcattccattagctctttctacttgcccgttggctcttgggtgtgccactaatgcatatttgatctggatgcttttttgttcgtagaaatcaaagaactctgagctagtgaaattggatcccaggtcagttatgatgctattcggtattctgaacctgaatattatgtcttgtatgaattccactgccttagctgaagttagagaagcaatgagcttatactctatcca

SEQ ID NO: 201096 - DNA, 328 bp, Zea Mays
agcatgacaacatacctaacaaccagtgccagcagctctgcctgacggattgtttatgtgctgtcgctgtgtttcgtgatagtgacaatacatgttggaagaagaagttgcctttaacaaataatgttgtaggggatagtgtgcagaggacagtttacatcaaggtaccaaaaaacaacagtcaacaacctgagcttcttgattccaacagatggaagaaagataagaagcactggatccttggaagttcattgtttctaggaagctctatcttgctgaacattgtcctgatctctgttatactcttcggtacttactgtactataac

SEQ ID NO: 201097 - DNA, 511 bp, Zea Mays
ggggggggctgatgaattagcggagagtcgcgctcagccctcgcctagtgaagctcttgaggcggagttgtcattgtccttaactagacgactgtggaagcaagatcgtggtctacggaggcgacgacagtcgcgcagtaacctccccttcaccggtgggcacatgtcttcctgcctgatgaattagcggagagtcgcgctcagcactcgcctagtgaagctcttgaggcggcgtgtggcagagttgtcattgtccttagctagacgactgtggaagcaagatcgtggtctacggaggcgacgacagtcgcgcagtaacctccccttcaccggtgggcacatgtcttcctgcctgatgaattagcggagagtcgtgctcaacactcgcctagtgaagctcttgaggcggcgtgtggcggagttgtcattgtccttagctagacgactgtggaagcaagatcgtggcctgcggaggcgacgacagttgcgcagtaacctccccttcaccggt

SEQ ID NO: 201098 - DNA, 309 bp, Zea Mays
agcctactttattaagtgcactctaattcctccgaaatgaagggtccaacggccctttacacatgcatcaacattcaggagccttaacttatgagaataatttttaggtattaatgctatatctccagcacctcccatatccattacctatctcactcatatttcaaactccactgagtatatgcatatgcataatctactaaaaatagaatacaatgatggccaatatggtctaaaatttgaggcaccaatcaaggccgtgttcagttgcatgtgcattagagaagattgaagaaaattaaattcttt

SEQ ID NO: 201099 - DNA, 365 bp, Zea Mays
aagagccaaagcattgggatgagaggggagttctatgtctgtccatggccgatcaaccctcactttcttatgccactaccaccttaattgcaaatcccacaccatgacattcaactcaagttgggaataccaagtcctcctagctcaaaaggtcgagtgactttatcccaagaacccttttctctgcctttccataagaacccttttctgattttatccactgccttgatggaccatttgggaacattagtagaaattagcaaatacataggaattgcagaaagaacatgtctaaccatggtgtccctgccagccctattcattagagatgctttccaagatggaagcttgtctgcaattttctc

SEQ ID NO: 201100 - DNA, 863 bp, Zea Mays
gtgccctggcttgagcacctccgtgccatgcgcgccttgccgcgttcgtggtcgcctgtcgaggaagaggactgcccttcttcctatcacactggcaggcctcccactgctcccgagtgagatgtaacttcccgccgatggtgataggccccaagagaggttgtggttagtcaccgtcgacaaccttgagacgacctatcgcctcttcgatcgacatcgtggagaggtccagcggatactcgatcgagcgaatgatctacttgtacttctcgtggatgcaacggaagagcttctcaaggctctctcctcgtcgtagatgttgtcgccgaactgcatcatcttctgtagcggagtgttgagacggagagcaaagtcatccacatcctcacctagcttgaaggtcaggttctcccactccttgcgaagtgcctgcagtgtggtcttgtggacacggtagttgtcgatgcatgccgccacgatggcttcccaggcctcctcggcaatccgcttctaggaaagcaaaaacgacatctcgagcgggaatatagcaatgagggcatccagcgtccgtcgatcctcatagtaatcgatgtcaccatactgaactgcttcccacatgtgtcgaacctagagtcatacccttatcaccgtggcccactcgacatagttggtctctaagagagtaggccacccaccgtcaggaccgatgtccctgacaacggcctagatccagcggtgactatggtaccgatctggggagggaagtcgcgccgcctgtaaaggtcgtaatctccgcccacccaaccgttgccgttgagagcaccgccgacacattcgcgatcgtctaggatgtcgccaagcgc

SEQ ID NO: 201101 - DNA, 273 bp, Zea Mays
gaatagaaagaagattgtggaccaaagaaggagcgacaagaacatccggaatacgaaaagagccgggagggccggaggcacccacagatgtgacaggaaaacacgatccattcgctaccatgatggacgaagggagagaggaaggagggcggacagaggtgagtataccagggtcaggagtggtgtggtcggtagcaccagtgtccgcaatccactcgggacccatcggcggagtcagagtgggagtctggaaggcagccagggcggtcgcgt

SEQ ID NO: 201102 - DNA, 351 bp, Zea Mays
gtatggtcttctaatcgcggccttcaagcacagatcaaacggtcacaaaacccttcgccccctcctcgacgcagcgacacagcggtgacacaccaccgacgacggtgccatggccagcgatcgcctcgacccgattgccaaatctaaactctaattcaaaagcagtagcgcaaagcggtaatgatacggtattgcggaggatgatactctccaagactcaaagaggtaaccaatgcttcccacggcgcacggcggaaaccgatgtccgatgatgaattccagacgccaccgcggtcgatccttccctagacggccacaactcttcaccagccactccacaaagctcccgga

SEQ ID NO: 201103 - DNA, 391 bp, Zea Mays
attgttattgaccaaactgccgaaactgccgaagctaaaggcgccacagccgaaaccaccagagcggaaaccttcaaagctgaaactggcgcagccgaagctgccggagttgaaactggggccacagaagatctgaacttggacgagacacttgaagttattgataacatactcttaaaaatgactgaggaagaaactgctatggccgcggcaagcacaggcactgaaaaggggaaaaaacaagctgaagacattttggaggggggagattttgaatttcaagatttacttgggcaagagctgacagacgctgaaaaagcagagcttaaaagatgtgccataccctgcggatataagccaggggctacactgtttggtggggttaacgaag

SEQ ID NO: 201104 - DNA, 362 bp, Zea Mays
aggggtatcgcggattctaaaccatccgatctaaaccaagggcccagattaaatagatctcacccgaatcggtaaggcatagcagtcgccggatctaatttcaaccgtcgagatttaatgaaccgggatcaccctacgtccgcacgatctgagatcgacgtctgtcattactcccggcaagggttacgcgataaccgatccgatccgcacgatcgtgatccaacgactgtcacttgcactactctccgtctaatcacgaccgatcatcacgacatccacggtcccgacaccttcttcctcctaggaacgtactcaccacggccaggaatgcccatggtgcgcaacggcaggtgccgcacgac

SEQ ID NO: 201105 - DNA, 940 bp, Zea Mays
tgcagaccaaccgcagccagccagcagactgttagacgacggccacgcggagccgagcgttgccgcgctttgcttgatgggataaacgccgcgcgctgggaaggttcagtgaccactccctgccgccgccgccgccgccgccgcgctggtttttattcgcttctttctgccttcttcctcctcgcggccggggcgggggcgtgctgctctctcctctccagggagttttctgcgggggttttggttgggttttcttcagcgccagccgtggatgtgtttaacgcaacagtattagtttcttcatgatcagctgtgtgtcctcaaattgagtttcgtgccgtgtaccagtcgcgcatgttccccagatcgattaaagtttcttcgcgcgtatgtatgagctctattcgaatgttctttgctctgaaaagattccccctgttcatggttacagaagggcctggagttgaagcacgaatcatcgaagcgcagcaaaactgagacacacgtcttacttcttcacaagtactgtcctctctattcatcatttagatgtatcatcaaattgacatagtaacctatgattcgtgcagtgaaactttgtatcgagagtgcatgtcttgatctttattttatctcactcttaatgacgtggtagcattgaaaacgacgcgataaaactaactcttatgttggccaggttcttggacgatggacatcttcgggagcccattctgctccaagcaagccgtcgcctcatgcggcggatggacggacatactcgactcctccagctgcacgaaccatatcctggaaaccggcaccgccgctctgatcaccgtcgctctcgcgctgcacctcctcgtcgtcaggattactacgaagaccagagcgtccgcacgccgcccccctgtcgcgcccggcctgccgctgcagctggccg

SEQ ID NO: 201106 - DNA, 308 bp, Zea Mays
cttaggatgtaagtttaattatgcttgtcactaaatttctgacacatgcttaagtactatctgaattgaaaatcacaccttttaaagtcaagtaaagtaatactggctgtctatatgaattgattaacacactcaataagtttatctatacattgtgttatagagatgaagatgctttattgaaaaccaaatgtccgaagcatgtggagctgagatggcagactgaagttagttccagcatttatgcaactcctttgatcgctgatatcaacaggtatttgtcacttaatttggtgtctgtcttttgc

SEQ ID NO: 201107 - DNA, 518 bp, Zea Mays
ttgcagaaacggaacctcaagacaaacatcggcatcactttcttcccaatcctgatttgcgtgcttctcatcgtgctccagaacgtcatcaacagcgagcttgacaagcccaagtacaaatgcggttgcgtctgcctcgagaccagtgccaacggaaggtgcgtaaggaaagagtgtggcattcagtactcgacgctggatcaggtggggagctgtccgattcccagcccgccacagtggccagccctgattcagatcccccgtgctgatttccgggctgcaaggacgttctcccaaccgtttaatgatttgcctgatccattttgccgtgactcctggtcttgccctgcaactgtccttgtcactgggaaggacagagcggttgcagaaggtatgtgcttgtcatagtacagttaaaacacactttgaaatgcttacactttggtgactatgttcgtaatccttgagtaaatgttttcgaaatgtcagctatatcaagagggctgtttcctgtcctt

SEQ ID NO: 201108 - DNA, 387 bp, Zea Mays
attgaagcgaagaaagtcttgcatttggctctgaaaatgtaccaaatatctgatgtggagaatcttattcccaacctaagaagtgcagttctctcagctatttcaaaatatgtgactgctagtacaaatcatattctacacactttgagtcaagattcagcaaatgcgtttatcaacagtgattttgattctcaggaaattaacaaaattcttgctgaagctggtaaggagctctctgaaatttggaagaatgtccatgctgttactgagagtaatcttttcaatgataatggttttaccattggagtagatgaagacttgcccacgaccaagattctaattgagttgtttaaccattgtttcccatattacaagaaattatcttta

SEQ ID NO: 201109 - DNA, 277 bp, Zea Mays
aaaaaggtcagggagaaagatgatcgatttcggcagcgtaaactgcgtgatatcttcagtcccttggctaaagaagaggggctgcataacttgaataggactggagatatggaagatttattaatttcaaacaaggatttgaggaaaaatccttctcatggtttagacattgacaaagaaaacaatccaaatggagcatcagtgggatctggtttgaatattagtaaaaaacaacaaaactgtatgactgggttaaatgttccttgcacttcacaaa

SEQ ID NO: 201110 - DNA, 326 bp, Zea Mays
gacgtggaatttgagatgaacatatgaaaccagctttattgtggctttgccaacgtgtcaccactcaccaccctttcctatcacgttataactgattccagaatcaatcataaggatcaatgttaatcaactgtaaggcacaatcgcagtcgcagcgtcaaatttggaagcacttatagcaaacatttccttttcaacaacagaaaggagaggattatgaaagtacctggatgaagaatttatctgtcatctctctgacttctggttcaataagcgccaagacagtcacaggaaagcatcagatagttgtggtgtccatgtcctcg

SEQ ID NO: 201111 - DNA, 419 bp, Zea Mays
gctcacttcattccggtcaagactatttataaaggttctcagctggcagagttatacatggcccgaattgtgtccttacacggtgtaccaaagaagattgtttctgatcgaggatcccaattcacctcaagattttggaagagccttcatgagaacatggatacgaagttgaacttcagttcggcttatcatcctgaaactgatggccaaactgagggaactaaccaagtacttgaggatatgttgagagcttgtgcccttaagcatgggggcagttgggacaagagtctaccatatgctaagttctcttataataatagttaccaggccagtctgaagatgtcacagtttgaagcgttatatggtagaaaatgcagcactcctctatattgggatcaaactggtgaaaggaagttctt

SEQ ID NO: 201112 - DNA, 274 bp, Zea Mays
caaggtttagaacgaaattcaagtttatgacggtggtaaggtcgaagatggggccaacaagcacacccaaaaatttttagcatagaataatttggcggactttgaaataatcgttccatgggagacaagttatcaaggacacgagtagggagacgattaatgagatatgtggctgtcaaaaaggcttcgtcccaaaatttgagtggcatgccggcatgagctaataaagcaagacccgtctcaacaatgtgacagtgttttcgttcagcagacc

SEQ ID NO: 201113 - DNA, 451 bp, Zea Mays
cgccggaatgaccgccacggtagaagccacgaatccattgcgccagtactttcttccacctccggccgccgcgcgtcctcctcaaaattcacggccaccgtcttaccctcctataaattgagcccgtgactagctccgtgaggtcgtcagctaactagccaccgctaatcagccacaatcatccaccagcgagcttgaatttcacagttcccccaaatctttttccgccaccgtgaaacaagcttccccgtcgtcagccctttttccggtcagtccaaccctccctctgcttcgtttaagcttctcctcgtgtctgtgatgcttactaaaccgtccaattgggctagaagtcccctgaccgtcgggaacgcatggatctttggtccatccgtgcgctctccgtggccagaccaaattaatccaccaattgtgcaattaacttaggggaatc

SEQ ID NO: 201114 - DNA, 420 bp, Zea Mays
ttcgaccaagtaaacctgcacccaatcagaggaagctccaggagggcaagatcgtccttccaccttcgaaatctgcccatcatagcacgatcaacattggaattactcttgtcttcatcacacagaatcatgttaaaatcgccaacaaccagccagggcccagaacagtgggtcctaatcaacctgaggtcttgtaagaactgaattttctcatgattcccttgaggggcatagacacatgacaaccaccaagatgacccagtctcaaggctaaaattcaccgagacacaatggtcatcaatcctagagccacatgagctgatattattcttccaagccactagaatccgtccactagccccaactgaaggtgtgaaaacaaaattctgaaactcagacccaagcaaccggaacacaaac

SEQ ID NO: 201115 - DNA, 328 bp, Zea Mays
attaggtcgactaatcgtcgccctaatcgcgattagtcgcctggtcgcccctctcactcgaccagctggtcgcccgacttgtaaacattgtgtagaagcatgtttggatggtgggttagactactaaatcattcagattggacctttacatatggaaaatttaaaaattatctcctgagccctgactaaaaaaatcgacaattatcgggcacatctggttcatgaacacatttcctgcatgataacatcgcagttgtgaagtccgccagcactaggtcacttgctcacccgtaccagtaccatcatctgccaccattgccaccttcta

SEQ ID NO: 201116 - DNA, 366 bp, Zea Mays
taacaagagatgttgtttcggtgaagatgtggtcgtcaagggcgtagcgctgcagcgtgaggaggacaaggtcgcgctagcaggtgctggaggaagcaaggtcgaaaaagacaggaaccaaggagcgaatgttctgaacacctgccttctgtgcacaaaggatggcgatggaaacctcatacatcgaggaggcgtcgaccatcggataggtcgaggagggatcgaggtcggaagagacaagcagatggctctcaacctcggcaagctaccttccgagagtatgagcagtggtgcgttcgtgctctaggcaagggtggtgacgcgttcacactgccagatagcatccacaacagttttagcagttgt

SEQ ID NO: 201117 - DNA, 317 bp, Zea Mays
ggctgatcccctatggcgtcgtgccatggaagaggagttccaggctctggtctctaataatacctgggaacttgttcctcttcctccaggtgcccatgttatcacagggaaatgacatttccatcacaaatttcatgcagatggttctcttgagcgctacaaagctcgttgggtatgtcgtgaattcactcagcgtcctggggttgattatgatgagactttcagtccggtggtcaaacctgccacggttcgcactgttctctcgatagctctgtcgagggattggcctatccaccaacttgatgtaaagaatgcat

SEQ ID NO: 201118 - DNA, 370 bp, Zea Mays
ggggtcgcacacgcgaaattggccctgcaaatttgaagatcaccagagacttacaaatgcaaaatctgaattcaatttgaatatcacaagagacttacccaaaacaaatcccacactttgcttgtgtgtgtcccttcgttcccgtacggcttgaggtcccaatgagcccagtaatgagcagctatatcttgaccgcccactgtcaccatcgccgagtaggcaaatcgcaaacaaatccccaactctgtgaggactggtgtgcgatgccctgtcccgtcccaactaacctccttccacgccctggtgcctttcggttcaataaccctccgctgatcgaagggtttagaaggcttcaatgtgagggaccgac

SEQ ID NO: 201119 - DNA, 321 bp, Zea Mays
aaagagagttgtaacatacacaaccgcaccatcaaaattggttaaagctgttcacgcaacagaggagcagtcttatttgaaggctgatggaaaagagtatgcagttttactgagtgtgagcactcctgatgttccatgtggtacttattttcggacagaaattcttttccgtatcatgccaggtcctgaacttgattcacagcaacagacatcacatctggtaatatcttggcgcatgaattttcttcagagtactatgataaaaagtatgatagaaaatggagcaaggcagggcttggagcaaaactatgcacagttttc

SEQ ID NO: 201120 - DNA, 333 bp, Zea Mays
tacaatgtccttgtgataagcaactttgaactgcatgatgtcaattttaccggtttcctttcttacatctgatctatcatatacatgattatgtattgcttaacttatggatggttggacaattaatatcatcggatgaactacccgacaattatccggtacctacccgagtagtatccgttatccgtttcttacccgtccagattagtatccggtcccgtcttgtatccgtcccgaatcttaactactcgtatccggtcccgtatccgagagaaatacattagggtaggatacgggatggtcatgtatctggttgtatccgtcccgttttca

SEQ ID NO: 201121 - DNA, 1031 bp, Zea Mays
acgatcgtccacgataccaaggtattaatccaatcccacattgttctctgacgacctccgtccgtcaatgccggtcccatctcgtgcgcgcgtacgtgttctcggcttcgccgggattgtttagggacgtgcagaaccggctgggttttgacgcggaggtggtgcgtttgttgtccgccggtctgaatttatgatccgttttccattatgatttcctgtgcattttagctgttgtcagatatcaaaccaaatcggagacgagggaattaatcaacattcttttcatctgcatttgaggtgttacatttgctaagaattgggcatctgtacccttttttcatcaagaaagaaaaaaaaaggaaaacaaaatttggcttcaagtttgcaattttatgtgtttattggtaaccgaagggacctgggagagtgggagaggggtgtcatcgctacatgcagcctatctatatatcataagctgccttgtctgatcgtcagcaactcagcatcacacttggattgcgtgattatatataattggttgttggttttgttacgtagtcaggtatcagcacagactgcagcatcagacttatttggctggagaaatcagggatcatcagagtcaaaggcaacaagattctgctaccatatcagtgcaagcgaatggctgactgtttaaagacatgcctggatcttctattgtgaattcgcagttctttcatgggtggattgtcaggatcccaaactggtagaggtgggggatggaattctctgctcttctgacttcagcggggataaacatcgctgtctgcgtgctcttcttgtccctctattcgatcctcaggaagcagcctcacaacttcagcgtctactttgggaggcggcttgctgaagagaggttccagaggcaggacgattacttctcgtttgagaggctactgcctactgctggttggattgtaaaggcgtactggtgcaccgaagaagagattcgacaagttgctggcttggactctgttgtgttccttcgc

SEQ ID NO: 201122 - DNA, 312 bp, Zea Mays
agagcacacggttcaggctgaaaaatgagcatcagaaaccagagagaagcaaccttaccacaacagtagacacaactaaatacgcagccatggcaaaagagagaagcaaccttaccacaacagtagacacaacttttactggccctgcccgtgctcgagttcttggcattaaaatcagatcccagcttcatttttgataatctcgtacaatatcagatcagggcacacaaaacacacgtatcagatcagggcccatcagggcacacagccgatgggaggtggccctgcttgcgcatccgtgtatgcctgccc

SEQ ID NO: 201123 - DNA, 438 bp, Zea Mays
gcaattaaatttgtactaaaaactattttctaaactattttcctggttttattaattatctggactaggcctcgaatactaaaaaactgcaggggctagcgggtaatttaaaccagactcagtgaataatacccacaggacggcgggttagttatcaaatagccgaagggctcatttgtaattcagccaacgaagcggtatcgtgcagtgttgaccgttggatcatgcgtagacggcgcagattagatcaatccaccgatcgaaacggtacgccttgcccacggttggatcatgatccaacggcccacggagcaccacgccatcactaaatccgactcgtacgcccgagatccaacaatgcagatcaaagcttcgcctatcaatacgtgggctaaatccggaccgtccccgtgtgacccagcggtcggatcacaaaat

SEQ ID NO: 201124 - DNA, 291 bp, Zea Mays
gcccactccaaccttatccattcacctcttctcagttccagccacactcgcatttgctcgcttgtgtctcctgtggcctctgccttctcccagacacgcttgttgcccaccccctctgccttgtccttgttatgctcgtcactgacgcccgtgccttctcctggctgcacccatcacccgccgccattctcctcctggacgccgcccgccactaacctccttttggtagcgcttgtggcctgtggcctgccctccttctgggccgtggccgtctgtactcgcttcctcggc

SEQ ID NO: 201125 - DNA, 336 bp, Zea Mays
gaaatagtgagtctgctggagatagtctcatactctctattttgaatgactctattttgaatgagcacaaagggcgagaaatgagcttcaatcagccttctctatttatagatgaattagggatattttttaagatttttattgaaccttttgaagttaaaacagtaaaaaatggctagttctaaactgctaatacacgtggtgctgatgtgggggtgatatcgccccctatcaccgggcaatgggagagcagccctgccccccgaaacccatgtattggatcttgggaacattcttcctgggggtgaaatagtgagtactgcccggacgaaccag

SEQ ID NO: 201126 - DNA, 361 bp, Zea Mays
cagcagcaggtacacaacatcgccaaccagcaccccgctggtgaggcccctgccgccaggagtatccccccagggccgcggaaacggaactcgtggtcggggccagggacgtgcgcagcagccgcgcagattttactgcttgttccacggcgaagactgcgcgcaccctacaagagactgcccagagacaaaggccaccagagacaggatggcacgggcgcaaccagccgacaaccctagagttgtcgcgcacacatatcaacaaccccctcagccatacaaccacggccccgctccacatccacctcaccacgcataccaacaccaccaggaggtacaaatcgtacctcccccactccca

SEQ ID NO: 201127 - DNA, 310 bp, Zea Mays
ctgatgctgctaactgcatgcgaaggcaataagcttcattttattttcagacttgtgtctccgagctttggtagtgccagtagtgtgttcaacctagtgaagctgtccaaggacctttcatctccactgatatttgattcactcccatcatctacatcttcaggtggtacactagtatggagcctgggcttccttggctgagcttgtgatccagttcccttgctagcaacagatgacgacactgacaagccagcagccttgtcctctacgtcgagaaaaagacatatcgttgcacagtcatcagttttgg

SEQ ID NO: 201128 - DNA, 384 bp, Zea Mays
ggggttggcgactggagcgccctcggaggcagacaacttggtccgggcatccaccggagtagctgtcgggtggcattcagacatgctagcgcgctggagaagatcaacggcgtactgccgctgggagaggaacatcccactgctgtcccgtgtcaccgagatgccgaggaagtggtgaagatccccgaggtccgtcatggcaaattccgacgataggcgggaggtgacgtgctggagaagagccggcgatgatgcagtgatgatgatgtcgtcgacgtagaggagaaggtaggccatggtgtctccattcttgtagatgaacaaggaggcatccgttttggaggtggtgaagccaatactgcgaatgaagctggagaagcgctg

SEQ ID NO: 201129 - DNA, 276 bp, Zea Mays
gttaaaaccccgagaacaaacttgggagtagcagcggccagccggaagcgagcggagaccgaggggagagggggtgaagaagcaacgagacgcagcgagcaagcgaaagcataccagagcaccaagcatagggacgcgcgcgcttctccagttctccctccctgccctgcaaggcggctgcaactgttccagctagcccctctcccagcctctgcgtcgtagacgtggtagtagcagccgcagcagcagaagcggcggcgagcatgctcttggcac

SEQ ID NO: 201130 - DNA, 271 bp, Zea Mays
aagtgcgcacaaaagactcatgttggtttatgggtatggtctattatatagtgggatgccaggagtaagtaccatcggtccgggagagaacgggatgttacagtgcagtgctcttcgacactagtgttgtaccggtaatatctttctccttagtttcatcttcgtcaacatcgaagaatgaactcattaatggagctattctctcctcttcctcttcttcctcactctctagaagtgactccaaaggtgtaaccctttacgctatcaaggc

SEQ ID NO: 201131 - DNA, 325 bp, Zea Mays
gtccactcgcgaggagatgaaccagcagaagatgagccgatgagacgaccacgaacccacaagaaacggcgacagctattaatggagggagctattaatggagggagagagaggaaaccgtcacattgcttgagtggggaagaaggagaagagtcgtcgggaaggtggcgttccactgcatagtgcgaggccacgagcaggcagatgatccagcatgacgcgaaatggcaggcatgggtgtggctccacatagcgcatgagcgaacggtgcggcgagcagtgccagaactgaatacatgctaaaggttgaagaaatactgtcaag

SEQ ID NO: 201132 - DNA, 435 bp, Zea Mays
gtagtggtggcgtgagataattgtttgaggtgtgcgggtgtatgccgtgatatggttacacttgcaacgagaaaagatgtacacattgggtaacacgacgcttaggttgctgttgtataatcgaataaaggatgtattattaagcttgaatcaaaatgtggggtactagtggtacgctaggcggtgtccaaataaattaaccggtcgatgtggtagtggtcgtgcgtgatttattgttagtgagtagttggaattccgagctatatgaggattatgttaaaaactagtaggcggcgtgtaactgcattcgtatggtgaataataggtcggtgggtattgttgatgccagtagcaaatgtagtcttatggagttttacgccatgtgtaaatgcctccatgatagaccccaaaaatgtgctatttaggtgacttgtg

SEQ ID NO: 201133 - DNA, 333 bp, Zea Mays
ttctaaaaccgggtgtgacaaaagctcactagccagaacaagactatgtcataatcatctttgaggtttagttcacaagaaggggaaagtatctgtggagagctacacttttgatcctgaagttgctagaaaggagcttgctgctatgatagcattgcatgaatatcctttgtgcatcgttgagcatattggctttcgtcgatttgtgagtgcatgtcagccattattcaagatggttagcaggaatactattaggtaaggaatacactattctttgtatcaagatttgtgatttgaagtgttgtgctatttctaattttgtgatgtgacaga

SEQ ID NO: 201134 - DNA, 481 bp, Zea Mays
ccaacagaaaagctgatagtgctgacacaagttgtcaggttgatgaaaatcaatcagctgaacgtcatgaaactgtcttccatgaagaagccattgaacatgaagccacaaatgcaaaagatatgctggactcaaatattggaagtaaagtgcctggttctgagaatgggctcttgaagaacctgggtggcattagcttctcaattacttctgataatgtccggaataatgtttacaatgttgacaaaggtgatggaattgttgttggcattattcacattcttggtgctctaattgggtcaggtcacctgaaatttgattctggagctggaagtgcaaatatacctggtggtagtcagaccacacttaatgaagaaggaaatactatgtcagaagatagagtatcattgttactttttgcattgcaaaaggcattccaagcagccccaaggaggcttatgacggcaaatgtctatatggc

SEQ ID NO: 201135 - DNA, 648 bp, Zea Mays
ggatgagaaaggtaaaggtaatagcaaacaaaagtgggcaaaggatggagttaaaaactcgcaagggacaaagaatatgatacgcctcaaaagaaaaataggtaaaacatacaactctcagattgagatgggagaggggagaccttgaaggttaggtataagatgaacatcaatgcaagatatagaagtgttaagggtaaaggtgataataacaaagagcataggaaaggatggagttaaggcaagactcacaaaatggcgaaatggagaaaacaatcacgggtaaggtaggtaaggttccaacagaatggttgaagtaaaagaaattattaccgagagaagttatatggaaacgatgagatcattaaggatgtgaggaatagaacgatcgctcatggatcatgaagaaacaaaggtggtcaagagtatgtaaactgaaatgttttaaacagacattggagtaaaaaggtaagcatttatatacaaagtaaaagtatgcaagattacgaaggtgcgagcataccaagaccaggggagttcgaattgccgaaaagatagcgacttaacaacataataagaaagggtctcaaaagacaggatgatcatggacatataaactgaaatgtttgagtaggcagtagaaattca

SEQ ID NO: 201136 - DNA, 346 bp, Zea Mays
tttcgtactacagtggagtaggccttgggtgtggggatgcaacatcagtacaccatggagtcttagaagtcttcgggtgttgatcaacctcatggccaggatgcgaggaggggcaacactgggggtccagcccacaagaggggaaagtcacagcaccagcgccaccatccctaccatggcaaaccttctgaatcgagtacttcaggacggagtactcagaggtatcgggctgttcctaagcccaggctggggctagtgtgtttctgttgtggtgaagtgcatcgtcgtgccgagtgtcaggggagtggcaggtgctctatctacagccaagatcacaaggatgtgg

SEQ ID NO: 201137 - DNA, 331 bp, Zea Mays
gatgttgtggacaacaaggatgttgttgaggtacattggactaggaagaatcgtcgcttactgaggtgacaggcagagtcgacccattaccgacaatgatggaagaaggtaaagtggggctgtggggatggggtgaagaaacagtaccagggtcaggagtggtgtggtacgaggcgccgcagtcagcaacctagttggtgggagtaacatgagtgggctacgaggacatgtggtggtacgaagagagctatgggaggcacctccacagagacatcgggatgggcgtcgagaccgccagtgacgagcatgagcagtggagacgacaaggcct

SEQ ID NO: 201138 - DNA, 302 bp, Zea Mays
ctagctagttccagtgctacttagttagttgcagataaattcttctactcacactacgtgcgaggttagacagtaaagttaccttcccatttcttgactgaaggtctatggaagtgccggcactgcgattggacgcaccaacgcttgagtggtccatgcacagctgaaataatcctccacagtcagcagggacactgcaaaattgccagcaacgtcgattcgttagttcagcaccaaccattatatagttcaccacacaaaggttagtcttatcgaatgctcacacaacatacacacgtacg

SEQ ID NO: 201139 - DNA, 577 bp, Zea Mays
ggaaagagtaggccacggggagaagctcggtggcaccttcgagctttgggatcacccgtcgctgtcttaattgctcgccggggggtcaacttccgccgtggtgcgtggtcgcgattgtctgcgtcataactttaggtatgaagctacccgaatgttccgctctcgtgtctagttcgcgtgggaccgattagttgtgagcttggagttcttgctcgacgggtgggcctgcgccggtgatggtccaccgtgggggtagagcgccgccgcgccctggtgtgttgtggagaagacaggtctgtggccgtcgatttcaagatgggtggctagcattagatcttagtttaccctttcgttccatcgtggctatgccgttggatttggatcgggcgtatgagtttccatcgctagtgttttaaatcgtgaccgtagccttttgatccaacggtctgtgtcgcgcaccgattcacttatatggggatccaatctgggccacccacacttgatcggatggcatagattagcgcgtacccctttggcctggtcatatttcaaaagagcccctgtccttttatcaaat

SEQ ID NO: 201140 - DNA, 1350 bp, Zea Mays
agacattaatggcatttgtagacaagtcagttgggaaaagctcaatacgcagtgcatctctcgcttcaaagttatttgccttatctcaaggctggggtggaaaagaaggtggtcttggattagtagcatgttctctacccagtgtatctgatccagtttccactgaggttggatccacactccattttgagttctatcgtgctgctgataaatcagagaaatcccagtgtctagagaaagagaacaagttggaagtaattcatttatcgaatgtcaattcgtgcaaggaggcagatcttgaaatattggacaggttggtcaaggattacagtgtgccacaagctttaaggtttcttcttcttacaagactgagatttgcaagggcttttgactctttaacatgtcgacaccagtatatctgtatccgcttgtatgcttttattgttcttgtccaagcaggccatgatctggaagttgtatcaacatttttgaacaatgaaccagaattcattgatgagctgttatcactacttagctatgaggatgagatacccgaaaagattcggatactgggagtcctttcattagtcgcactgtgccaagatcgacctcaccagcctactgtattgtcctcggtaacttctggtggtcatcggggtatccttcctattctcatgcagaatacagtggattctatcatcaatggttctatgaaatggtccataatatttgctgaagcacttctttcgcttgtatctatgctggtatcatcaacaccaggttctctagctctacaagaagcaggttttataccaactattttgcctcttctcaaagacacaaacacgcaacatttacatctagttagtaaggcagtgcatgttattgagagcttcctggattatcacaatccttcttcagcagtgttcagagatctaggtggactagatgacactattgctcgtcttaagctagaagtatctcaagttgaggttgattcaaaactaattgaccattctaccaatgaaggaaacgaggttgaaagttatccacctgtgcaagatatacaaccttcatgttctgaatccttgattttgtatcataggaagaacttaataaaagttttattacgtacaatatctctggcaacatatgtgcctggtagttctgctcgtgttgatggttcagaagagaatgtgttacctccatgtttatgtgcgatttttaagagaggcaaggacttcggtggtggtgttttctcacttgctgcaaatgttatgagtgatctcatacataaagatccaacatgctatactgttcttgattcagctggtttgccacaagcatttc

SEQ ID NO: 201141 - DNA, 546 bp, Zea Mays
cctggaccgagggagggcaggtgcatccgttggcgctggagttggccgccattacgaccggaatttctcaccagaactcctggacccgccgcagatcccaggcttccgtgggcagcgctctacacaactttagcctcggtatgcaatcctccccagtatttgtactgctctacacaacgtattgcgcgacctaattcggggaatggcactcggctggcgtgctcaacggcgcggtcgtcgccattgtgcgatcagcgccgccgcagttcatcggaggttgacgacggatcgagcgccgttggatctagatgtagggccaggattagatcaggggtgggtgagcaactggccgttagatcaggatcttgtggacctgggtgtatatcggttggatgaagtggacttcagatctggaccgtagatcgtggattgcgcggctgaaactgcataccggttcgctgtttaaatctaggccctagatccttgaatggatggcccaggcgcacctaagttcaatcagtcgtggcactttcgtaaagagcccct

SEQ ID NO: 201142 - DNA, 330 bp, Zea Mays
tacaagtatccatcaccaccatcgccttctcatggtgaggcacaaccaccacgtggccacaggaaacttccaccaccatctagatcgatgtattcaaccatagcaccctcaccggcaaattacaatgttgtctcaccatctgagcaaggtcccaagatcaaagatcatggcgccccggggaatgcacctatgtcgtcgggtcaagaaggagcatcgccgccatggtatttttgatgcgaagatcaagataaatgcttgccaattgcagttctactctccacaagagatcaaaagcccaaaagctactttagagggagttccttttttctt

SEQ ID NO: 201143 - DNA, 960 bp, Zea Mays
gaaggtaggctaaaaaacgggtattatgctcgccatggctttcgtaccatcaagcatgacatccgtaccatgtgccaagatgcattgaggtaaaaattacctagtctaacctagttcaagatctttagaagtttatgtgatggtcgtgtttctaaaatttcctattctacctcagatataaagatggcaatgattcgggagatataaagcaaattgttgtctccttcatacagctagcaaagagactagggaacccaaggtacatttctgatagatatggagcaggagcccaggacagcctggacattaatcaatattcatttgatactaaactcaaaaagaagcaaaataaaataagaggagcaaattcattggctgctggagcagataattcatctcgtgcatttgaccttgaaatcaaaagaagcctatctaaattaaagaaaaaggatgtctactctggtagcgaaacatctgatgatgatgatggctactctgaagttgatgaaactgagagcgaaactactgtttctgatactgagagtgaccttgatgtaaattctggagcctgggatttaaaaggaaacagtctaaagttaattgaacctggggaatctgtgaccgatgatcgtatattgggtgcccgcatgacaaaggccagccttgttcctccagttactaggaagtatgaagttatcgaggagtaccttattgtagcagatttggaggaagtacagcgaaaaatgagagttgctttacctgatgactattctgagaagttgctgtcacagaagaatggcaccgaaaacttggaacttccagaggttaaggattatcaaccccgaaaagtagcaggagatgaaattcttgagcaagaagtatatggcatagatccatacacacacaatctactgagtgacattatgcctgctgatcttgagttgtcacctactgacaagc

SEQ ID NO: 201144 - DNA, 370 bp, Zea Mays
gagcaacgaacttgcatgaaatgaccgaggcagatctccatgcatccattttcgagtgtttgaccgtcattataacccttcaacctaataaactaatccaaaggtaaaaataccacaaagcatgtactcggacttgttccatgttaacatgaatcctaagacgcaacttcaaactgacatggttgcatgcatcccaggcatgcaacacgggttggcagcgtcatagatattccacctagcaccaggtccatgttacccgttggatgctcagggagggccgaacgggggctgatgataaaacagaggcagaaacatgcgtagattttaccagtccaaggaattcttggactgctgaagcttcgcgctatat

SEQ ID NO: 201145 - DNA, 427 bp, Zea Mays
cttctggatgccggaccagagctgccgcgtgtgttacgactgcgacgcgcagttcaccattctgaatcggcgccaccattgccggcactgcggccgtgtgttctgcgcccggtgcacggctaactctgtgccccgctcgccgggggacgccgcgagggaggacggcgagaggattagggtctgcaattactgctttaagcgctggatggaggaggaacccgcagcgcggggggccgctgcagggcaacagccgtctagcccgtctctgtctgccgctagtgtttgcagtgacaagtccagcttcactgggacgaatgggcaaatgtcgtcttatgcgaatattagctactccgaatttccggtccatggagagggcaactgcggcgaggatgacggctatcgtgaggagcagcagcctgctatggac

SEQ ID NO: 201146 - DNA, 434 bp, Zea Mays
ttgcaacacctacatctgccgccaaacataatttcctccaactatgcaacaggagaaaaataaagcgggaaggaagaaaccaaccccacatggagggatgggagcttcatgcaagcatgccgtactggctgcatctctcatgagagcgaactgaaactttccactggatccgattcctctagcatcaccgctgcctggaagcagtcggcagcgtcagagatcctcccatcagatctgtgcacttttcctaggtaaagccaagccatccgatttgtgggctcgactcttagggcgtcggagaggaagcacctcgctgcaggtagaaacctgggaccttgcttggagagcattgcgccgatggccaccttggacggcacatgctcaagctcggtcgagaacgcgttgacgtaggcagccagtgcatccgttgtttg

SEQ ID NO: 201147 - DNA, 360 bp, Zea Mays
ctgacttggaaaaaaattaggacaatggtgtttgagtaacacatgtaagactttccacaattgcattcataccagggtgcacacgacaaaacacaatatttggatgaacttgacaatatcaggaatcaagatatcaccaaaaatattggagagattctaagcttccatactttcacaaggaaagaagagaacaatggaaggaatgttatttctttctcctttgatgaggggattcttttcgaactgcacaacagacagtatagcttcgggtttttttattgaacgtgcttagcacgtatttcataaagaaggtagaaaagttacatggcttcccctattgccgggtgagctgcccatcca

SEQ ID NO: 201148 - DNA, 412 bp, Zea Mays
aagaccctccagcaggtcacaaaggcctagaacttgcgcaagtgccctaactgaaagcgcaccccttatgtcagccacccaatttagatctgtcagagcatctttaaccagccttttggaagcaatacgcctaggaacatgctcaagaacctcaggtgccacctctccgatgcatctaccattcagtcaccgatccttccaaaaaaggatatcatttccatcacccaactcagacacaactgcaatattgatcaaagcctgcaccgatccacaagcctgaacagggaggaccgcccaaggcttagagtggtcggttctctggagccagggccacctagcccgaagagccacgctcaacagccgcagatcagtgatcccaagcccacccaagtccttaggcctagtaaccttg

SEQ ID NO: 201149 - DNA, 314 bp, Zea Mays
caaggaagtcaaatttagtccctataatcactactgatagtgcactggtaccaggttcgctggacagtcctgtcaatgaagattgtgcaggtttaccgaggcgtgcatctgtaaatagccttcaacaaacaaaacgaggagatcatgggctctcaactggacctgaaggcaatgagcctgtagttgctgagaaaaagctaagggacaagggcaaaagggctggtgaactggatgatgggcatggctctggttttcagaagattgctatgcttgggcatccttccaaaaggaataagttgcctgctgatgaggat

SEQ ID NO: 201150 - DNA, 437 bp, Zea Mays
gtcggcgtcgccatcgggaaggttcgtccggagagtggggaaagacgtggctgtccggaggttaggcgagtcgtgttcgctgtcctgtttaggttctcgctgttcaccgccagtgagtggtgcaccggctgacaggtggactgtaatgtatccgggccagctactactgatatccctcatgccgagcccaggagagacttttggcattatagaacacggcaaagttggtttcgtagaaacggaggcgtaggcgaaggtttcgacgatatggaaatgcagagaatgcacagctgctgaaatagacacaaaatcgttattagccgttgatggtaaccattaaggatcctccgttgttgtcgtccgtccacgcgtcgttctcttcagtcgtcacagccggtctcgctcccgctactgaggtatctcctctcttcttccag

SEQ ID NO: 201151 - DNA, 411 bp, Zea Mays
cgccgctgtggagcgcgaggaggcaacagaggagatggagcgggaggtgagcccgaggcggaggctgctgcggattggggtagaacctgggggatcaggaccagacgagctagggtttagtaggtacgacctggggatccgctgatggtgagcacgtactccatggacgggcgagctctagggttcatggaagcccatggagaggaaggaatcacgatgaaaaatggagtgagtgcggtggagaatggaagtcggcgagaagggaagggatgccgccttagagcttgcccacgcggaggcgagccgtgcctgctgagatctacaaaggcctcgtcgtcgtcacgtctgcctccgggcacctcgcgccagtcgccgctgtcctgagctcctctttccttctcttagacagcg

SEQ ID NO: 201152 - DNA, 344 bp, Zea Mays
tcatgcgagcaccctgccttgcaatacccacccactaaggtgttgtaactgaccccatccggcgccaaaccctccctcatcatttcatcgaacaccttgcgtgcgtcctccatcttcccagccttgcacatcccattcaccattgaattgaaagtcaccaggttgggcttcaagccgccgtcaagcatcatgccgaccagcctctccgcgccatccacctccccggctctgaagaacgccgcgacgagcgtgttgtaagtcacgacattggggccgcaacctgcgccgcgcatgtcacgcaagatgctgagcgcctctttccggtgtccgcggccgcacagcgc

SEQ ID NO: 201153 - DNA, 382 bp, Zea Mays
cgggagaggacgaggcttcatgacgggctgaaggtctcctctccagggcgctgagtgaagccccgaaggacccaacaagccttgtatcgatccagggtaccgtcgaccttgagattgtgctgaaagatccacttgtcggtgaccacgttgttgccagggggtgtcgtactaggtcccacatgtggttggccagcagggccttgtactctatggcttgacaccagtagggtcggcgagcgtgctatggaccaaggacggtacatgcgagagagaagtgatggggcctgtgagtaccagtggtcgtactcgtgaccattgtcactctagagagcacgaacaatgtggctgaactgtgtgcagacccaagcaaaagaagtgcgag

SEQ ID NO: 201154 - DNA, 749 bp, Zea Mays
ggtgatcaggtagggaaaaaaggtgctatgacaggaggcttctatgattctagacgctcaaaactaaagtttgtgaagataataagggataacaagacagcaattgatagaaagacgggtcatctagagagtgtcgtaaacaagctaaaagatatccttttttggtttaattatagtatactctttcgttcacatgcagctggttcaagattgttacatcctgtaattatttcctgctgctaaatatcgaatgcttattttgaagcaaaagctagcggattataacgctgtagattcattgaaataaaaaaagctagaaacatcttggcatagaacttaaatacgatattccttgcttgcattgttgttcattttggtgatagaaaaacctgtaaaattgtgtggcattgattctgcctgaatttattgttgtataattgtatcggtatcttgcttattgcctttttttgaactacacagacatgcataattacgatatttagcataatgaaacttgtgttttccctctatgtttcttctatttatttggctttaagtcctgagtaatttgaaaacataaagcaacacaataagttgtctcatttttctagttatttgcaagagcaatatttcatggttagttatcttgctgtcaattgtttatttggcatagttatattgaatatcctggatttcacttaactccccatacatatagataagaaaattacagatttagttaccaaaca

SEQ ID NO: 201155 - DNA, 326 bp, Zea Mays
gccaacggcaagatcttcagcgctatcaagaaaaggctcatcgacgacaaaaagggtaaatgggcagaccaattacccgaagtcatatgggcgcttaacacaacagaatgccaagcaaccgggttcacacctttccgcctgatgtacggatcctaggcaatgacaccgcaagagttaaagcatggatccccccgaacaaactaatcagccgtccccgacgtcgacgaatcaacctctaaagatcttattgacgaagactgtgtcctcgccttgcaggccctaaacaagtatcaagctcagactaaggcatggcatgacaacaatgt

SEQ ID NO: 201156 - DNA, 413 bp, Zea Mays
gccatagaggcgactagtgatgagctgcttggagcatattcgaaagccaaagatgaagccatgacaactgccttcggagctcgaggcaaaaagagattaaatagggtgtttgatgtaatcgggtttgtgtacctggactattgttatccttcgtgaaagcaagggaagaagaggaaagctgctacctcggcgacttctagtgcgtcgaggtcaaaaaaggttaaagttttaacgtgccgacccaggcgtattgaaacggccgaaatgccgaagctaattgagggggcgctcctatctctgagccaagtcgctttgtgcctgttgaagctaggaaaaatgttactgaagaaccaaaagtggagaaaacagaactgagtccaccatgtgcaacggaactaccgaagccgtcaaac

SEQ ID NO: 201157 - DNA, 349 bp, Zea Mays
cttcgctacatccgtgaccccatcgactatggccttctttttttggccctcttcgacttctgagctaatcgtctacaccagcgctgatttggccgattggcctgacacacaacggtccacctttggctatgacgtgtttctgagcaccaatctcgtctcctgatcctcgaagcagtagtgtgtcgtctgccgctctagcgctgaacctgagtatcgcgttgtggccaacggcgtgccgatgtgttctggctccatcagctactccatgagccccactgccctcttgcatgtgccacactcgtctactaaggcaacgtcagtgcagtctacctctccatcaatctcgtgc

SEQ ID NO: 201158 - DNA, 527 bp, Zea Mays
agagatcacaatggatcaaatcaaaagcctgctcagcgcgagaactagaaatactaaatgggagacgagtatggcggcctaactgacaagcatgacagagaccctcaaaacgtcccctactacatgaagggtgtcaactgctggtgagcttggtcatgacgtcgggtcctggatggccgagacgacgatgccacgtggtggaggaggtggtggagaccaggacgggaggtggagaggcgccggtggaagaaggctgaaacgtgtagagcggccccgagctgtcacagcgggcgagaggggtcctggtggccagatccttcacagaaaaaccagaggggtcaaactcgatggaacaagagttgtcggtggtgaaccgacgaacagagagaagattatgagtaatgtgaggagctacgagaacgtcgttgaggtagaatggcccagggagaaccgggacacctactgaggtgactggcagagtggagccgttcccaacaacgatcgaggagggatgaggggaacaaagg

SEQ ID NO: 201159 - DNA, 683 bp, Zea Mays
tgcgtcacatttcaaatgccacctccatactcagttgttatacaggtctgagtttaagatgaattagtgtatcaaagttgtgtaatagatcattcctttattcttttgactagttcactgaaaaaaataaaaatttctggatgcttaactattaacatttgactatgttatatggattaagtgagttatatgcttagagtggaatagaatatacgaacttggatactgagacgcttatgatgaacattatgaatgataaatggtcttgttaaacgggactttgagatatctaagtttccattcaggtccataagtcttgtgtcatttatgtggaaaggtatttataattgctccatcaattctctgtgaaattcaggaatccgataaaggtcactggcatatccctgtctcggaggaaggcttgctagagaaggaccgaacctggctatgcgttacacggcagaattcacaggcacagtgactaacgaagctggagttgttcgatggcaaacattaacggtgtttttttttctgaacactcaagtcagtatcgcatccgccctctcttcgtcagtctgagaaacttcctctattaagtactcattatgatttctacatggtcttattcagttttgttactgaactgctgcatatgttgtaattctgtcttattcagttttgag

SEQ ID NO: 201160 - DNA, 329 bp, Zea Mays
aggagtcaacattgtcatttctctccgaagcgatgatgtacacattgacgtgttcctccttcgttttaggtcgtctgcttcgattctaataacacgtttcatttgagcgcttgagccgaaacttcttccactttatttttgacatgtattaatattcttccactttatttttgacatgtattaataaattagttgctcctaaaacaaatcataagatggtcaatatcagtctcctaaaacaaatcataagatggccaatatcagtcatttataggccttcggtagaggcatttttctcaataggattctttcacaacacagcgccctca

SEQ ID NO: 201161 - DNA, 631 bp, Zea Mays
cagagatgttggtcgcgggggcaaaccgcggttccacttcgagagcttttggcccaaactcgacggctttgaggacgcgcttcagcgcgggtggcaatgcaacgaccccgtcgccgatccgtacaaccggcttgatcagctctttcgcaatctagttcaagctctacaaagttggtcggccaagaatgttggtactgttagagatcagctgttaatggcccgggaggtgatattgagactcgaacgggcacaagactcgcggctgctctccccggcagaagcgcgtctccgtgctgacatcaagctaaaatgcttgggcctgtcctcgctcgagcgcaccatcgcgcggctgcgatcaagggtacgccagctctctgacggcgacgcgaacaccaagttctttcacacggtggcgagagggaagaagaagagcctggccctccatgaactgcgttccgagggtcaaaccgccgtgtcccatgacgacatgtcctcaatgttgtaccagttcttcgaccagatctttggcactgcagcggttcgggagcgggcgatcgacttggagaccttaggcctatgccccatcgacctcgccgctctccacgaaccgttctcggaggcggaggtatta

SEQ ID NO: 201162 - DNA, 379 bp, Zea Mays
aaaaacactcatggcttcaaggtgaagagttcccccggtttcgtcacgcagccttgagtcatttgtaaaggaaatcctcccaccatcatcaaagaaggcatccagggcccgagctacagtccacacactatcataaacataaaaaccgtaagcactggtgcggagatcgctgtggttgtatttcttgcttaagctgctccacttggacaccagattactcttcacctttgatttaggggtgtgtggacgtacagtcagaacaccttgcatgccatttatagtttcagcagataccgatgaattagcatcaagataagcagaaagccaatcagtagcaatccatacatagccgttgcccatcatgtttagtccattagca

SEQ ID NO: 201163 - DNA, 912 bp, Zea Mays
gcacccagcagcagagtacaatgtccacaggcaaatgcgataaggtgaggaagagagagcacgggatgggttgagaaacaagatggagggagaaagtgggcagcctgctggatcttggcatctcgccgccgctcatttccgctccacctggtatgccccgcttccctctcactaaacagactccgctggattggattggatctttttttttccttcatgcgtgccgtgattgttagttagccgcttctcgtcttccttgatctgcgttttgcgcctggacgctccaaagatcaatcttttgctgctgcttcgtgattcggctttgctgggcatcggaatggttggtgttgacgaatgggtttggttggtggagcagtatgcgtggatcatgtgatctatatgctctcttttttctgtttgctgaatggcgcctgactcgcgagatttgcttccaaaacccgcttcttgccttctgctagcagatatgctcatatgcagaagcatcgcgcctcgatgttcccgaggctccgtttctggggaaacgaattttgggttctgttggtttcctgtttatttatttatttatatatgtaaaacaaacccttgattgcattgttccccgttatattgcttaccttgcttatcagtcagtttgacagaattctgattgctttttttacgtcacacgaaggaagcgttgcactatcacttcagtagcgcttactgtgcatgcacaacttttttttttctcgtcatacagttactgagggaagtgctatctttttcttggctcctgtttggtgcagtgtgggctagttatctactagtagtatcttcgggccagttcaagacttagccgctggtacgtactaactcgtgtcatagtcatagccatggtgtccttgtgtcctc

SEQ ID NO: 201164 - DNA, 327 bp, Zea Mays
ctgcatgatgggcttgtctcggttgacagataagggctgactctttctggtcgaggtttgtccttgcttcattggagccggtgtagtgtaggaagccatgttgggaaagtagttggagtagtgtcccggttgtccacacttaaagcatgccctattggtggttgtgttagaagcaacgggtcctgctggggtgcttgcttgcggaggagcagttggtgcctgttgagtttgctgcccggaaccaccacgagctggtgtacttagagtggtagtatagcgaggacgggaactacttccagcctgtccttggttagcagcccttctttt

SEQ ID NO: 201165 - DNA, 284 bp, Zea Mays
agaaatgaattccccactgaatcccccgcctgttgatgacgtgactgctgctcaaatgcgaactccaacatatggccaacacgatgacagaaatgcaagcgcagatccatcaagaacgacaagaaatgcagcaacaatgctaagaaatgcgtcaagaacgacaggaacaacaacaactaacacctccaccaccaccagctccgcccagagataagcaccgagtttatgagtcataagccacctacattctctaactcctcaactccactacaagctgatgactg

SEQ ID NO: 201166 - DNA, 628 bp, Zea Mays
ttgtctagggatgcaaaactttttgagagaactgctccttcaacatattgtttgaagtcgccttatagaaaagatccagctgattctgaggccgtgttgtcagcagcgcgtgaaaaaattagggcctttcagaatgtgctttctgactctgaagctgaaaaggaggcagatgaagctgagagggatgatgattctgactgtgatgatgctgatgatgaccctgatggtgatgatgtgaatattgaggtggaagaagacaaggatcctcttcttgccgtcaaggcacaagacgaagtaccgagtacaactacagttattggcataaagaccaagttagatagtgtaggtaatgcattgaactcatcaagtagttttactaaatcagcaaaaggtgctcctctcccttatttaggcaggtccagtgcagcagatacttctaatgattcacctcttggaggcccatcagctaatcatgaagtaacccctggcgattctgaaaatactcaaattgatgaaagcaatcaaattgagccttgggtatgtgcactagcagaaggagactactgcgatcttagtgttgaagaacgccttaacgcactggttgctcttgttggtgttgccactgaag

SEQ ID NO: 201167 - DNA, 804 bp, Zea Mays
gtcaagtaaatagggctgctcggatgtactcaacacgacacgaccattgtgctcaacaggcatccagacttgggcaagaacaccatcgctcaatgacttcctgaacaaagatagcgccatgagcatcctgtctgcaagaatgttgccaaccgacctcggaatgatgctactcccttgttgtgaaccattatttggaacaagcccatctgagtcttttagtcctctgtccacttcagttggattgaatactgatgctgagttgatcctttgagcaagtgatgctgtcacgtccataggtccaggataggtgtcaaacgacatgtcttctctcacagcagaagcacgcggagatgaccccgaagatgaccacaaggcaaacatatgttgcacagacgagggatcattcagcagggagaatatgtgatcagcaactgatgggctgctgagctccgagtatccatcaaagctcgtcatggcagcaccaccaaagggatcatcaaaagattgcatggggctgccgatgttgctgatgttactgttgcagccggcacggttgggaggcgtaggcacatccatggttttgctccactcgttgaggcaaagatccttatccactcctagcaggctgatatggatttggagcactgtattgagctccggacaggatataaagaagagcactgtcttctggctgaatagaatctttgttcaaacacaagaagcaatttaatacactagcaaagcagtatctggctatctgcacaggatacaacttttgttctgcagaaatgccctgttgataat

SEQ ID NO: 201168 - DNA, 635 bp, Zea Mays
cttcaccagatctgtcgctgctacgtcttttttgttttcccggtcagtgctcgggtttgtatctccatcacccacagccaatcgactcacgcgtcctcgacatcggcttcaacaacatcgacttcatcttcttcgacggtgcaactggcgtgggcggtgtaactggaacgcccgcctgtgttgcgtctcttcatctgcacgtccatgtatgccgacttgtcgccaccaccgatcgggaggctccatcaccatcgtcgtctccgactcgcacgctgtcggcctgatcaaccgatcgcgggcgaaccattctcccgagacgtttgtcatccatcgtgcaatgcttcgccaaacaagagggtcgttgttgcgtcgcctcctcaggcagcaacatcaccgtatgtcatcgaccaacgttgttgcatctacatcgttgtcgacttcgtcggtgcgcgtctctcgcacggtttgagcaagctgttcgacacatgcgagctgcgccggcacacccgtcgttctgcgctgcgggtcctcctgcatgctgcgtcaacaccttgcactggtcaccgtcgtcggtctgcaccgcatttgtcatcgagttcttcgctgacaaacacaaccatcgcgctccactggtg

SEQ ID NO: 201169 - DNA, 295 bp, Zea Mays
gtagttactcccttgtttatgtctctaaggatcatatccaccaggtggtctctttgaatagtgtggtggactcttgggtgtggcacttagattttgtgtggtggtacttcatcttcatcctccttgtcttattcttcctcaacccccacttgactatcgccacgatcttgagcttgttgttcctcattttgagttggggttgagcttgtgtggaggatggttaatcttgcacttgttgaggttcttgtgggcacacgtctccaatggacttgttgaggttcacgtgtcatattta

SEQ ID NO: 201170 - DNA, 340 bp, Zea Mays
accctatccacatgttttaacctagttcaccctacactaaataaagaatgacagaccaaccaataaagtcatgatggattgcataatatgtctattcccaacaaacatcaaacaaacttttgacctgcatcatgtattctgtctcatacatatctatcttaaccacacttcccaactctgatgatatacactaacctcgaatcaatgagaccaagaccggagaaggaaaagatcaaccacgtcaaggaaggagagaagtcaaactcgatcttcaagatgcattaccacccaacaaggagtcctttctcactgtaaactttcttaccccaggatattcttg

SEQ ID NO: 201171 - DNA, 278 bp, Zea Mays
aaaagtatcaggctgccgcacagaactcaacgagtttgtctcctcaggacatgcagaataattgtaactcgtaagtggattggcccttaccgtgctacacacttcattccatcctcgattctttgctactgtcaaattgtttgtcaccattttgaacatgatatatcttggttctaaaacttagtatctgcctggtaaagaagtcgatataagggtggacatacttgtgacttcatttgtgtgtagttctagatgcactatcctacacaacaattgat

SEQ ID NO: 201172 - DNA, 379 bp, Zea Mays
agatggaatatcatcggctgacctggcatcacctttcgtggggagctgttgcaacacatctgacatgtactcggcgtttatctccctctcttggacggtcttctagtggtaatctaccctgaagtgcgagaggaaccacttctccgccaccttgggcacctgatcttgttgtcgctggacctctttgtctattttcttcatgtcatcttctaatcttttatgctccgtcaccgacaaattagtcagccttgtgtcgctatttggagaagcactgctgagatctttagaaacgaccatataaacctgattttgtggatctgcaaccttgttccccagcggagtcgccaaaaagtgtgttggcatcgatctgggcagcgcc

SEQ ID NO: 201173 - DNA, 498 bp, Zea Mays
gtcaggcctccctcgccccatcctattgggtcgaaggtcttcacaccgctacatacctccttaatcggctacccatacaaacccttatttatggcaccccgtattttgccctcttcggctctcaccctacctatgaccacctccgcgttttcggttgtgcgtgttaccccaacatgtccgccaccgctcctcacaagcttgccccccgctctagccattgtgtctttcttggctattccagcaatcacaaaggctatcgttgtttggacctttccaccaaaaaattctcacctcgcgccatgtggtttttaatgaggcctcgtttccccttgccgactctcgagcctcgatcactaaccttgactttttgtctgagcttgaggagtcgatcttgccgatcgagccctccactgcaggtactcgcctcacctcgcctgtcgcggttgctgccctagtgcgcctgctgctgaacagggctccgtgttgttgccactgcca

SEQ ID NO: 201174 - DNA, 848 bp, Zea Mays
ctcctgtcgcaaatcgccaatgggtcacaaatggtcaaactcgagaaggatccagatgcagcatttgctctagttattgatggaaaagctctggcatttgctttggaggatgacatgaagcatatgttcttgaacctggcaatcgagtgtgcttctgtcatatgttgtcgtgtgtctccaaagcagaaagcactggtagctttgcctctctccattggactatctgtcgtttctacataaagcaatgttgagtttgttctccttcactttgtaggtgactcggctcgttaaagaaggtataggacaaaccactttagcagtaggtgatggtgcaaacgatgtgggcatgattcaagaagctgatattggagttggaataagcggggtagagggcatgcaggtgagttgttcagattgtcatgatctaatccttatctagtgtaatgctatttccatctgacatcaaggattggtgattaggtgtgtgactaaaattggttattttcctttaccaggcggtgatggctagtgatttttctatttctcaatttcggtttcttgagcgacttcttgtcgttcatggacattggtgctacaagagaatcgcccaaatggtgctgctcgaagcactttattcattatattcatctgattgtgttatgttttaactttactaaatattctttttgttgaattgtagatttgctacttcttttataagaatatcgcatttgggcttacaatattttactttgaagcattcgctgggttttctggtcaatctgtatacgatgattggtttatgctgcttttcaatgttgttcttacctcacttcctgttatatcac

SEQ ID NO: 201175 - DNA, 308 bp, Zea Mays
aactaagatccaagcaattgttgactggccgacaccatcatgtgtcaaagagcttcgcagcttccttggcctagcgggttactatcggaagttcatacgtcactttggggtaatctcccaacctctaacatccttgttgaagaaagggattatttttgtatggacaccagaccatgacgtggctttccaaaccttgaagcaagctcttgtcacggcgccagttttagctctacctgatttctctacaccctttatgatagagactgatgccagtgacactggaattggggctgtactcatgcagcgag

SEQ ID NO: 201176 - DNA, 3601 bp, Zea Mays
caattaattggaggccagacaaaccttcgatgctgtactggtatgtagagcaccattctaagcctaacttgctaaaatttgcattggtactttttctgtttatttaaagatgaactcctcctgcaacatctactgcgcctcaagccctcaacataagcttacaaaccgataatagaaaaatatagttcactttagtagctgtgtggaaatagaaagacttaaagccatccaagttagttaaatctcaattttaatgctagaaatgtaataccgtacaggaacattgtaatgggactagaatgacaatcctccttttatgtttatttatggttatggtctcaacttggatgatttgaactaaaatattttagcgcccatccattcaaacgtatcctcatggtttaccttccaaattaaacattttttgaaacttaagcgccaaatttagcgacccagaaacaaaacatcaatgccaatgctatcgatttttctataaaagatcttttccttgtccaaaatatgggtaagtgcccatattagtatcggatatgtttatgtgcaaacaaaatatgtgttcgttaaaaattgatagaatctaccatctatgactttgagattgactatcttaaagaaaattggtttgatggaacagtttatgttcttttgttggttccacgaagcctgacctagtgaccttacatcaaagaatagtgccaggtgtcactaagcaaaaaagaatagtttcaatatagtaagttctatttctatagcagtataatttcaaacagtaacatctgcattctgcagtagtatagttgcattttcatagcccttgatgggacacttcttgattgaaacttgggcactcctcttcaggggtctgaactgccggttgaaagtgaaacataatggtagtttcatagtttgcctatcagcatatgagatgaaaatgtttgctttcttggtaaccataacttttcctttatcctttttacttagttctgactatatttgattagctccatatattaaccaatttcacataaaacggagttatgataaatatgacttgatgccaatgcatgtttttctttttgcaacattccaattgtaccactagtctctctgattccaaatttagaccgtttttagatttgtcctaagtcaacatatttagctttgaccaccaatagctaaaaatctaaatagatttacagcataagagcatctttaagtgtctttctaaatttcactctctaaattgtcatttggagagtcatttgcataaaagtcgctttctatatcttttcactctccaatagcttttctatatcttattgtactctagagctattctcgttttctaactttggctagcaagaaatcctgaataggagatggctatatttggataatcatttaaagaagctgttggaggatattttttttaccaaaatctctattcctagcaattaggaaggatatagactctcttggagttgcttgaaggtatgcctcaccaaacattctgggtctcttgaaaacagtggctgatgaatgtagtctttggtgcatgggtgcctctaatcttcaggagcttctcattaggtcgccctacccagacctgtaggctgtggttggtaggttgctacccccttggtcatgctttcatctagttccaggagagcttatttcttgtttctagctggtgtgtgtgttgtgtttctggctggggctgttttaccctcaccccttgacctctttttctctcttaatgaaaggacacacagctctcctgtattgtttgaggaaaaaaaggttgatgctactagattcatcatggcgatgcacagtagctcaagccatggttttgggtgtctgatataaaaggagcactgactgttcctgtcctaggagagtatctatttatttgggaattgattgatgatcgaaccctgcaactaggagtaatggaccagcactgttggatgcttacatattcaggaacatacggcagtaaatctgcatataatgtcatcctcatccggctgcctgccccgtttgcccccttcgcgatcaagctggagaatccatccaacaactccttgtgtcctgtgtctgtgcttggcaggttttgagtgaggtccttcagaagctggggctgatcctccttgtgcctctgaccatcaccaagtgtttctcacattggtggtatcggaacttgcctggggaaatcaggaaagggctaaactcagtcatcattctagtggcatgggaaatatggaaacaccaaaatgactgtttaatggggcaaggacaaatgtcaggacaaccttagaggcagttcctgatgagtgtgtcttctggtgctcagtcggtgtgaaagatcttcaagaaatttggtcaggacgcttaatgtggccatgtgatttttagtcctgggtcactggttgccttttgtgttttttggtgcagtttcttcctttgttcttgtgtgtgtttggatgtgtttatgtgtagtatgtgtttgggtgtgcctttttggtgggagagtttcttactttctttaccacccttgttctgttttcccctcatctcgtattaatgaaatgatacacatatctcctgcgtgttcgagaattcatgacaagtaatttcataatatacaagtatctctatcaggttataaacctatgcattttttatagcaaccttcttttatctcctagtggaagtaagtgggttgccttgtacaggattttgtttgccccctcctttgtctatttaatataaggatgctcagctctcttccatgttcgagggaaaaaagaattcgcaagtgaaagtttagtcttgtagaccgtgtcaaactgtcaatgtcctaactcttgaatgacttacattaagaattagaggagtgctattttgttttgttgtttttagtggtactaacatattttaaaaaacatcctttgaaatcaatataaaatcactaatcgtcggtccagtacaattaagcatactcatgttagaattgaattgacatttgttttttcttttttaatttgattagagatgctcaaagtattgatactgcctcgatgaagtgtgatatggactaacagttcattcgggtctttttaatcatcagatctcttatgcataaaccatgttattagggtatctgctgtatctttagatgctctatgatatttgtgaagaacatttacttgcgaattaagtataactttcacttatcaaagctgtaagtgtttccatgagctactcctttgttctagctcatctttactttattcttctgatcagggtggagacacaagatggtggagatgcaaaagtagaagtctcccctcgtgacatagtttacatggaaaatgctgagcctataaatggtgaacacccagagattctgcataaacttgaccttcgctatgcgtatgtccctcaaattatccattagctactttagatggatcattgagcttttcttcattgcagatgttacaatatttctactttctagcatgaaacctaaacaaataagaataccaataaagtttcaattctaaaaataataagg

SEQ ID NO: 201177 - DNA, 520 bp, Zea Mays
gcgactaggaagcgattagtcgtcctagtcgccgactaaccacgattagtcgtccgactaggtatagtggtcgactagttttgtctgttttgggccactaatccggtctctgttacatgggccggtccaccatctatacaacacaaataatgttttgccctacttgtaccaatacggtacacgtagtgcacaatagcgcgtgcacccttctccagcgccgccgccctcctctcttgtccccctgctgtgcttcagcggccctctgctcgagcgtcagctgcgcatcacgcggcagctgtagtctgtagaggcccccccctccagcgttgttttgcaaaatataaatagcatatagtatatgtatgtatgcaacactatctctactcttcaaaacttcctccacgattttatcagacccattagtttctgccttccgcagctatcctcccgacccactaggccactacggcaatgcccctaggacatctcttgatctcgcatacctagtcaagaaatcttg

SEQ ID NO: 201178 - DNA, 547 bp, Zea Mays
caaagcgacgtcaagaaacaagaagagagggaggttgatccgtccaaataatagatgggattccaatcaaatggcagcaatggcacagcctagttagccgacagatcatcacttgatttgtcagcaacagcatccgattctaacagacagcgagcccgaagacatgacggcggtggcgaacctgtcgtcgggggcgctggaggcgacggcgaagccgctggcggcggcgtgctacgacaacaacctggtgaactcgcagggcatgttcctgggcgaccagccgctgcgcttctcgctgccgctgctcctcgtgcaggtgtccgtcatcctagtcctctccgcggccgcccacgtcgtgctccgccgcctcggccagtcccgcttcgtcacccacatgctggtcggcatcttcctggggccctccgtgctgggccggaacgcctccttccgcgacctcctcttctccgagcggggcacctacatcctcgagagcgtctccctggtggcgctcatcctcttcctcttctccatgggcgtcaagaccgac

SEQ ID NO: 201179 - DNA, 493 bp, Zea Mays
cagtaggggcacgtactccatagcacgacgcccgtggggatcggcgagcgcgatatggatggaggggataagcgagggagctagagcagtatctgccgtaagcatcagccggtcaactggtcgaataacacatgtcgatcgacgtgtgaccatcgggtggatgtggtggtggtcatggtggatggcgaccggccagtaggggcacgtactccatagcacgacgcccgtggggatcggcgagcgcgatatggatggaggggataagcgagggagctagagcagtatctgccttaagcaccagccggtcaactggtcgaataacacatgtcgatcgacgtgtgaccatcgggtggatgtggtggtggtcatggtggatggcgaccggatgacacatcgacggctcatcacaggagcaggccagggcactgggcgactcgtcgaaggaggtgaccggtagaccggactgcacataccgctgatagacgcatgtgag

SEQ ID NO: 201180 - DNA, 294 bp, Zea Mays
tttagattctgcgtacaaagcatctatttaaatcatcaaaggagtcatccaattgggtgtccatagtctcattctcaccattgaaaagattgtcaaaatacctctgccacctttgtttgatgtcttgtcctttcgtgctacactgttgttatttcctgctgcccactgttgctgttggtgctgttgcctcttatcattgctgctgcacttggtcaactggattggtttggtgggctgggcttgcctgtcgtttctctccgatactgttgtcgcatgttgttcattacccactct

SEQ ID NO: 201181 - DNA, 804 bp, Zea Mays
ccaagttcagtgaccaattcccgacgagtcccgccattccccaccccgaaaggtcacgcaaacacgcggtgtatgtcggtgaagcactcagccctcccaatttagcctgaccggcaaggcagccgaaaggcaccggcaatgcctcaatctctctctcacccgaggtctctggcgtgatactttgggcttacgcggccatctatttatagaggagggtgagtccgcgtagagggaaattcgttggtggggaagggaagaccccgagatctcctgcgacggtcatggcggccactagaggttgagcaatttccgcccaaggccaatgccagagatcccggtggcttctgttgaagcacggtgatcccggggcggtgaagaccacccaggcgagctacaggctgactccgcgtgggcggttgccgggcagctcggattcgttgcgaggttcacggcgtgggttgcacatcaaaacggcattccgatctctacggcctccaccgcgttcatggtggaaggaggcttctgcgcgacagggcccaaacggcagagaccgggtcagtgctgtttttctgcggatggtccaaggagtggggtcgatccggtagcgttcggcccgtgattcctggtggcagcaacacattcagccgagcctgcgtgactttcgcgcgagatggggaagacgcacccgaccagcgggtcccacacgcacgtggctatgcgcgaaaggaagggctggcacggtggggcctggggcagcgaccaggtgaacgcccgagcaacgtgcatggctggcttacatgtccc

SEQ ID NO: 201182 - DNA, 484 bp, Zea Mays
accgtgccctgccagcagccctaaagtctgggacgacggtgcccaagcgctggggtcctggtcctagacttcaaacatacaactcgtactaccatcgtaaccctaatcctaccaatctggtatcggatatgtcaggccttccgtccaccaccatccagccaccgacctccttcgccacgctcccgatctccacaacttcggtgcccagacccgccacatcctcatccacggcacctccacttcccctcatgctcgagtccttggtagcagtcgtccatgagctcacgcgatccgtggcaaccatgcaggcaacattagcaaccgcccttcttcccccgtagcagtagccactgcgcggacatcttatggcatgtcgcataccagtgccccaacgacactgccattcatctattgcccatatgccaccgtcaccttcccctattccatcatacgccatggccatgggtggaccccattacaccat

SEQ ID NO: 201183 - DNA, 291 bp, Zea Mays
cacaaaggggatggaattcacaccttgctcctgcaactttaaagggattcctgacagaagaaaagtctttgaccagttgaaggattccggctgaagaagattcgaaatgaaaaaaggtgcccacttctcagggacacccaccgagtgatcagtcggtccagtcggagcaaagaattttgcccagagcctagagaactggacagctctatttctctcctcaatcaactgaaagacggggtcaggctgccagtcctggtgtagcatgagattcatctccagattctgatggtg

SEQ ID NO: 201184 - DNA, 388 bp, Zea Mays
tggccgttgaagaggcatcctgcggctgaggctaaacaggatgacgtgggcaaacgggaggccagtattgctctcgcggttaatatatagaatcctcccgacgaaggagcagagcagacgacatcatagcgtggatggggcgcgtccgtggccgttgaagaggcatcctgcggctgaggctaaacaggatgacgtgggcaaacgggaggccagtattgctctcgcggttaatatatagaatggggcgcgtccgtggccgttgaagaggcatcctgctgctgaggctaaacaggatgacgtgggcgaacgggaggccagtattgctcccgcagttaatatattaagaggagtttcataggataaaactatgtcaactcgtttctatagt

SEQ ID NO: 201185 - DNA, 351 bp, Zea Mays
ctcttccatttcctccacgtttggagctcaaacgaagcacaactgagcttgtggcccacaagcaagcgacctcaatcccgcttgccaatgctatattaagcttgttcatcctgcaggcaaaaggttacccatcattaccgttagttaggcaccatgccatttttaggataatcagcaatctcctcgcatgtagctggtcatcatccgtcctccttggtttagtttgttctccaatggatcctccaaatccaatgcgcttagcggcacttctctccctctgtgctgccgtcttctccttcgccttgcttctggtaagcaccgccgtcgcccacaatgacctcggcgtgcaca

SEQ ID NO: 201186 - DNA, 404 bp, Zea Mays
tcccatttcgactgcctcaactatggcccttccagctgctttgaaggattcaaggactaatgaggaagaacctggcccatctactggtaggactgttgaagagcaaaccaccgggtgcttgaatcaagaaaccaattcaatacctatggccagagaaggtgaactgcccagtgagaagccttttcgttgttcttgccaggaaaacattgccagagagtctcgtcaaagtcctgttgccagaccaatgctgaattctactgggaagcaggttccgcaattgcacattggttcgagggcatcatcatctttcagcacgtaccaaagaaccagcgcaaagcccaacccttgctttgatccacatgatcatcttttagcggctaaggtcccagcagaatctgctatca

SEQ ID NO: 201187 - DNA, 360 bp, Zea Mays
aaaaatcatgacaacaccgatagatactatccactaactgtttgaaaaactaaacttacttctcgcttgccactacatcactcctcaatcacacaaccatcacgagcatccttcacacgattatataatagcaacctaaacgtcgtgttacacaatacatacatctttcctcgtcgtgagtataaccatattacggcatatacccatgcacctcaaataaatatctcacgccaccactactatatcacaccacggcacatacgcacatatgtgtccccactgccttctcatgcccaattttagcacaattatttatgacaacgtttatcgactagacaagtgaaacactaaccgatcatt

SEQ ID NO: 201188 - DNA, 702 bp, Zea Mays
aatacatctacaccttttgaactcgttcattgtgatgtctggacctctccagttttgagtatttcgggctataaatattatcttgtcatacttgatgattttactcatttttgttggacattccccctgcgccataaatctgaagttcatgaacatattgttcagttcactgcttacgctaacacacaattcagttcttctgtgcgctgttttcagaccgataatgggactgagttcattaacagtgccactgccgccttcctggctgcccgcggcatccttcttcgcacctcgtgcccctacacatccgccgaaaacggcaaagctgagcggatgcttcgcactctgaacaatgttgttcggacgcttctgattcatgcggccatacctcctccttattgggccgaggctctctccaccgttgtgtttctcacaaaccggtggccttcatcgtccatacataacagtattccctagcatctcctttatcgcaaaatgccagattactcactccttcgagtttttggttgcctgtgctatccaaacctcagtgccacgaccccccacaaatcgtctcctcgctctgcggcgtgtttttctcggctactctccttctcagaagggctaccggtgccttgatctatccactcgcaagatcatcatctctcgccacattgtgtttgatgagactcactttccgtt

SEQ ID NO: 201189 - DNA, 308 bp, Zea Mays
ctcgttgatggtggttagggtttcgccgcccgcacgctcgacctgctgaagaatcgcccccctgttgaagaggtctgcgcctcgccctataaggctccggggaagaggagatagacatcagtggaccccggcgcgcggctgatggcggagcaggagcggagggacgcggaggctgggggcgatgccgcgggcgcagcggtggcgtctcacaccagcagcatgcaggtgaggtctccgcaccctacttctcggctgtcctgtacgattttgggagctttatgatgcgtagatccgctcgctgctatttg

SEQ ID NO: 201190 - DNA, 323 bp, Zea Mays
tctgctgaactttgtttttatatcacattgcaagaagatccaatatcaataaatttggtggggatcccctaccccgataacacacgcacacatgacacatagactcaaagaaatactctaacacatacatagaaaggatgcccgagcttaagaaatcaagcatctaagcttaccttgcagtggacattcttgtctctgaaaaaggggccataagcataacgtctgttttagaaatgtcaaatcagagcagcagcagcaaggaattgtgcaccgccgagaggcgcaaccgcgtgcacctcatcactggcatcggtgagcatcac

SEQ ID NO: 201191 - DNA, 825 bp, Zea Mays
atgagggcacaaacacatggtacagatctcataaccaaaaattgctaatcaacaaactaatacacactaatgctgcacacatacattagtacagggacataattgcaacatgcgacataagccagttgcaacaagactgctaaaaaaattactactgggacagttgcaacagtgaatttaaacaaataactagttgtatacgagcacagttataaaagacagtaatgatgtatgtggtctgaaagtaaaaattatacagttgcaacttatgtcatgaaccagttgcaacaaaaggtacactgcagttacaataaaagtggaaacatctgagattataacctagaacacaaactgcttgttcaaaaatgaaatgtatccgcattaacctagattataacctagaatacaacaattaataattccaatcaacgaataatactagttgcaacacttggggaaaaaatggggtttacctgtctattaccgaaaataacaaaacaaatccaaaaaatggggacagagaaatgggagagagatcggatgcgcttacacggcggtcgcgggcgcttactactccggcgcgggacgttcgcggtctctgacgggagcggaggatccgttcgcgcagaagtgtggagggggccggagctgggaacgagcgggagcgtgcgggatggaggaagacgggaacgggagcgagcgcacaacggctacggcgagggctaggtcgccggggaagagaatggattgagacgtacgcggagggcaaggaaagtggaaaaggcgcagtcgggcgcgggtaagtgaaaaggcagcgtcggttcg

SEQ ID NO: 201192 - DNA, 320 bp, Zea Mays
tatgcgcacactaatttgggcgcatcatgacagacaagtaattcagaccagacctcaattggatggagtaagtcaggtggatttgttagttgggcctatcagacgaattcactagtcgaagttatcagtcggatctgtcagtaaagcctgtcagttgggttcactcaattggattgatcaggcggaacaagttgaatagaacagaagatactaagaacaacaaccacatttcattcattagaaagaggtcgttacaaagggaagggctggctcattatgaaccgaccctgtcatccctcactccttcatcaccatttcca

SEQ ID NO: 201193 - DNA, 549 bp, Zea Mays
gcagcagcagcagcatgaaaaatgggactacacaccagggcagtaaggcactaaggcaggcagcagcagacaggcagcaccgcagcagtaagacacacgagggcagcaaagcactatatatcaactcaagcacgagcacactggagtgaccatcaacacctaacagactagcacaaataactagctcaagcacgagcacaagtcaaagtccaagaggcaagcacaagcaagcaggcagtatatccaagagattcagaacagagagaacagaggaagaaggtgcaagaagagtagctttgatccgatgggaaggacgctagcagggaggccgaaggtgtggatcgatgggcggggatccaatcggaggggcgaatccgctccaatcgaagggcaaatcggcgggtggaactccaatcggaggggcgaatggaggctgacggtcggatggaggcggacgaccgcgcggactgtagctgctagcgccgccctcttttgtcttctcttcctctcttccctctctttccctcccactctctcgatttggcgtgc

SEQ ID NO: 201194 - DNA, 316 bp, Zea Mays
actaaacccaaacccaaaacgatgctaactgctagacagtaaacagagaacatgcgagaacgatttgtactagattggttggcgcggagtttcctggccgcggtagaggttggtccacggtggggagagaatctccggtgagcaattaatggcgctggaggcagtattcccttgcgacaacttgtccgagaacacccccacacaccggcgctaatccctcgttccccaattccccggagtaacggcgacaatgggcaatcgaggtggccacgcgcttcactccttcgtggtgtgcagcaaggggggacaacaggag

SEQ ID NO: 201195 - DNA, 634 bp, Zea Mays
gtcacgacctcgtcttcgcgggcgccgccgaccggatcctcccgacgctatcgcggtcaaccctgcctgcaccctcacgacctcgtcttcgcggtcgcacatgatcacgtggtcaaatcccgctccgttagcaagtaccaccagcagcaagccagcaacccaatgctgtgctcctcccacctcctgctgcgcgcacaagtcaactcctgtctgcggccgccgcgccccacgccggtccccatggctcgttccgctcccactttcgtcgctgtttttctcctagtcctcgtgcttctcaccatggacgcggcgcagggtcaacagccgttcccgctgtccaccgatccatccgacggtatcgatctctcgctccttctgtggcatctgaagttgtgtaatggcgacgaaatagttggcagctagtaaatcgtggatctcgtgttcctgcagcggatgctctgcacgctgtgttccggcagtggagactggagggcggcgcggcgatggaggacccgtgcaggaagggcgtctggtcagagtcgtccggaataaacgcgtccgtcgaatgcaactgcctcccctcaagggtgtgccgcatcacaagcctgtgcgtcttcttcactcttactcggtt

SEQ ID NO: 201196 - DNA, 1323 bp, Zea Mays
caactaccaaacccatcgcacacgtcctgctcccctccccttctcgtcgcgtcggcattgcattgcacgcctcgcccggcgcctgctcccttgcattttccattgacctcccccccgccccctctcgtccgtctcctcctccccaaagcttcgaattttcccgagccggagccacaccttctttctccccgcgtcccacgattcgccgtcggaaagaggcaaggcaacggaaaccgagccgtcctgcgtgagctggggcggggtcccccgtctgggtgccttccgtgccactctcctgcaacgcggggcgcattgtcttgctgcccccttgagaagggaagattcccgccatctattaatcctcctctcgtatgccgttttctgcctggggaggacacaaacgcagcgccgcgggaaagccgggcgccgcatggatcgaggcatccggtgttcctgtctcaagacccagttttggcgtcttggcgtagcgggacggaggaggacgacggggtttcggagcgcagggtcgcggcggcacgccgggatctccgaggcgccgcgctgttgagtgttgacgccttctcgttcctgggaggaggtgatttctctgctgagggcctggggagtctcttggttcagtccctctccctctgcagtttatttgctttttttaggtaggtggagtgtggagttgttgggtgggagagggcctggaatttatttcgagctgcttctttggagaccattgtttctcgaatctgagttcctcttcttcggagggagttgtcaattgcgttctgattgatttggacaagatcggaaggaactggcactctcggtgggcgtacaaaaactctgagcttgtggccttatcgacttcttgggggcatctgggagtagcttcagcgattcacttgagtctggaggaatggcgccgaccaagaggatggagaagctcaagctcagcacattgttgactttcatgcgttgccacaggggctctagtgatgaccactcacggattgggacagtggggttctcccgagtcgtttacgtcaacgagcctgatatgcttgaagaggagggattcaactaccccttgaatgaagtgtcgacgacaaagtacactctggccaccttccttcccaagtccctcttcgagcagttcaggagggtggccaatttctacttccttgtctctggtatccttgccttgactccacttgcaccttacacggcagtgagcgcgcttgcaccgctctgtgtcgtgattgtagccaccatggcaaaagaaggggttgaggactggcggaggaaacaaca

SEQ ID NO: 201197 - DNA, 611 bp, Zea Mays
ataaaattccaatgtgaggcaatgatctgtatcatggttgacacaagcacctttgagcaatcaaggctgctatgttgttaaccttgctcttagaggacatggaaatggactcgaatatgtgaaatggactgctgacgaagggcgatgatgctcaaccttttcggagtcgcacgccattgagcaaccaaggcagctgcgtgtctggtagcctatttaataatccctttttgtttgtggttctgcctaggatggtcacctggatggatatatgacaaccaggacagttccactcacaataggatgagtagattgggcagaaagagaagggagggcctgatttctatgattgagcaaaggagatgctgagctgagcccctttcgtatggtttatgcagcggtgctttatggctctgttttttgtttcataccgcgcttgagtggctaagattgttctgctttccattacagagcttctgcactctaccatcttctgagctgatgatacctgggatattctttgacgtttgctgctttactacgatggcccatgccttactagaaggtgattctatatctgtttgctgctttaactaggatgccttgcaccttag

SEQ ID NO: 201198 - DNA, 299 bp, Zea Mays
agaatcccttatttgccatcgaacgatgacttgtgccttatttgtcgatgaaaagatttttgttcctttatctgccatccactctaactttagaaaactcggccggtgggggaaagactgtccctacggtatttcactaagaagagctcaaccaggccgagaaaagccacaaaagctagcttcctcatacatggggatgccgccccctatggtttgggcctcgacccatgctttgaggctaacctacatgaccaaccacttacatgagggcctgcctaccataggtcggttcacccata

SEQ ID NO: 201199 - DNA, 385 bp, Zea Mays
tctttttttactaacagcccattctcaggataagcagtctgcttgacctttgaaatcttagatatttcaactctctgttcttcaatggtttcctccagttcctgaagaatagaaagaagctctatatttgactcttgagtcctgtttagttgtatggttaagtctgtattcgattctttaagaaacttcacctcaccttcaagttccttctgcaggtctatccagtctgaacgtttaggtgttcctgtaattgtctgtcgtgtgtttacatcttgtaaggatgactttaattcttctatttcatgcctatatgaatcccgttcagcttgtgcagcagacagctcaactgctagttcagcatgttgctttgatttttcagaacact

SEQ ID NO: 201200 - DNA, 350 bp, Zea Mays
tgatcacgaaatcaacggtcacgatctactgcacgaaggaggtatactactgtttgatctgagccgcacaacaaccatcccacggtccaaaccccatcagaccctgggctgttcatcccgagatcaacgtctcaggtgctttctcctttcttccgctctgaaccacggcggcgccgctagctccccacgacagggccatggccggcgatggccatcccacgcaacagtgcttagaacttttgaacgacaggtgctaaccaacgcttggatcctagcgggtacgttggtatgaatcttaccggggttggaagcgcagagggaactgcccacgacgacgagcggctccacga

SEQ ID NO: 201201 - DNA, 331 bp, Zea Mays
gaagagcccaggaaagaaagggacgagcgtacgacgatgctcctcctctcctccggttgctgcagcgtccgcgaaaattcttcgtctgggaactgacatttgcgaaggagagaggtaaagataggacaattgtgtaactgctcgggaatatgcggagggagagattatgtatgggtggagaggttacggtggatttcttctcgtaggatcatggtaatctattttaaagattaaataatcatattagataccaaaattactttaatggataaaaatattttaaagagtccaaaaatttagaaaaactcctagacatgttttggaacctaat

SEQ ID NO: 201202 - DNA, 333 bp, Zea Mays
gttagagtcatttgaagtattttgaatgcatgccgaatatggttgcattccaaatagggaaagagtcatgttgtgcgatgaaaaggctagattgattttataggtcgtacgaaaatcgttctattaagtgtatacgtcgagtgtgttaaaaagatcctatgtaggcagaatgtagtgtattggttaggcgaagagttttataataaacaagtatgaggcgtgcaattaagtcgagattgaagtgcaaatcctatgcacaatgtgatgggattcgtgattatgtaggagttataattgttgatgtgacgagtagtttagaaaatgctcgtttgc

SEQ ID NO: 201203 - DNA, 349 bp, Zea Mays
gcggaatctaggcgatgacccttagcctagggactagtccagcctaggcttgcctaggcgatgctaggcgttttgccaacttatataatatatacatttatagataaaaaaataggcaacaatcatctgagttcaagccaacagtcaacaaattagaaactgaaaatgggaataacagaggagatgagaggagagaagcaggggacgaggaacaaaccttgggctgtctgctgtcgcgcgtacaggagagaaaccttcagcaagcagtagccgcccgcgtacaggagagaaacaagattgggaggagagaagcaagttttaccgcgtacaggagaaaagcaagcagcta

SEQ ID NO: 201204 - DNA, 412 bp, Zea Mays
ccatacccacaataggcatacaaggtttgttttgcttcggcaacacacatcgggccgtcatgtgggtttctttgtgacaaatatcacaccacagagaccggaagcaatcccgagcatgatgaccatcgactccacatttttgacagaaagggcgacgcgcaacttcaagctcttttttcatagtaacgggaggggttttgaggatacctgtgtgacctccctcaccagcagacgaagcgccaatgtcttctttggtctcagcttttccaataatcggcttcaacctccaacttggattacggatcttgttccacgactgtgaaccttgaggattatctttctgattccatcgatcccagttagggtttcttcccttcggatccatcttatgcgacgacaccacgcgcgacag

SEQ ID NO: 201205 - DNA, 345 bp, Zea Mays
gccgagtaagaatgattttgatcagtggtggtgcttcaatagtgctcgtttgagtcggctaagcaaaaaaggatttgactctatggttgtcctgggagcttggatgttgtggaaacaaaggaatgttattgtctttcaaggatctcctctgaatatggtcgtggctgttaggttggcaaaggaggaagcctttttgtggttgttggctggtgctaaggggatttccttccttcaagcgcagagtcctacgggttagtttcggctaggtgtaggggtgtctacatgtgttgcaggcgtgcttcctgctgctgtttccagtttggagccggcagatgattagggtcc

SEQ ID NO: 201206 - DNA, 384 bp, Zea Mays
ggtgcctttgtgaagtaggagtagaagggtttcaatcaaatagtatttggacttggacgtgctgatcaaattggattatgcttcggtatttgggatgattgggattagttggagtggctgatttaaggctaacggaggtttggtggtttagttcaggtagtattgttgatttttggttatagaataattagtatttggactatatagcagaccttccccgatgagttggttaatagcatgggcaattagttgccctgtaattgcaaaataaggccttgatcgttttagtagtacatacttacggctacattatcatctcctctccaaactggcggtgatatgtttccggtggccttcaagtgaagctttgggacatagttccag

SEQ ID NO: 201207 - DNA, 295 bp, Zea Mays
cagtctccatcgccctctttacctccctcctcgtgccctttctgcctccctccatggccttccacgctgccctccctgccatcggattctatcaaggggtagcatgcctcacggctcaacggcagtactatcacggttgtggcatttgtggtaggtagttcacgccgcccggatatgttgcctccccatccattgtcgcctcccttacaccgcgtgctctccctagtggcttgcttctcccttacctcgtgcacctctcccctgtggctcgctcctcaccgccctcgtgtgcttc

SEQ ID NO: 201208 - DNA, 383 bp, Zea Mays
cactgataaaaaatatgatattatcgaagtgtagtttaaatatggctgtaaacactagttcatagatctgacataggattaccaccatgacattgcataataaaaacacatgttctatgctacctccaccccgagaaagggacacaatgcactgaaaggaaacaacgccctaacaaacatgaagcatgatacatgttgtatcaacccagagcaatttcaatgctatatatgatgcaattgtaaatatggcaaacatgaggaagtcaaggcactcctgcattgaagttccttgcaaggaatagatggatataacaaatgaaaatatatagatcatgtgtcaaaagagggtttccaccaaaaagaatataacaaagggtaaaaag

SEQ ID NO: 201209 - DNA, 280 bp, Zea Mays
atttccggaacaacgacctcagctacgacgccatcactgcgggcgggaggaaggtctttggcagcaaccagccgcccaactacttccccaccaagctgtacgagtcggcggtcaccacgggcggtgacgccgccaatgagatcgagtacctcatgccggtcgacacgaggctgtcctacatggtctggctccatttcgccgagatcgatgctgggatcggctcacctggccagagggtgttcgacgtagtgctggctggggagaacgtcacgaggatcga

SEQ ID NO: 201210 - DNA, 428 bp, Zea Mays
ctcgacgtggttgtcgacgacgccgggaggacgcagagactccgactcggatgactccaccacctccgcctggtgtggtgatggcaaggaggagtggaggaagcggactacgcgggaccactctatctcgccaacgagcccgtcatggaccttctcgcgcgggttggaaaataatggctccatccagcgtaggcagtcgccggtcctagaggaggtgcctacgtggaccatgtacctgtcgttgtcgggtgcgaagtacaccgcgcgtggaagctggacctcctccctggatttcgatgggtggtcgagctcgttgccgtcgatgagcgtgtcggcgaggaccaggacgatggcgaggtcggaggggtcttcagagttggagcagtcgatcgcgtctccaaggaattcacatgctgcctcggcctcca

SEQ ID NO: 201211 - DNA, 317 bp, Zea Mays
cacagattcacatagctcacaaagttacaactctgattattctgatacatgttcaactcgaatttgtggaaaattgtttgaaagcgaaatgatactaacaaaaactgacacgacatgactcattaagcagacacaactaacatactgaacatataagcctcagttgtccgaccagcagcatgtaggtggactttttgaacatctaatgaaacgacatgcctgatgaaaaacacaaccaacgataatagtaaacatgtacgactctgttgtcggacgtccaccagctaagtgctctttttagtttctaactcgtaagc

SEQ ID NO: 201212 - DNA, 339 bp, Zea Mays
cgcttgccatgctgacctcctgacacgagcattctgcctcgtcaaagaccacagggctcactggctgattggacgcgtaccagtcgacatcgccgcagctgaaccctgatttcttgaggatgtccttgacatactggaaatcagcctcgttcttgtcactgacatagatgtgcaagggttctgcagcaccttgttcagaaaattcgtgtatgaagcggaagtccgaatccaaagcatcgttaggctgccctgacttgactaaccactcttcagcttcaagatcagcatccttggcaccagacagtttcgtcgccttaactaaccactcttcatcctcat

SEQ ID NO: 201213 - DNA, 317 bp, Zea Mays
gtcaaaacgggggccaaagatggtgaggatggcactgtcgtcggtgttgcgcctagagaaaaagttgacgataaagttcatggtgacgggtttgtacgcgatggtgaaattgaagcccaacaacttgcccacccaatgatgctctgaaaaagtggcaagacattggtctaggagaaatttcaaactgcaagttctcactaggaagcgatgacaccgaagatagggatgccaatggcgtatggcatggatgaggtcgaccaattctcgcttgtacgcgtctagggagcggtgggatatggcgacatgcctaatgagga

SEQ ID NO: 201214 - DNA, 297 bp, Zea Mays
gacagaagaaacactcagaatgagttagcttcagtgcatcttgtaatgaagtcatcatgtttactttactcagctggttgcaccacacaatcattttatctagttctcggggaactgaagacatgcctttccagtgtcccaaagttggtacaagcagatagtaacaacagtccaaggaggagttcatcttttggaacatcagagttcatcaaggacactgactctaggataatcctctggtgtgactcagctagtatgagtccattctcccgacaacaagccgacagatctctttac

SEQ ID NO: 201215 - DNA, 289 bp, Zea Mays
aggttatctgagaagttgcagcttgtcacaatatatgacctcaatcatgaatctctgaccttgcatgagatggctagtggcggtgatcctggtgcagttgttgaaaagatgtcaatgctcctcaaaaggattaaggattttgtgcagacagaagaccctgagatgggtgcccaagcaagtacagcaaccatttctacaaaagacaattcagcatgtcctgttattcccgatgatttccgttgcccaatatcactggatttaatgaaagatccagttattgttgccactg

SEQ ID NO: 201216 - DNA, 328 bp, Zea Mays
cttcggtatcgagcaaggaccttccaaacttgctgagctgaagaagctggtgcaagatggatatcttctttctgaccatctgataaaacatgctgatagcaaccgatgggtgactgtagagaatgcagcttcaccactggtgccatctgatttcccctctttatattcggacacttcaacacagttggtcaacccaccagaagccccaggaaatttgctcgatgaagctctagaggaggcttctaacttggcatcaggagctgaggataaacaaatggaggaaacgtctgcagaagatagtgaagaattctgcattgatgatagggtt

SEQ ID NO: 201217 - DNA, 473 bp, Zea Mays
gttgtctggagcttggtgccactcaagcgcatcagctcgcgccagaaactggagttgaacaccgtgtcgtggtcagagacgatggattgcggaatgccgtgcagccggacgatgtcagtgaagaacacctgagccacactcttcgccgagtatgggtgtgcgagggggatgaagtggcaatatttgctgaaccggtcgagcacggtcaggatgacagacttgccccagacgcgtgacagcgcctcaacgaagtctagggcgatgtcagtccacactccttgtggcacgggcagtgggagcagcaggccggctgggaggagatgctcggacttgttgctttgatagacgacacactcccagaccagatcctgcaccgcgcgcttcatattggggaagtggaatcgcagcggagatggtgctgagtgcgccggacaccctcgtgcccttcctcgtgaacgaccaccagaacctcc

SEQ ID NO: 201218 - DNA, 532 bp, Zea Mays
caagcacagtggtcaaccctttgtacttgctgtgcgtccgacgatgccaatggctgccgccaagcaagaaggcagaaaagaaggatgctgccatggaggagggagaaaaggggactgaatcactgaactgagtttcaatctggtaatgtcgactaggtacccgcgatgaggatgatagcaggaagcagcccccatcttttacagcttggaacttcatgagcagctatcggatggctctgagcagttggcgtcttggcgagatgggttccgtaccagtggggttaaaaaaaacaaaaatgaagcaagtatgatgtagcacggcagtgacggcacggcacggatgaaaagcgaacgtgggagagcagtagcaccaacaggataacttggacagcaaactgccacatcacaggtgttgttcacacctcagccttcgccatcatcgtcatggatcacaatacaaagatacccgtaccatcacaaatcttgaaggacaaaagcgttacctgttcatgttctaaaccacgtgtatttt

SEQ ID NO: 201219 - DNA, 511 bp, Zea Mays
cgcaagacagccaccaagacgcgccatcctccaaactaaagttcaccgaaacacaatgatcatcaatcctcgacccaatagaagtaacatgactcctccaagcaaccagaataccaccactcgcgccatttgatggagagaaaacaaagttaccaaaatctgatcccaaaacacgaagaaccagccacctagtaacatccgacattttggtctcttgaatacaaaccacgtccgctttgacactgtcaactaaacatcgaaccacatcctgccgggccgaactattgaggccccgaacattccagcaaagaatctttgaaggatccattgggaaacaaaagaagaacgaccacagaggcaccaaggcttagatcgcccccgaggcaggctcccccaacaaatcctctgggatggacatgttgagaagcaacgccatagatttgagctgcagatccgaaggccgtttcacgaacaccttagcataatcatccagcacacctggagacaacac

SEQ ID NO: 201220 - DNA, 757 bp, Zea Mays
atggatactctgagtgctgatggagtggatgaaacccctttacaagttaagctcaatggtgtggccacgatcattggacagatcgggctggcgtttgctatcctcacatttctagtgctcctagtgaggttcctggtggacaaaggaatgcatgttgggttgtcaaattggtcagcaaatgatgcgctgacaatagtgaactactttgctattgcagtgacaatcatcgttgtcgcagtgcccgagggtctaccactggctgtgactcttagcctcgcgtttgccatgcagaagttgatgaatgacaaagcgctagtgagacatctcgctgcgtgtgagaccatgggttcagcaagttgtatttgcactgataagactggaactttgacgactaaccacatgatcgttgacaaggtttggatgggcgatgtatccaagtctgtcaacagtgatacaaatatgaacgagctgaaggatgctactgcagaaagtgctgtggacttacttgttcagggaatatttgtgaacactgctgctgagatcgtgaagggagatgatggcagaagatctatcttaggcacaccaactgaagcagcgttgttggagtttggcttgggcttgcaaggagatctatacggtgagtacaataagatggcaagagtcaaaatagagcccttcaactcagttaagaaaaagatgtctgtggtaatacagttacctaatggaggcctccggtccttctgcaaaggtgcatcag

SEQ ID NO: 201221 - DNA, 376 bp, Zea Mays
atccaccacgataaatacgcgacaacgaggcagtcactgtccccatgagtacgtgtgacctcacctgttgtaaaacgcctgccatacgactccttcctagagaagccatagctggccaacctctctcccagcctataatagggagagggtcgccttagggcacgtaggtggagaggaagagaaggatggaccaaagaggggagctcttggagacatccggacgccttcagacagagatgaacccacaaggacgaacaagaggaggagcgccaaagaggaccaggaggccggagacccgccaagccaagacttagctagaactctactttgcagcttctaatctccacttccttccttgataagagatctaggagcc

SEQ ID NO: 201222 - DNA, 334 bp, Zea Mays
acaggaggcaaaagtatgattctcaggattccccactcattcaaacccttcagccaaatcaagcctcttctcctcaagaacagaatggtattggaaatgcagtccaagcttttgttgacaaagtaaccaggaaggtggatggtctgctccctccaccactcccccacagaagacgatccaagcaacttccatctgacttcatcccacgcagaagcagtcgcctggcaaagcgagataataaaacaaatgctgcacgcagacagattcaagctgacctgataagaagcctggatgtgccttgcgatggagagttgttaagtcctaaagcccttga

SEQ ID NO: 201223 - DNA, 310 bp, Zea Mays
cacacacacacaaggcctatacaaatgaactaaatcaaaacactgagtagcacgcgacatggactgcgcaaacggaagcctagtgtgccgacctaactggcaagcatggcagataagtacatgtttgggcttattacatgaaacaacaacaatactagaaagcttagcaagcacgtcagggccaggatgaccaagacgttggtgccatagggacgcaggagtagtaacagcagcaaggccgtagtgtgtagtggctggaggagcacgcgcagtaggaagactgatggtgtacagggacccagagctgttg

SEQ ID NO: 201224 - DNA, 309 bp, Zea Mays
caacacacaaatgatcttggaacatgttgttgttgtgagtactatggaattccttgtcaccagatcagtacaaaagaaagtgaaactacaaaacagaagaatcaaattttattttctggcataaaaagtcaatggtccccccaagaacaactaatagcagatgcactatcagacgatgaattgtcaggtattccaaaaaggaaacatcacaaggatgtccaacaccaaaaagaagcacatgagtgttacattgatggatggactatcacctgcacacagtttcagcctcgtcgtcgcatcaggtccaag

SEQ ID NO: 201225 - DNA, 316 bp, Zea Mays
tggttagtgcgtccactctaaaaggctacatctttgaggaattttctttgtggtgtatgtagcttctgtgtagtctgaactttatgcaccagagttttctcactatactgccatcttcataacaggtcttgaaacgaagcggggctgaattagagaatgaacttggatctataggccccattcgtagaattcggcagaaatcaaatatgatgtcttcatttagagattctcgtgcaaatcctaaaggaaaccttcttactagccatataagtagtactgatttcactgaagacggtgcatccattcagtctccgag

SEQ ID NO: 201226 - DNA, 529 bp, Zea Mays
tcttgagtttgttcccaaaacctcttaattattattgcccacggatagtcatgttatctacataatccgttttgccactcttcagggttctgcattgtgaatagaggttcatctttgtgattagattgccaccgccgctgctttctactcattcgacgaatgttttgcaaagaagaaatctggtttatcttaccctcgattccttcctatgatacaactaacaaaatgaattggtacattcaggtatctttaaaaccttttcacttccaaattagaatgatatcatgctcaagaggtaacattttctgatgttttttattttaatagtaattattggtcgctgactttttaaaactatttgtgttgtacttcaagcatcttctacactgcatctaagctttgaagagttacggacaattttgtactaattgttttctttattttcccaaatgtgtgccacttcctttagtatttttgcagtgcagacgattgaaaactactgttttacatcacctctctgtcataggaa

SEQ ID NO: 201227 - DNA, 354 bp, Zea Mays
aaccaatgtaaagaccaaaatcattttgacatgaccccaagaacacagcctcgggaacgtagtaatagcaaggaagcatcatggcctcttgatacataaatgatgaaaaacaacatattttaccaatgaataatgcaatacacagattgatttgtaatattgcctttgttcgtgcgtactgaaactgaagactaaattgattaatttaacaagcatctcaccagtgtatgtgtcctcaccgtcacattgtgtagcattgggcacatcctctggcatccggtggtcgaagcttgtgacaggaatcacctgacgtcgcatcgatcccacaccagatacatccaactcttccttcgt

SEQ ID NO: 201228 - DNA, 291 bp, Zea Mays
ttgagcttgagagcttgtgagcgtctaagtgtgtctgagtcttgtaacgttgcgtgcctccccttttatagctgaaggggggacgtacaagggtgctgagccccgacatgtgggcccagggacgaaataaacgtaatgcttggagcaactaatgccgggccgggtgcaatctccttccgccctattatatgggatccgcgcagcattgtcgtgctgaggaagcttgcctggcgacgtacgagtcatgatgagtgcagcgcatgcggcagcatgggcatactgcctgccaac

SEQ ID NO: 201229 - DNA, 480 bp, Zea Mays
cttgtgacgtccttctcctgacagtatcatgcggagcactaaatctcctactacgaaggataaaaaacggacctccttgtcatggtagcgccttagagtttgctggtacctagccgattgaataaccacattcaatcgttcttcttctaacacatcaatctcttcaagccgagttgcctccgcttctgcgatatctttgaaagtaagtctcggtgctccaaacgctaggtccaccggtagcactgcctctgagccatacaccataaagaaaggggtgtttccttgcagtgctcggcttggttgagtccgaaggctccagaccacgtacggcaactctctgatccatttccctgccagcttctcgtttttgtcaaagaccttcttcttgagtgtttccaggatcattccatttgctctttccacctgtccattggctcttgagtgtgctactgaggcgtacttcagttggatacatttttg

SEQ ID NO: 201230 - DNA, 339 bp, Zea Mays
tgtgcatgcatgcggagcggtggcttggctcgtcgtcaacgtcaagcatgaggagaaaaccaccagtccagagccgagcgcaacaaagcagacacctgcagctagcttcctccgaatccgatcgagcttctgaaaagatggccaagacagtgtcgatcgcgtaacccttctgctccaaaaagctttcggctgtccaatcaggaagaacgaacatactctcgttccgtcccaaaacaaagtgtttgaacatactttagaccccaaaataatggttctccttaattaattaccgttctacgtacttgaaagacactccgtgtttgaaatacccaagcatca

SEQ ID NO: 201231 - DNA, 369 bp, Zea Mays
caggaatggcattaatgtaaaacataccaagtacgatgtcagcaccatcaggagtagcatcaacgctgacttgattaactctggctatagaatatcccttgccaggagtctgttgcttgctcttagctggtgtaccagaattccccatcggacaagcattagcatagtgcccaatctgactgcacttgaagcatgtagggccagtcttctgtcctgcagacctcgttggggtaccagtgggagtagcctgacgagtaggaggtgttcatggagacccctgtggagcatactgagctgggcgtggtccttctcctggacgagtaggtgtaccctatggcgaaacgtagcggggacgaacactgctgctac

SEQ ID NO: 201232 - DNA, 388 bp, Zea Mays
cttttatcacaccactgttacctctcctgtttagaacaccaaatggctaaaatcagctaaaaaagctgctaaaatttatctcttgaaattgaaacagggcattaatctagttgtggtccttcgctgtagcaacaaacttttctgttgcagagtttgtttcagatttgtcgggttgcaggtttttcagttaggtttagattagatcaacaggtatgtaatccggttaggatttagttagttccccagattgtttgttgagccaattctgggtataaatacctatgtctcgttcttgaaagtaatgggttttttcccgatgaagcgaagtttagctttcttcaagttttgcctctgttttgttttctctgaaaaccgggttcgccgttcc

SEQ ID NO: 201233 - DNA, 348 bp, Zea Mays
gcagctactgttgatgaacttgttaaacatatgtcaaatgttccttcatatttacagcgtaaagaaacttctgaccatcttcaagacaaggcactgaatgttggagttcttgagtgggggcttcttgctaactggtctcagcaagaaaagcataagctcactagaagctatggaccatctccacccaatactagcaggtctgtactattcccatctccatcacattcttctccaagccccagcagcagatctcttgagagtaatcaatctaccccaatgagtggccatcatcattcatccatcagagcacagcagaataggctcacagataaacaccatgagagggcc

SEQ ID NO: 201234 - DNA, 360 bp, Zea Mays
ccgggagaaaatcgagagagacagagagagagagagaagaggatccaggcccgtggctttcagttttggtgtcgccatctcatcaggaatcttccccgtccataatacgccgtccgtccgtcttaactccagcagccgatctgatcagctcctgacagcgacggatgcgtgctggtttcttcccaaaccagctgacagtttggcatgccgggccgtgcgaaccagaaactgtcgttggtgtggtggtgcttggctttatttctgtgggcgagccatggatgatgcagggactgagggacccctggcctgaatcgcaggagccaggagcggtttggctacgagcggttagctagcttgcta

SEQ ID NO: 201235 - DNA, 503 bp, Zea Mays
atcctttttattctcattcttctttcgatgcttcatcaacatccttgactaatcccctttctttttgttcttcccagatgttcgtgcttctactatacctgcctcacgattagaacagtccttgatggagtccttatcttcttcaattgtgccttcttcagtggtacctcccttcccttggtgtcttctttagagtctccttccttggtttctgactagactaggaagcctccggtgacacatgtctactctcaacgggtcgtaaattcttctggtatgccgtcttcctctgctgagctaccctcttttgttgtgccatcttctactattgagtcatctttctctaatgattcaccttcatttgatgagaatatgctgagccaacttcttctggtagttcttcactgcgacagtttctcgcttttatcaatcacttgaccggtaccatcctttgggttttgctgctacctttctttatgagccgagctcttattgtgatgtta

SEQ ID NO: 201236 - DNA, 421 bp, Zea Mays
gctcgcctcgtcggcccatgcagcgatgcactggaccccggcgtgatgctctgcctggagatcttcaagtgctttctttgtcacctccaccgtctacgggcccagtgccgccagcgctgtctggaactaccagatccgatcctccagctccttctccttctgctccgcctcgagctcgtgctcggccagcatctcgcctcgtcgagtcagcatctcttcccggaaagcgagatccttctccctcctggcgtggtctatctcccgcctatccaaggattgctccttcgctttaagtctctcctcggcgagcgtggcgacgctggccttgtcgtcgagctcttgctgcaacttttgcagcctctccacagtcgcggtctgctgggtccgctgctcttccaagattgcgttcatggcactcagc

SEQ ID NO: 201237 - DNA, 345 bp, Zea Mays
gccagatgcagaggtcacgttttcacatgaattgcttcgttgagaagtaattcccattccatagcatcaatctctgcagcctgatggaggaaacagaagagtcatgttacggatcagtaagtgcttgcttttcaccggaatcgaatcgatcgtgatatctttcgtcagtgtacttcattacctcactacgtcaaaattattaggtctgatcagagagaaagattggagaactgcaaggcagagatatagcgatggaaaggaaaagaataaaaggccacacgagatctaaacagcagtaggctaaagcgaaacaagaacctgttcctcttttatgcatgcagagac

SEQ ID NO: 201238 - DNA, 289 bp, Zea Mays
gcggaatgagcacagatgacgcaagaacaagaggaccccgagtcacaattacattcgcaatattttgactggcgactgagaccctgaacacccaaggacgcaagcacacgacgcggaggcgatccggatgcaccgagaggaggtagtttgcggcgttgctgacggagtggatgttgtagtgggggagaagggaagatggagttaaccagagatgagccgacatttggtggcaaaccgaacctggggtagcggtggaatgatagttggcgaggagccatccctgcatgcg

SEQ ID NO: 201239 - DNA, 285 bp, Zea Mays
gatatacagtgagaaaaatgatgcaacggcggactggaaaacgaactccacggtgcagcacggcagcagaaacgctaccaatagcgttgtactggattactacgctatccttcgcatgcagccgacgtgggcacatgggcagggtgtagtacaaggtgggccccaccggtggcacatgccacaccgcgggagacagctgacgtggacaagagagaggtaaaataaataatagaatatgtggtagttggtatagggtagagatttagggtaaatatgagtgcggag

SEQ ID NO: 201240 - DNA, 363 bp, Zea Mays
ctacaaaagtctcggtcaagaagctctagtacatgcctattactctgtggcttaaatggttgtttctaaatcaggagacagtgaagcaaatgagatggcataaggaaggggattgtcaggaccaagattcggatatcatggtgcatccattagatggcgaggcatggtaggcactggaccgttttgatctagaatttgcaacggaccctagaagtgttcgtcttagtttgtcgatggacggattcactcctttcagcaaaagttccactctgtactcgtgttggccggttttcatgatgccctacaatctccctcctaccaaatgcatgaaagaagatatcacatttcttgctctggttattc

SEQ ID NO: 201241 - DNA, 493 bp, Zea Mays
ccgtagaaccgcggcttcagcttgccagccgacgagtcgggcatggatgcagttgggcgctggtgtagacgcagcagcacccactcgcccacctgtacgtcgaggtcacggtgtagacgatcatagtgacgcttctggatagcctgggcctggtccagccggtggtggatatctgccaggaactccgcgcgctcctccaaagtcctggccaccgcaggcacccgtgttgccccctgctcgtaggagcgcagtgagggagggtcgcggccatagacgacgcagaacggcgtgtcgcgcagggacgactgaaaagtggtgttgaagatatattccgcccatgggagccagcgcagccagtcgcggggtcggtctcccatcaagcaccggagatacatgatgatgaccttgttcgtcgactcggactggccatctgattggggatgaaatgtcgtggtcatttgtagcttggtgcctctcaagcgcatcagctcgc

SEQ ID NO: 201242 - DNA, 298 bp, Zea Mays
tggaatctctgctttcctctttgcttcttcagcttcatggataagttggggtgggatggcagttcatgtgctctggcagtcggaaggctcactcgcccacgcctagtgttcgtccaaattacacagcggatgagttgtgacatctcgcgcttatgagtacgttctgataagcggtctcattttgccaatcccttgttcatctaattgtgtgtttagtcatggtaaaggtgattgatttcttagcttgttcgggatgtttccttgaacaaatatatgtcagtcaaattttccacttttg

SEQ ID NO: 201243 - DNA, 274 bp, Zea Mays
cgccgtgctctagcgttgagtggagaagaaccattgtagacgttgatctcgtagcaaatagccatgatcaaactccttaaaaacgattcggtcgtctgatcctaaccgtagtacatcagatggacgtccaggattacaagaaacataccctttcgccttattaaatctgggtcgtcgatcgggaatctgatggccaggttcacgtaccgcttcacgatctgttttgagcccttggatcttgatcggatggatctgagcgcagaataccccttcg

SEQ ID NO: 201244 - DNA, 399 bp, Zea Mays
atatccatagatcgtgttcaccttcggatgtcctgtccttacacctcgcctcaaaacggtaaagctgaagcatcattcgtaccatcaatgacaccgtgcactcgcttctgttttaggcaagtgttcctcctttatactgggcagaggctctcaacaccaccactcgtctccttaacaatctaccaaccaaaactcgaaatttttccactcctcatttccccctttttggttctccacccacctacgactatttacgagattttggttgcctatgttatcccaacatatcggccacagctccccacaaactctcccctcgctccactttgtgtgtcttccttggctattctgatcatcacaaagggtaccgttgactcgatctttattccaataagatca

SEQ ID NO: 201245 - DNA, 273 bp, Zea Mays
gtcgctggacccacaagacgcagccagcgtgtgattaggccaaatgtgaggattagcggtgccgagtggattaagtagaagtggttaaacaccttcttgtaagagggaaaaggaagggtctataagtacccgtgtaaccgagtaagcaactctggaacctggaaaacacaatagcctgaaccagaaataacacgaaacgcacagcgttggtgcgcatacctgcaagtgcctaacactccccggccgcatctttgctagggatgtcgtccgctt

SEQ ID NO: 201246 - DNA, 317 bp, Zea Mays
ggcagcaaaaacagcagctgggtcaggtgacgaagacgaagaagatgtgtcgtgcggaagccgaagggtgtagagggggccggtgctgtcacatcggaggagggggcgccgagttgccgagtccttcacagtaagaccagaagagtgaaactcgacagaacaagaattatcagcagtaaaacgacgaatagagagaagattgtggaccaaagaaggagcgacaagaacatcgggaatgcgaaaagagccgggagggccggtggcacccacagatgtgacaagaagacacgagccattcgccaccatgatggacgaag

SEQ ID NO: 201247 - DNA, 522 bp, Zea Mays
ctgggaagtttggttacctgaagatccgacgtcgttgtccctagtggctgattgggaaacgaagaacttcagttcgagctttgtcacatatcactcaattgttaagaacctcactccaactctccaagccattgtagaacatagaggcgtattgccacttgcgatgattcgtcgttcacacacaaaatattatcatgtgctacaccaattctggaagctactagaggaaaatgtgaggaatataaagaaactcttgttgagcagatgtagtctagtggtctccgtgtgcttgctgcagtgtaaccaaactccaagtagatgtgctctgggctctggcatgtggtatgtgatgaagtcgaggatggtttcttgccgtttgatgaccagtgtagtcgttggttaacttgtcagtcgtaaactgatgttgtcagttaggagcggataaagtttgtgtgtgttgtcagtgtatctgtgtgtaagtttattggacagaccgaaagatacaccacgaacccagatgaa

SEQ ID NO: 201248 - DNA, 331 bp, Zea Mays
gcacgcctctccaccaaatctgagcctctcccttcaacagttgtgtgcaaaagcgaacacaatccccaaacactatctcaaagacatccatcttatcctccacataagtcagccaatctgccgccccaaccgaagtaccactgccatcaaaagtatctagcttcatgcccatccacggcatcagagaaaggccactaactggaggaggcacctcgatcacaccaccaggagcagcacccgtagggacagtgcccctgggaacgactccaataccagcaccctgagcaccagcggttgaagcagggccaacaggagcaattggaatggcttg

SEQ ID NO: 201249 - DNA, 466 bp, Zea Mays
ctgcaagcctgtaaattcacctcaataggaagcaccgcctcttgtccataaaccaattcaaatggtgttactttagttgctccatgtcgagatacccgatgagcccataacgcctctggcaacacttcatgccacctcttcggctgttctgtaatcttcttctttatcaacctgatcaacaccttgttgctagattcggcctgcccattagcttgcgcataatacggcgacgaattcaataacttgatccgcaaagatttggcaaaatctttaaattggtgagacataaaagcagctccttgatctgttgttaatgtttgtggaatgccaaatctgtatacaatatgctctaatacaaaactaattaattccttatgcgtcatattttttaaaggcacagcttcagtccatttagtaaaataatcagtagccaccaacacgaaccgatgccttctagatgagcatg

SEQ ID NO: 201250 - DNA, 415 bp, Zea Mays
cagagacagggtgaagtatcctgagacggagggaagggtagagcgagacaggagagatcaagcgatgattgccgatcggacgatgtgtttttttgacaacgtggataggctcgtcgttgccgttttgcacctgctttaatatataggaaatgacgcgcacaaaagagaacaaaaatcagcaaggcaagaatgaaagaataaaaggcaagctgaggaggcagtatcagaccagtgaggcgtcgggggttgtcggatcggtgatacaagaatgcaagattcacttcttgagaaccgaaggttgtcggaacgatgaggtgtcgggaagtgatattagttgtccttctacaaaatttgtcatgcaagtggttagtactagtatatatgttgatgatgctgggcttttcttaaaaccgac

SEQ ID NO: 201251 - DNA, 307 bp, Zea Mays
gattgtgggaaaactgatttggatacgaaatcccaactgcacaagatttttgaaggtttcactgaacctaacttacattatttttgctttacagtttggtctacagggtgctaagtttccttctgcttgtcaaccaggcttacttcaacagcttctttctttaaagtggacagaacctaaccttgcagttattcatggtcattatttggatgctttgggccctttcttgaagcatcatccagatgcagttgccagtgttgttaataagctttttgaactgttgacgtctctcccaatcacatttcag

SEQ ID NO: 201252 - DNA, 359 bp, Zea Mays
ggaaaacgtatttgggggaaacacgaaattgggagactctggtggatgatccgaggcaagggctggtgcgttggatgcgtaaatacctagaggaactcactggggcagcaatttatagagtcttacggcggtggcgtctaatttcgagaagacgcgttggaggccggagagaggggaagtcactggcgcaagcactaccatggcatttaccggggcagtgtctcaggcgatgaacaagctacctaaggcggtctactacgacgtggtaaggctttgaggcatgtagcttggccggataacggtgaactccgatgatgctaacgcgattgaccgcggcgggacaccccacacgacggccg

SEQ ID NO: 201253 - DNA, 788 bp, Zea Mays
attggtttggcacagtgttgatgccggcatcttattgttttgcagaagtacatggctgacatactgtcagtgttagctttaacaatgtccgttgaaggagaaagagtatgtgcccaccacaatagttatcttcatattgccattattttttttttgtttaacaaaaaatcaaaccttcagctgttccgtgaatctggaattgagacatcatcttgtcgcaggagagtctgaaataccgtttgctgggttctgaaggtgatattggttcatggggtcatgaatatgtgaggtatggttgaactgaaataatatgtttcctgtctgctacactgtttttcctggttccttcaatcagtgaagtctaaatttttgtatcgtgctgtattgccaatgctactcatgctacgttatgcaaacacaataagaagttggtaagcatttattggactaatatatcacactatatcatgaaacaataagtgatcttatacaagtatatgctgtttacaaacttggtcacatcctgttcaaataacaacagagcatagggatgattgatgattcttttttgtacttggttttcactcaggattttttttttgcatagagtaacctcttcctgaaatgctgttgattcagctgtgtacttgttgggaagtttattttacctgtttgatatgctatttttttaaatatagatacactgtttgcattcaatttctttgcaaaactgttggattttacatgaataactgccctatgcagaaatttggccggtgagattgcac

SEQ ID NO: 201254 - DNA, 293 bp, Zea Mays
gagttaaggcagaacaccaaagacaagctggactattatacccattaaagatacccgagtggaagtgggaagagattggtatggattttattactggattgcctcgcacctcgaaaggatatgactctatatgggttattatggatagactaaccaaagtggttcatttcattccggtcaagactacttataagggatctcaattggaagagtatatatggctcggaatgtgtatccacatggagtaccaaagaagatcgttttggataagaggatcacagtttacctccaga

SEQ ID NO: 201255 - DNA, 373 bp, Zea Mays
gttgtggcagagaggtttggatagcagagacacccgaaaacacgaaggtgactgtattcgggggtcttgttatatagtatggtgtagggaacggcgttgttcacagaggaacaggaccggcggttgaggaggtaggtggcggtgacgagcacctcgggccagtaaggtggcggcatgtgggcatgtatgaggagagtgcggctgatgttattcagcgtgcgaaggatccgctctgccttgccgttttgctgggatgtgtaagggcaggaaaatcggaaaagaatgccacgagatgaaaatagagaggtgagggtgtggttagcaaattcagtgccattgtcagcctggaaggattttattgtgacgccaaatt

SEQ ID NO: 201256 - DNA, 290 bp, Zea Mays
agggttcagctttgtcactgaattttggtgttagtataggttgattatgtagtagtaactgatatggttagttgtgggggctgtatcattagattgcgtgggtggaaatgtgaatggtggggatgactacacattgcataggaactctgttagaaagtactattgggtgattcacctggaccaactgttttcgtatgcacaactgtatgatactagtgaacatagtttttgtcttttcctgatgaggctgtccttgtgagttttatctaataatatcatcctccaaaccc

SEQ ID NO: 201257 - DNA, 1067 bp, Zea Mays
aacatttctagatgctattccgtcagctggatttttccaaggtactcgagcaagttttatcttggtttttatatgaatatttttgcgtggatggtcaatttgtatatgctgaaagacaataccatagaatgaacagttcaatcattctatgtccattgttgtcaacgatacacgtaatgctaacatgctagtcatatagtttgtttgtacatgcactttatgtgcatgttcccataaaaatagctactaccaaatttaaactaaaaaagcctatttacccttggtgctaagagcaataactaaattgagatttgatcacaaatttgttataatagtttggtggaactatggaatttggatgtttctttgacattatttgtcaaatggttgcaattgtggtggaaagggtcgagggaaacctgatgtcatttttcattgttctttttatccaagccagatggatacactattataacgaccaccgttttgttgtatccactagctcaaaaccaatcttaggaagtgcctgggcaacaaataccggaaatttgtggagtttaaaaattacatattcatatttcacatgggttgggataattgaaggtgcaagtataaattataaataatttattgtttatgaaataaatatctagaacattatttgttgcatttgtaaaaaatacaaaaaaagtttaaatcaaacagttagtagcacaagggaacttgtttcttccaagtgctgaatttgtggaaatctaacttttgcagtgaccatgttcttcatcctaagatttgtctatctaacattttttatctgaattaactcgtgtaaatttatttaaaagcagagactataacggtggtcaacaacacattagtaaatggtacaacaaaaagtggcgcaacaactatatcaacaccaagtctgcatgacctccagatctacggtgtgatcgtgaccatattactctgttttattgtattcggaggcgtcaagatcatcaacaaggttgcacctgctttcttggtcccagtcctcttctcaatactatgcatttacattggcg

SEQ ID NO: 201258 - DNA, 327 bp, Zea Mays
cggtctttgcagcatatcacttgatccttgaaacatctttctttgaagatcaaagggtttttctaaatgataaaagtacccccaaagaaatttctgttactgctacagaaggggcatcaccaactgcttatgatgttgctgctcttagtggtgctatccctagctttccttcacatggtgaccctccagcacttagactattccatgccacttctaatagctatgctgatgtgaacaaacctttgacatatccagaaaatggggatgcattcagttcagtatccagcagctctgcaaatgaccttgaacaaggtacaagtatcaggc

SEQ ID NO: 201259 - DNA, 342 bp, Zea Mays
atggtcatctaccaccaacagaaagtagaatgcaccccctatggttcttggagtaatttttccacataagtcagcatggaccagttctaatcctgtttgggctctaaaactcgacacctgtgggaatggttttctatgttgtttacccagaacacaaccatcacacacctgctctaccttcttgatacctgggatgccttcaaccatgtttttactgcctaaatcattcagagccctgaaatttagatgtccatatcttgcatgccattgccaagacttttcttcagattttgcaaataaactgacaggtgaagacataccaaattttgcaatatacaacct

SEQ ID NO: 201260 - DNA, 349 bp, Zea Mays
gacaaccagaactgctttaacaccactgaccgggtggcgacctggtgcatgaactgggcgtgcaagttcggctgcctgattgacgccaagcagtaccataccaagtacaagaacagctggtgcgaaggcttcgggagaggcgtctgtcactgccagttctgcgactgattctcacgaacagtcatcttgaaataaatagatcatcatgtaataaaagccccgtggtcgtacaatataattttaaaaatgccgattgtagggatggaatcagatggaaaatgttgtagtgattaaaggcccctctgcctttggcaatagtataatgttctgcgctttgaaacaaacactg

SEQ ID NO: 201261 - DNA, 469 bp, Zea Mays
cgagagcacactgccactgcaagtaggaaagctagcgcatcacaatggcggccagaaccagcgtggttgtgctttgcttcgttgtcgcctccgcccttctcgtggcctcgtcatttgctgcccgtactccaacctttggtacgttacctatgtgtatatacacacagctctcatctagcacatgcaaatctaaagacgacgctctgaaaatattatccagttctcgccatcaattacaccatcaccatgcatgcatgctgcgtgcttccatattttgtgtcgtagaatcgagaagggagacgagggagacggttgcaggacgaaccgtgaggaatatgccagtgatcatccaccacccggagataccaagcaactcacgagccgcggtgccggtgaaagtgaccgtcggcgtcgacccagtgaccgcccacctgcatccgcagcatcctcagccttacgttccgtcgcc

SEQ ID NO: 201262 - DNA, 977 bp, Zea Mays
tgcgtagcagtatatccttatgtttgcatgaggtaaataaaagcaattgcattatggtctccagatactgcctagagctagaagtaaggagaactgtagaaagatcatgtgttgccatggcatgcaagaatatgtataatgtcctctgcaactcttgtagttctcgcatttcctgtagtggtgagacaaaaatatattacaaaaataaatatatcctgtaaggctgtacctgtacctggacaaccctatccacctaacttaatggaattgatgctaaacaaataactaaatagataagaactcatatagggcaacagcctatctgttatgggcagtcgatggggctagctgggctgggcctattgaactgcgtagatccattaggatagagttagttacagataagattcggatagagtttagagataagatagattcggttaggatatttgcctaggggtcaagttgtctttatataagggacaccattgtatcagttgagattaagcagaaaatagatcaaataagtgcagctcagaacctccaacggagggcgagtcacaaatctatctgctatcccatcaaacaatcaataaactacatcactatcacactagccataccacataagtggagtatggtatcatgtcacttttgttactttagtgagtattgttgagatcgtgcaagaaatatttgctagttgaactgtatggcttttgccacatgttatagctagagttgcactatcataagtaggaaatcataaaccaatatcaaataatgtagtatatcccgaaggttagcacatttcaaaggcattggcattcttgcaatatagagacaagcagaaacataaaaatgtatgctaagtataaacagctataaaataaatatacacagtggcttgtttacataggaaaacaacattacctcagtattgcttgcaagaccagctgaaaatgcatcttgtgata

SEQ ID NO: 201263 - DNA, 331 bp, Zea Mays
gatggtgtgcgtaaaatctggtatgtaattcgtctttttttaacaaagtacaaaagagcatagtgcaatttgtcattctaaatgttgtgatactcagaagctgacaaactgtgaaaaatactacttaaatttcgttttttagtttcattctactgaaattaatgccaaatttaccttttgtaggtttaaagaagtccttgctaaatgtcttccatgatggttcttgtcatcctggtatggcattagtaattgatgatcgtctgaaagtttgggatgagaaggatcaattacgagtccatgtggttcctgcatttactccatattatgctcc

SEQ ID NO: 201264 - DNA, 404 bp, Zea Mays
gtcagagatgaggaagtctggatgtgcagctgatgttgtgacgtacaatgcattgatcaattgcttttccaaatttgggtggatcgagaaggcctacagctactttggggagatgaagagactgggagtgatggcaaatgtggttacgttgagcacttttgtcgatgcattttgcaaagaagggttggtccgggaggcaatgaagctgtttgcacagatgagggtgaggggaatgatgccaaatgagttcacttatacttcattggtcgatggcacttgtaaggcagggaggctagatgatgccattgtattgcttgatgaaatggtgcaccaggggttggtgccaaatgtggtgacgtacactgttatggtcgatggcctttgcaaagagggtaaggttgctg

SEQ ID NO: 201265 - DNA, 397 bp, Zea Mays
gaggtttaccccgacgaccatctctatgacatcatcggtcctcctttgtgccttttggatgaagggctagaagacctactggaaggttacgacgaggtggccagtcgtgttgtccttatggtgtcgcctcatgacatcgtgtgtgacgcgtgttgatcatgatgtattgtgcctcgttgctgcttcccagaagtagtgaagtgaacttcgttccctggcttttcgtgtcgtacgacccttgagtctctcctcctcccccctttttctatgtgggcctttccgagtaccttccctcttttaaaggcaagagagggggagcgtgagcgaccttgtccatgggtctccttattagtcggggcctccttttcgcccatggatcgaagcagacctctaaggg

SEQ ID NO: 201266 - DNA, 400 bp, Zea Mays
attccgtgtctaagttttttgagtctgatgattctgggagttcggttgtgtggtcggaagagtcttcggatgaggacttggattattatgcggccttggatgtggctgcagcggaggcttctctgcgtgtgatgggtgctgaagttctacctggtccgagtgctgggcataggcggcgaagggaggtggcgaaacggagggtgagtgaggtggagggtggtcgtcttcgtgtggacggggctagcaaacgggaattgttgtcctcgccggctggggcgagtgtaggtgaggggggagttgttaatctttttgagggtgaagagctgaggataatgttgttcaactacagggagatgggtatcatcccaaaggttgagccaatgtaaagtgtgatgccctc

SEQ ID NO: 201267 - DNA, 505 bp, Zea Mays
aagaacgtgaagccgagaagatgaagaatgggtgttctattatggccgatgcttggtccgataagaagaggagaagcataatgaatgtgtgcactaagtgtgctgatggaactagttttatttcctcaaaagagatgtagatgtgtcacacacaagtgaagtggtctttgaactagtggacaaagcaatcgaagacattggtccagatgatgtggtgcaagttgtgactgccaatgcttctaacaacatgggagcaaagaagctactgcatgtgaagagaccacatatcttttggacctcttgtgcaactcacacaattaacttgatgctccaaggaattggcaacatgcctcggttcaagaaggtgattgaccaagcaaaggcattcaccatatttgtctatgggcacacaagaacactagagtgcatgagatacttcactgaggggaaagagatagtaaggccaggagtgactaggtttgcttcaaactatctaactttggac

SEQ ID NO: 201268 - DNA, 1163 bp, Zea Mays
aaacgagtgatcgtgatgctgacatggaacaaagacgggcaagtgtctatgctttgatatatgaatgagatgtttggaacttcctgttggcccatgttataaccatgtcgaattttttgcaggcatttcagaagttaatttatgtgtccaatcttgtctttggagatgcatctgtattcctacttccttggaaacgtctgtttggggtgactgattctcaggtaattaattataaaaatgcttgttaattttttgcatgccttctctcagttttatgctttgatctcacagagttatttgttctgtattttgaagttcagttcgttttttctggcaacgttgctctttgcatagttgttatgctgcttttgatgcagttgatatttcgaagagtttggacaaatgttcatcaagtgttaatgccactactcacagtccaaataagaatgtctttctttacttaccatggtattaagtatcatttgacattatgtttctagattgacattgctatgagggaaaatgccaagaatttatactcggtgcagctcaagtctattggaagaggtaatgctagaacacagttttgtttaggtgttagttcaattataaagtcatagtgtcatattattcataagttttgctttatcaagtaaatcatatagtgtgctgtaaagacagcaatatcaattttgttgttgttatatttattgtttgatatatctcttattgcatctcaagaacattctgaaatcacaaaatgctctcggtttaggtcttgacataggcacactcattgaagtaaggagagcacaacttgcatataaactttctgatgaggtaactcttttctcaactctgttgctgcttatttgttttttcttcatttgggatgaaatctacatcagtacttatagaacaatgtcattttatatccatgctatgatgcatatacactagctgagagtttagacaaaaataaaaggtcaattatcattggtgcttggaaaagataatagagtcaatgtaagcatgtttttgtttttaagtgacattctaaatttcttgcagattgctgctgagatgttccgtgagcacgcgaagcagctagttcaagaaaacatttcatcagcattagacatcttgaagtcacgtattccgta

SEQ ID NO: 201269 - DNA, 351 bp, Zea Mays
cgacgaagacgacaaacatgccctgagggggtattaacccccagaggaggatgcatataaacttcttcatgtagatcaccattgagaaaagcattcttgacatccatctgggagatactccaagaagatgaggctgcaactgcaatcaaggttcgtacagtggtcatatgggcaactggtgcaaaagtctcatcatagtcaagtccttgagtttgttggaaaccacgagccacaagacgagctttatacctctcaatagaaccatatgattttgtcttaactttgaagacccatttacaagtgataggaacaacatgcgagggtaaaggaactatatcccatgtgccagtg

SEQ ID NO: 201270 - DNA, 283 bp, Zea Mays
tatctagccgacaggaattaactgatccccgtcggttgacttaacttaattctcgtcggacgaggggatagcccacatagattaaataaatctcgtcagccccttgtttggccgatgttgataactcaactcccgtcggcccgtgcctctagccaaccggaattatcaacttaaggtcatgccctagccacacagacgcgcttaagcccacacacaaccgcccacacatgtctctctctctgcgcaacgccacctcgccgtcgcgccaccgagccacctcgcc

SEQ ID NO: 201271 - DNA, 293 bp, Zea Mays
ccaaatagctatcagtctggtgaaccttattcatcatctttatttatcgagttggctgatgttgctgttagctatgaacctcattttaaacattccactctcagtgctggagcagccgaccgcaagtttttctcatgccttttagctgcatcatcatttaaactccataataaatctgcatcagcctctgcagctactgattttgatatccaattacgtgatcttggagtcctcatttctcaatcatctggttcaacaaatggtacttgcagttatggtgtagattaccttcg

SEQ ID NO: 201272 - DNA, 399 bp, Zea Mays
tgtcctggtagttgaaccccacggctgtgaattgtgtgcttcaattttctgctcttgtagttggttcaagccttgaaggcttcattaattggccatttcatgtaaaaatgaatgttgctttcagacttctgagagatcttagttcagttagattgctacatgagaaatattatcgttgctacattgctttcaaaaggagctagaattttatttctttgtaattttctttgcttagtacaaaacactatgtacctttgacatgaaaatgtctactcgtctccagttagattcctagtattatcacggtaataatcgttttgtgctgttattatacttgttgttattctgtgctttcactgttgctttcggtatgttgtcccatagtatgaatatatgacc

SEQ ID NO: 201273 - DNA, 313 bp, Zea Mays
cttgaagccagcaaatgttttgctagacgcagccatggaacctaggatcacagattttggtttatcaaggcttattggtgaagggaatactagaatagtcaacacacacactcctggaccaatgtaagaacatcactgcgctgccactacttccacttgtacatagcaactgttcttcaatataatcattttcagttcaactgctttaatattttttcatgagtactgcaagctgataatatctactgtgcctttgttactttattaagagggtacatggcacctgaataccgttacatgggggaagtttcac

SEQ ID NO: 201274 - DNA, 337 bp, Zea Mays
gtctacacccgtttggtcgtaaattcttctggtatgtcatcttcctatgatgtaccttcttctgatgattcacctttgattgatgttctctattctcctaaggagtcagcgccctctgccaactcttcaccagtgctacctcttagacagttacttttttcgtcagccacccaattagtactctccttcaggttttgtcgctatcgctctttctaactcgacttcttatcgtgaattcgtgatgctattcttcgtccccaatgacaacttgtgatgtttaaggagactgctgctcttgagtgtactagcacttgggagcttgttcctcatcctcctc

SEQ ID NO: 201275 - DNA, 427 bp, Zea Mays
cccaaatctcacctcaccacgcagaggcgcgctcgcatcacacggcggcgccaatggcaagtcccggcattgcaaattcacgacccaaactttggaatcgagtggtgctacaaggtgcagaggcaacaacatttgtgttagaggggcttaccacccgaggtagcgaagacatgaaggatcgatggtgtggcgctgctcctcccagttgagcgcaccatggcgaccaacccggccctgcccactgccacggatcacacagcaaccacgcccaggtgcagagcacccacgcgacgaacgctcccaggtggccaccaacggcgtgcaggatggaggaccgtggcggcggtcgtggtcggggttaccggcgcatgagtcccggccacatcgacgagaagtcctatcacgcccaaagccgtacacaccggga

SEQ ID NO: 201276 - DNA, 427 bp, Zea Mays
tgatacaagtagcaacaatatttatgatactaatttgagtctaaaatcataaaccctatgatagatgtggttcgactacttgtatatatgatgtccaatgcattgcatatatgccatagtgtcgttgatatacctgtgaatatcagccatcgtgctgctacttttatttgcaggttttggaaacctccccgtgcaggggaggtgctgccgatttttttgtcgatatatgttagaggatggaggaccgtgagtggatgtacataggccactctggtgacagaactaaccgatagcggtagataggcacaagtagtggtaggtttgccgatggcatgcgtggtcctaaggatggcggtcgttgatgtgaattcatatgaacaaagtttgtctccattttttgtattaatagacttgtgtttcttttttt

SEQ ID NO: 201277 - DNA, 910 bp, Zea Mays
cctgtgcccatatgctgaacttgattctgattatcatcttgtgtggttatcataccaggagacgggcactctccggaaggaaaccgagaaggtatgtttggatttctctcctcgttccttgaagcaaaactcaacattttcaagtccgatgtgaatgaccctgggacaccagggcttccaatgttatctgcagacgatttggttgagttattggttacatgagcaaatctctgaccagaattccaatcaatctgtgcagcatcagaaccaatatcaggttttgtcgtctttccagataaactgcctggatcaacatccatatgcctcgaggtttgcatttgatgtagaagagagtaattttgctgctgaatgtttgtaggtgctggacttccatgtaaaacaatgccaccactgtgattagcattattgtgggaaacattcatagcctgaaaattagctcctgggttctccccatgtttagcaccaaggatgccttgctgacgcaactgtgcaaaggatgaaacagcattgatagaattctcatctgaagaaggcttctgcaaggattcgtttcctcctgttacggtagttcctgtcaactctaggtttcccttctgggaagatgctaactttgcatcactatcagcagcttgttttggagattgattctgtgagttcgctgaacttgttgcaatatctgatggagttgatgccctctgcccttgatcatctgccttctgagagctccataagttggaagctgcagcattatttggaaacatcatagactgaatgatgttgggtgtaatcttgttaggttgcataccagttaggcgctgtgctgatatgtttgtccatacattcttgaacactgttgcagagttgctttgctgaggctgctgctgcagca

SEQ ID NO: 201278 - DNA, 280 bp, Zea Mays
gcgggctaggagcggtgtgtcatgccattgtgctccctggcgatctgacacagctcgtgggagatgatgcccgagacttatttgatgacgatgttgttcattgatcccaacatgatttggtgtacgaccaagtgtctgacatgatgtgaccgaagaggacgtaccgattgagagcaagcaaaacctgatcatgctagcaggtgcaattgtcggacgaggatgaccatcaccaacgattggatgtcaggaacgactgtctagacatggaggatggcggcag

SEQ ID NO: 201279 - DNA, 420 bp, Zea Mays
catcgtatcacctcaccggccatgcacatacttggttctggcggctggaacacgacgagcgtgaggtcacgtggccacaattcaagatcatgcgccaacagcgctttggttcccttgcagcagtggcgacttttgctgccacgtttgtcgtgccctcatcgccgacaccgcccccgtcatcaggggcagccatggccgctaccgtcatcaggggcagccattaccgctacccttgaacccaagagcgatgtccaggagagggtgcttgcttcgtgacagacggcggctaccgtccacttgcaggctgcagcacgcagtttcctagcgcgtcggcgggtgaagcagatgatgggggtgctccattgcgggggagtcgtagctgcaccagcgcgcccgagcaacgtggtggttgttcacctc

SEQ ID NO: 201280 - DNA, 305 bp, Zea Mays
ccggcaaagaggtcgccggcggtgagatcttttggcgctggcggtctgatctttaaccgagcactgtaccatggctaaaacctgattcagtcttttgttacctgcctgacagagcaagttcaggttacattttctctaaattttccttagcaactcatccaaggctctgcagcaaaattgtagaccaatgttccagctacaatgttgccataacaactatagccaaattccaattaaatcatgcttgaatttgtgcccaaagttcctgtagtgcactgttagtctgaaaattcagaccttaacag

SEQ ID NO: 201281 - DNA, 500 bp, Zea Mays
aaggaagtgtgccttcacaaggatagccctttgggagaaacaatccttgaatgctacaactgtggctgtcggaatgtatttcttcttgggtttatctcagcaaaattggagaatgttgtcgttcttttatgcagagagccgtgtttaagtgttaatgcactgaaggatatgaattgggatctcagccagtggtgccctcttattgatgacaggtgtttcttgtcatggcttgtaaaggcaagggtctcatgatgatttcttaggttgttctgtcatgcatttgtgcatagctaggaactttctgatggttggacaatttactttcttcaggtaccttcagagcaggagcagctaagagctcggcaaattagtgcacagcaaattaacaaagtggaagagctttggaagacaaatcctgatgcatctcttgaagatcttgaaaagcctggcgtagatgatgaacctcagccagttgttttgaagtatgaagatgcttacca

SEQ ID NO: 201282 - DNA, 629 bp, Zea Mays
attttggtacccctacattaaggaacttgaccgacatcgaggaagggggcagctagctgttgaatcaccacttttatggactgaaagtgaactggattaccttactggaagccccttgaaggttagtggttttactatgttgcatctcaattctcaatataacattattgctttttgatattgaaggattacacgatattctgtaagaacattaatatcctaacatagctgatatatttgcaggatgaagttgttgctagagatgaggcaataaggagagagtataatgagcttgacacattgtggtttatggcaggttcactatttcaggtattccttgatctttcaagcatattttctttctaggattggctatatcatcaactgatcctctttctcacagcgatttttgttttcagcaatatccttttgacatacctactgaggcttttccgtttgaaatattcaagcaggcttttgttgcagtacagtcttgtgtggttcatttgcaggtaacgtgctgtgatggaattatgtttaaacaagtatggttctgaaatcttttttccctaaaaaacgcaggagatttgtgcatccttaggctatctccagcagatctcctatcagtc

SEQ ID NO: 201283 - DNA, 654 bp, Zea Mays
gtttgggatcaggtacatgcccgtcatccttctggtctacctttctgctcaagtttgttgagtgtaatattttcttggagaaattttcttcagaagagtttaactgaagatcactgttgacattgatctgactgaaaccatggaaacaattcctgttagtgttctctatattgtctcctggaatagtgggtgcaatgcttttatgtacactgggagtacgaagggtactatccctggtgtcaagttcccttctgtgatcatctttagcttcatccctactggccttatctgcaggaacctcatcattctcattgtggtaaatgtgagagcgggtaggtttaagagtatcattatcaacagacattgcagcacactttgtgtcaggggcagttcctgagtcagttctaatgtcagatgattttgtgctcgcatcgtgtgctttcataaactgctctggagtgctcaagtgttttccagtagcacccactacattgctagcagagacagtaggacctccactgggtgcatgtagagcagagtcaacatgagattttgtgctgatctctctaataggggtccttctgtcaatacgtctgctacttaatgagcatgtaccagcatattctgtttcatcttcagagtccttagcttgag

SEQ ID NO: 201284 - DNA, 275 bp, Zea Mays
ggagggtgtcgacacacatgatgcatcaaccaagactaattttaatctcaaagcagtcattctttggattgtccatgactttccagcatatgcaaatctatcaggctatagcaccaagggaagacttgcatgcccagtttgccataaagaaacttgttctttatggttaacaaagggccagaaattctgctacatgggtcatcgacgctttctacctaaagatcatagatggagaaacgataaagcttcttttgatggaacaagagaggtctgag

SEQ ID NO: 201285 - DNA, 514 bp, Zea Mays
atcatggtaccaaagtctgtccaggacacatgcgaaagctggtattctactgactgcaaccatctagctgcaggacccgtaaaatgcatggtagaaaccctgatccacacactaggatcaacagagtacatgtggaaataatcctcgcatcgtttctgccacagcttaggtttatccccatgaaacccgggaaactacaccttgggcaattgacctaatgaccgagcagactgccaaccttgatgcctatccccaaaattgtcgtgcggcattggagctatgtaatcatggaacacaggaggagcattgcgcataccattgttcgagagtgagctctgggcgtttgcacccccagggccttcctccccatgatagaacgtgtcgcggtgccccctagggccatcgacgttcgacgcggacgtagctggacgcgccctcatcgatccatatggtcctagtatgccaggttggaactctggaggccattgatgttggtcctgatgacgaggaaggc

SEQ ID NO: 201286 - DNA, 459 bp, Zea Mays
ggctcagtaagaatctcggcgtccgatccacttgcgctcgtgttgtggctacgcttgccgtttctcccccccggccgtcggtcgaccagataagtctcaccgctgtcgtgctgtcgccgttacgtgccacgtgtttgtgcgctggtcctcgtcgttgtgactcactgggtgcatgtccggtgatcaccggaggaagcgccacggtgaaagccacccatcccttgctcctgtgtccatgttccctccggccgccaccgcgcttaacccaaattcccggccaccgctatcgctccctataaattgagcccgcgaatagcttcgcaacatcatcactcactcagccaccgctaaacgctagcagtccctcgctagagcttgcgaattttggattcgccccaaatctctttccgccgccgtgaaccacaccctgtcgtggccagccttccccaggtccgctca

SEQ ID NO: 201287 - DNA, 724 bp, Zea Mays
cttcagttccaacattgccacgaagcaggaggttcaaaactccggtatccggcaaggggcgtatggtgcggcgatagactctgtctacacgagggatgccttccatggcaaaacatttcttgactacatctcagcactaggaaagaagccactagccggtgctgatcttcttgacctagccaccgccaaagcacagttgagggcattcaatcgttcaaggggttcaagggaccttcctgagtttgtgatgtttgagggcattgcggagattacagagatgacacacacaaagggagaaaggatgcacaagagtgaggatgatgttctgagcaaggagaagaaatcgaggcgcgctgggagttcacgtagaaaaggagaggctttaccagaggctgcaaatgatgatgctatagatgaagacagcaatggaggggcaggaaatgatacgttgagtcagggggaaaagtcaaagcgtgtgaagagttcatcgaagaagaaaacagacatttacaaacatttatatggactcaaaactgattctgttgctgacagcagaacactggacaagaagggagtagatgatgttttgagcgagagaaaatctgggcgcacactgcgatccacgagcaagaaggaagatgcattagagggtttgaaaaggctggcaaagcatggaattgaggaattagcaggaaaaagcaaagatgcccccgttcttaaagaa

SEQ ID NO: 201288 - DNA, 607 bp, Zea Mays
ccgagaagaaggtggcgccggcgccagcggccgccgccggcgaggtcaaggaggtggtggtcgtggaagtgcacaaggctgcggcggcagacgcgaagaacgtggcgcgaggaccagatgaggagttggacgacgacgacgacgaccacgacgacggcgcggagggtgaattgttggacgaggagcaggagacagacgaggaggaagaaaaagagatgctggatctgcaggatcacatggccattgacgacgacgagcaaactgctccgcaccaaggcaaggatccgtagtccccagtccccaccaccactgtcgtagtagcgtcttcgcaagattcacttgtcggttgaactaataatgacactgtgctcttcaattgctgccgtattgcagtggacgacgacgacgagcaagatcttgagccaccgacaaaaggtgcacgaacacctctgccaatttcgtccctattttccccctctgtattctcttccatttcttcactgttgtgttcttgcctccggactgcatcaccgtgaatgtagcagggattaagcccacgctgtcggtggaagaagagagagcgaccaacccagagccggtgaagccg

SEQ ID NO: 201289 - DNA, 351 bp, Zea Mays
taattcctaagtactttcatgtaagggatagtcagatttagcacacaataatctatcccacaggtgtgtgttaacaatctctcttccggtgttaacaatcaatttcagaagggtctattctcttattcctggctacacctgcatttgcgggatttggacggagcatttcttatctctttacgcttcagtcaaacaacagtggagcttcgatcgtggtcgtgtgtgttttcaatgcaaaaggcgtctgcggatatttagaaacctgggtgtgtggtgtgcgatgtgcgattgtaagagctcttaccccttcttaattcaatgatacacagctctcttgcgtgttcaacaaag

SEQ ID NO: 201290 - DNA, 309 bp, Zea Mays
cgggaagctccgcagtgtcgcatagaagacgtacgtgcctccacctgacagaatcaacaatggggtcgggtggatttccttgctgttgtaagtgctccgtcgctggatcacgccactccgtgggcagccccctattcgcctctaccgttggtaagtatcctacctaccatgtttgtgatgtcctccatgttgcgttgcgagtctcggattgatgtattacgcgccttggtgttggattgcgtggctccggcgatggctccgccgtgggctgtgccagcgccaccatccctggctggacatgggaggaga

SEQ ID NO: 201291 - DNA, 308 bp, Zea Mays
agtttttctctctcctatgcagtctttaggtcaggatggtgtgcatgaagaatgtgtagcgccagggggaggagacgaaagggaccctcctcgccccttcaggcaggtcaaagggaagaccgtatacttggagcagcaggaaggccgcaagaagcaacatttggatagagcagctcgaacagctcttgcagcgacaacaacagttgagcaggcagagagaggtgatcaactacagatttcatccgatcagattgcatacggagttcgttgactcgcctctcggtctcgctcctccgctccctctacac

SEQ ID NO: 201292 - DNA, 330 bp, Zea Mays
tggggtggcttaggcaagctggccgcgccagcttcttcaggagcttcacaaccccctcaccacaagtaccttgttctgctgcgacaacatcaaccttgtctacctctctgtcaatcccgtccaacatcattgcacgaagcatgtcgagatcaacatccactttgctcgtgagcgtgttgctatcgaggacgtcctcatccgtcatgtcccgatgagttcacagtttgtagacatcttcaccaagggtcttctctcgttctcgcaattctgctctagtctcaacatctgtcgcgactagagtttcgactggtggtgtgtgttagattattg

SEQ ID NO: 201293 - DNA, 584 bp, Zea Mays
atttgaattactcttgtcatcagcgcatctgatcatattgaagtcccctgcgatcacccaggggccaggacaactggttctgaccagagaaagctcctctaaaaaagccaatttctcctcatctctatggggtccgtagacacccgagaaccaccaagcggtgctgttttctttcataaaacagactgacactgaatggtcatgaattttggagtctatagcagaaatgagccctctacgccaggctatcaaaatacctcctctagtaccactagaaggtaagaaaacaaaatccccaaactctgagccaagacaggaagcaacatcccagtgagagatagaattcagcttggtttcttgaatacatacaatagtaggcatcacacagtttattaatgatctgagagtatccctgcgatgagggtcattcaaacccctcacattccaaaccagtatagcaaaattattcattgtgagatagaatacgaccatgtggggtaatccacattacgaggcttgcagcagcccatcagctggacaaacgaggaactcctcatcagggatctcccatcggaacaaggtag

SEQ ID NO: 201294 - DNA, 407 bp, Zea Mays
ccgccattattggtgagcacactccccaattgcctcatgctgttgtcctccccgtgaatcattgttcgaatcgaagagtagccattagaatcgtagagcgcgcggggtccggcaatggtgccgtcgcgttccgcgggcggtgatgaacagtgggtagaacacgtatggccctcgacttcgcgatgtgcggctcttattaggtctgggtatgacgtttcactggtatggatttcccaccgtggatctgtgatcgtatggtggacgggcgggtcgtgtttcattaaatcacggccaatgatctcggatctaacggatttagctgcttaccgattcggcgaaatgcggatctaaagagtgccgctgatatctaatcaaacggccgagattggcgcgtacctcttcgcgat

SEQ ID NO: 201295 - DNA, 291 bp, Zea Mays
ctccgagctcactcgtcgccggcggctgttgcaggttctttctttttcctacccctacctcagttgcataagctagcacttcgtatcgtatgttgcttgatgcgctgatcggaaggttgtttcccgtggcgcttttcgttctcattggattggttattcgtcgtcgctggcgctggtttaatccggtggcgcgactaggttcatcagtccttagtttccaccaagttcggtcctttgctttaatccggcggcgcgacttgtttcatcagttagtttccaccgagttcgggc

SEQ ID NO: 201296 - DNA, 378 bp, Zea Mays
tgcttgatgtcgtccaaccttgcttcactacttgaagttgatcatggtgttgcagaacatacaaagaaaaacaagtggaactagacgtggtatggttagttttaagataaccctctaattgatcatattgtttcatgaaaaaaaggaggtttcatatttgaacaaatatgtatttgatgtaccatatattctcctttccaattatatcttccggtaacatgatatgtatgaccatgaaaaaacagcactaaaagaaaatttatcctctaaattatttagattacaatatcgattaagatcacaatgacctaacaaacataatagatcatgctcatgatcgtgttgaacactttgacctgatgcacatgttacaatact

SEQ ID NO: 201297 - DNA, 440 bp, Zea Mays
ggggaacgactcacctgtgattatttcatctgtttctgcttccgttgctacccctgctgctggagttctgtcggcttcagttgctatccctcaacagtctgttcctgtatttcgccagcctttaggtgttcatataccacatctcccgatgaattatgtcccttacaatcagtacatttcaccattttttattccaccccctacccttcacccttttatgggtaatgctacattttctcagccaccttcaacaggggtcatgtacccaactcctggaaccgcaagagttcttccacctgtcaaattcccagttccttcattcaagcctggtgctaacattgggagccaggcatctattggagttcctggttgctatggaacatatggttctagtccatcggtttacactaataacgcacccgtgtcatctggaaatctag

SEQ ID NO: 201298 - DNA, 321 bp, Zea Mays
agccacagcccccgagaattaccttgttggagggcattgatagctgcaagcagatcgtccttaatgatatgccagcatgacttatagaatctccgaggggaaaaccatccggacccggagctctatctgaaggtaggcagaaaactgcaaaccggacctcttcctctgagatggggaggtccaatacacctagatcgcccatgtccctgtggcaagatcccaagtttagtgtgaattctctatgtttagccacccccaacaggttggtatagaaatcattcaaagcttcatgcttctgctcatgagaggtgaccacctgat

SEQ ID NO: 201299 - DNA, 442 bp, Zea Mays
gcaaacaacattgacgttgccacaatagacaagagtactacgactcagggggaatgaatatagcacgatcagcaactggccaagccaattgtccttggcaacaacctcatactcgactttagcactggagcgggaaaccgtgttctggcgtttggatgaccaggagaccaaactgtcaccagaaaaattgcatacctaaagatggactggcgagtaccaggatagccggccaagtcggcatcagtgtagacaatcagatctaaagccgaggagcaccaaggaaggaaaccatgatcaagagtcccctagagataacacatgatgcgtctgattgcagtcaagtgaggctcccgcggtgaatgcatgcaaagacgaaactgctaaaccgcataagggatatcaaggctggtgaaggtgagatactgcagagcgccgatcaggc

SEQ ID NO: 201300 - DNA, 273 bp, Zea Mays
ccagcctaagccgcggtggtgcacatgcatcccatggcggtgcgcgccggtgagcaggcgaactgcccaccccggtgcccgattttgaacgaggatgggtcctacgcatggaggcgacctaagtgaatgtagcagaggtctacttaccacgaattacagagatagttcttcccatggtgtggtgcggtacattggtgggtttgacattctggcgagcaatcttggtgactccaaggggcttcactcacgggtaaaatctccgtcaaactccac

SEQ ID NO: 201301 - DNA, 754 bp, Zea Mays
ttgcctgggttttccagggagaccttatttggtttagacagtataaaatctgcatacaaggacaaaagggaagcacacaaaggcaaaatgaaaaataaaaggccaactaggctaaagcaacatgctcagctccatcaggttatttctaaggaagcctgtaacgatggaaaatcatcagatttagcaggtgactattcaccaatggattgttcgccatatcctgcagaagctgaacatgtgccaacagaggcatatgtggcttctggtcagcccgttcacattggtgatagtgttatctcaaactggaacaccagctgtgctgaagatgatgtagtttctgcaaccgagcacttgattattgatgtaaacctaccaatgtttggagatgaaggtagaggaccgaaactagatgcatctgagagcaattttggtagcagcttttctagttttcaaggagatcaaagtaatggaccacagcattctttcactaatattgggcaagactgtaacgataatacctacagaactccccatgattttgttgagcctcctgcttttcaatcaagctcatcaaatttcagtgggctgaactttagattcggtgtgtcatcctctccacaaatctctgcagcagcacaaagacgtaacacaagaaggaagttaagaacaaagggcagtctggcatcgaaaccttcaactatcggctcttttgaacagtcaaaatcttcacaagatactaagggcatgcggtttt

SEQ ID NO: 201302 - DNA, 282 bp, Zea Mays
gcttagtagtagtgattgcgttaagttgaaccgaagtgtctcgagtgcgtgccacaatatggttgtatgcgagacatggcaaaaatagagtgtgctcgatatgaatgtttggtcaatataggtagaaattgtcttggcttaattagagaggtgatggcatgccgtaagtagtcatcgcttcctctataattataagttgagtctatacgcgttaggcgttccttaaattgtgcttcacaaataagtgtatgattgtgcttatgacttgaatagatgtcttcg

SEQ ID NO: 201303 - DNA, 357 bp, Zea Mays
ccacgtcatcaaaaatttgtcccccgtttgattacaaatcaacggtccatatctatcactgcatcagtggcgagtaaacaaagaaaaaaaggacgaggctctcctctggagagttccataacttccatctgagatctgacactttgcctttggatgcttctggcttcctccgcccccggtcctcttctagtcgcttcgtcttccatcgctttcctcatctctgcatcattctttcttagttgctttgtctttcgtcgccttccttatctactttgcttcagcctaaacgctttgtctactgccgccttactcatccgctctgattgtttagtgagatacatatttttcccactcctt

SEQ ID NO: 201304 - DNA, 1095 bp, Zea Mays
tctgccggtgctggaagacaaggttgctgccgtccttggctgcatgctggcgttgctgaaccggggaaggaatgaggtgctctcagggagatcaggtgttgcaagtgccttccagggatctgaggacagcactgctgataggatcccaccgctcgccttgttccgtggagacatgaagcgttgctgtgagagtatgcaggtggcgcttgcaagctaccttgtgccaagtgaacctagggggttggacatatggaggaagctgcagagattaaagaacacttgttatgatgcaggtttcccgagggctgatggttatccatgtccgacattgtttgcaaattggtttccagtgtacctttcgattgtgtcagatgattcaggaatggatgagctagaggttgcattttggaggggaggacaagtcagtgaggagggactggcatggctacttggaaagggattcaaaactattgttgatctccgggaagaagatgttaaagatgatttgtacctttcagcagttcaggaagctgtctcatctgggaagatagaggtggtgaatatgccagttgagattggaactgcaccatcagctgaacaggttcagcaatttgcagctcttgtgtcagatggcgcaaagaagcccatttatctctacagcaaagaaggtgtttctaggacgtctgcaatggtctcaagatggaaacagtatgttactcgttcagagagattggctgtccaaaatcactctctaaatgggaatggtaacatcctgacaaatcacaagaccatgcagcacactggcataccaagttcctctccgaatggagctgaaaatggtatgataacagaatctgataggaccatgaacaatggggaatcaagtgagatagacatagatacagctcgtcataatctggaggtcactaatgccctttgtaatgatcaaagcactcaacaaggtgaaatgcctgacaccgtggcagaactcttgtcaaactttaaactggagagtaacccccttaaagcacaatttcctacttgcgatgttttctctagaaaagagatgaccaagttttttagaagcaaaacagt

SEQ ID NO: 201305 - DNA, 599 bp, Zea Mays
gctggctggatcctgtcgcctcgatcttgtagcacaacaaggacggctgaggaggccggccggtcagtcgcgacgatccgcgtgatcgacgaccttgtggcgatgggatggaattggtggaacgccaacaggcgccttctcctttggtgatgaattcaaatgcaacgaacaaagcttctagccggccgccaccgcgcgctctgaagaagtaactacatggaatgacgtggagcttcttccatggctacgttagtttgatttctttcgatctgatctgcccctagaatgaattaagggaacaacctagccccgaccgacgacccccttgcttgtctcggcaggcacagagacgtggcagtagcagaggaggctgcgatcgatgctagaggggacgggaaaggacgatcgacggacggtacgtacagagctggtccaagacgacgatgggggtgggggaagggaaggggcaacctcaccacactcggtgtccctggctcgtgtccggcgacggagttcgcgagcgcaaaggacacgcgagcgggcgatgggtccttaccaccaatgggaagaaccgaggaagagagggaggcgccggagcc

SEQ ID NO: 201306 - DNA, 857 bp, Zea Mays
acctcttccgggtggtgacattcacttgcgtgacttgaacttcgatactttatcagaaccatcctttcccacaactgatggttataatctagatactgatccatttttggcagacagaagcaacatgaataaatcaaatcaaggtattcatatgagcgaaaatggtgctgttggtgtatcttttgaaaagaataattataatgctgatgatgaaatccactcaccggaaaatttatctagaaacaaggtaatttaagcaaacacttaattttcatttgtgagcctacatgtttgtattagataattcaagcatttgccttatgactgcaggtgtcaaacaactattttggttcagatgcaataagtggtaatggggatgcaatttatcctgccaaaagtaatgcacagcagcctagcagctgtgctcctgacatgagaaaacagccaaaagcaagcatcacagtttatcagcctgacataggtgtctatttaacttctgacatggtcagttcttgtgaggggtcatatgcttctgccagtgagccactgcaaaggagcttgtcatctggaagaactattgggaaagcaaacgcggtgaataagaggcctccatacccatcaagtaaggtggtttcagcacaaaagccacaggatagggtgtctacatcatatcaaaatgatggccatgagaagaatccttgcaacaaaaatgaccaaagttagtagtgttctgataaagtgggctagctttatcttatagtgctacttttatctcatataattactgcattattcaggatctacccccaaatgtgaatcaagtcaatcaacaagcagcaatctacaaaagtttggag

SEQ ID NO: 201307 - DNA, 492 bp, Zea Mays
gttcggttctaggctgctagctgttgattctgctttctgtttcgcttctgtttacgacacctgaaccagtttttggtaccggtgggggagcactgtcccaatggctggccgccgttcgccgtcggcggatcccggtctcggtcactgcgaagctcccgaaatgagatccggtggcgctttagagccctcgtccgttccaatacgcagtcggatgctgggttacgctcgcctctaaatctaagcttattatttatgcctttgcttcgtattcgtcagatctgatttcgtatttctgtctcgaccgaaattttgcgcggtgcagtgattataaaaacattcctcgtactgatgggtcatcctcgtgaacgactcctatacacccatagaatctgagcacccaaaacacatctccaaattttttttactttcgtgctctattttgtttgtttgttatactatttaggttttttaaaagaaacttgacttccgcgc

SEQ ID NO: 201308 - DNA, 399 bp, Zea Mays
gcgctcggtgacatggctagctatcgagttcaagcttgaactcaccccgacatgtcatagggggcggcgctcgaagatcatatataggcacggaaacgagcatagcacgcaacggccgtcgtgatttcagtgtggcggatacggagatccctccgttggagttagcagcgccagaagcgtacaattttgcaccaggccccatgtggcggtaccaacaagcagcgagcgcatgtaaggcgaggttgaatgggtctctgtgtcccaacctcgtcaccgcctcccaataatcgcggtgagtagcgtggggaagaagaccatctgacgcggcagccccaccgacccgtggaaacccacgcagttcgtgcccacgggaggccgacaagccgggctcgcctggcg

SEQ ID NO: 201309 - DNA, 893 bp, Zea Mays
tagaccgactacacccaaatcctctgtccccactatcagtgcatttgatagaattgaagattcagatgacgaggaggatcttgtcccagatgccaagaatgatactgcttacttgaccccaaatggtgctattgtaagtatcagatccctatgcttactctaaacaagtgataccaatctgtctgctagttccactagatctgtatctatcaattgcatgtattctttgacttgaggatcttcacattttgagctttgtttagctaaatgcaatctgactcaaaatctttgccattccaggaggttcaactcagtgtttgctgtttaggccttagcctatgttacaccggttatcaagtagagtttcttagtctatgttgcaacgcaagtgacttatatactgatcaattaatacacatatattcatgtgagcagtgagcatgtttagttgtgtttgtagatacgaatcatggtaccatctgtctatcctgggttggtatacagctgcaatagtatgattggattgttgccaagttagtaactatcgaccattgaaaagagttacactgttcatttggaaaaaaaactagtttaaactgcttatgacattataaatggaaatttattctgttttctgtagatgttgtctcactgaaatatgaaatgttttttatgtgctgtgtaaactttgttgtgcattttctcatgtgctgcagtccaacaatttttttttcaatgtaggggcaatattccattttccttgcaaatgtatcctacttactggtattatatactaacagtggcttctttcatttttgttctttctctcagggatcagatctcacagataaagcgagccagaatggggaattaacatcagcaccatcaacgca

SEQ ID NO: 201310 - DNA, 325 bp, Zea Mays
taccccaagcctcctgagtacaatatccatcaatatgaggagcacagagtgcctcattgtagagtgcagcttgcactagagccccacccgctgcacccaggttggcgctctctagacactgagaccatcatgtttagggcaaacgatatgtttgaggccgctgccatggaggccctgacgaccttctgtgagtattaccccttggaggtggcaacatgtcccatcagtctcttcccagctatttgggatgatgaccctttgtggggcaacacacttgatcatgctaaagtgacatgggcgctacaaccaagagggacagttcgca

SEQ ID NO: 201311 - DNA, 657 bp, Zea Mays
caacgatatggttaatggtacagatgattctatgctgtatactcttccccaggaagagttgtttgaactatttctaactctgagcggacaacttttcacttatatggaatgcatttttgaaatttcataggcaagtgttctattgattttatcatgtacttacagtgaccatacatgctatgtttgctatgtccaacaatgttctcttgatctatttagggtaaataaaacaaagatattggagtacttgcacgatgcttgggctattgacaggaaggcagaatggtcaatatggactgttcactcaaaaattgagatccctcatcgctatttgcggagtatgaatgatgaatcatctcaccgtcattcacttcttagagtttctggatcaaggaagttccatgacgatgtaattgccctcgccaagttctattcataactagtgttatcactcctatttctatttaacaatcactatatgtgtgcagcctgcacagaactctgcttcacgggctgaactacaccggaaaagcatagcacaaatgaaggtttgacactgctctgttctgtaagcatagttgagtgcaaagcttgcctctgaaacatttactgatttgaagcattttgcagatcaatacacaatctgttcaagatatg

SEQ ID NO: 201312 - DNA, 389 bp, Zea Mays
gtccttcagtccttgcaatttcctcccgcactcccggttctcccgcacgctcccctctgcctgtccgtgtcgcttgcttcgcttctgcaaacccctgcccggcggccggggcgagggggcgtgatggtgttcaaggggcgcttcttctcgtcgcgacacaagtcatcggagtcatcttccagcccagacggcagcaacagcccacgcacgcctacctcggccccggcctcggcatccgcggcgtcgccggcgtcgtcgtcgtcgtctagatccgacaagaagaagactaaatcggagactcctaagaagcgcgacaagctcttcggttccgcggccaccgcacccaagagcgccgcatcgtcggcctcgtcaagcccggcgggtgatgg

SEQ ID NO: 201313 - DNA, 335 bp, Zea Mays
atctatccaacaccttttctttgcattttttcaagaatggtccgctcatctcataggaactaggacctctcaaacctctaccaaatgctccaattgcctcaaccatatgagcaaagctaggaagggtgactgtgttatgtgcaataccagcttcataaaagaattgacatatatactcacaagctctatccctcctctcctctcttttctgagttgtcaattgtgtttgaattttttggctagtgcttaatcctcttttgttcttttggatagattcttcaattgactcaggtttgtagaatttatcaatagtgccactagttgctaatctagag

SEQ ID NO: 201314 - DNA, 455 bp, Zea Mays
caaggaacagaaggggatggtgttaccttttcaacccctttctatgtgcttcaggaatatcaactactatgttgatgtaccagtggtacgtcagagctggatcatttgcaatgaggtttctcagaaaaaaagtatgtatttattcattcattcataatccagttctgctagcaggaattaaaaaagcaaggtgtagcagaagaccgcctgcagctgcttgttgatgtcactggagcttttaggccagggatactaacagctcttgttggagtcagtggagctggcaaaaccaccctcatggatgttttagctggcaggaagactggaggtctcatagaaggaagcatcactatatccgggtatcctaagaaccaagagactttcactaggatatccggatattgtgaacagaatgatgttcactcaccttgcttgactgtgatcgagtctttgtt

SEQ ID NO: 201315 - DNA, 572 bp, Zea Mays
ctagaccctagatgggaggaggaagactacaagaagttgttaacgtggaagtggtgtatgatacactgggcctgacaaatgaggtgatgggtggaaccaattgtgatggttggcaaaacgattatggtgatgcaggggcagctatagaatgcaaggacattgacgatgacattgtaatgtttgatatgaaaaatccagttatgaggcttggtaacatatatatatagtagcatgaaggagtttaggctcgcaatgatccaatatgcaattaacaaggaatttgagctaggcattgaagctactagtactcgaaggtatagaggttattgtaaaggggatgattgtccatggagtattcatgccagaaaagaagtagaagaatcgcctatcatcattgtatgactaattatcttgacttgagttcaatttattgtttttgctttactttaaactaaccttttcacatccactattgtaggttactgccatgacagatatccacacttgtacatctagtggtaggtgaaggacaaagacacctactagtggttgggttgctgcccaagcaatac

SEQ ID NO: 201316 - DNA, 426 bp, Zea Mays
gaaaactcagaaaacttcattgaggatctgcagctggtcttcaacagcctgaggcggtaccggtggaagctcaatccagaaaaatgtgtctttggagtaccagcagggaagttgctcggattcattgtcaaccacagaggaattgaagctaacccggagaaaatcgaggctaccatgagaatggaagcaccacgatcacagaagaaagtgcaaaggcttactggatgcatggcagctttaagcaggttcatatcaaggctaggagaaaaaggcttaccattctacaaattgctcaagaaggtggacaagttccagtggaccatagaagcacaggaagctctcaatgcactgaagaagttcttgaccacgccaccagtgctaaagccgccacaccgagccatgccatatcagccagcagaagatctg

SEQ ID NO: 201317 - DNA, 358 bp, Zea Mays
gagagagtgctttgggagatggcagggctaaaaatctctccctcttggctccaatcctaggcttgattagtctttttagttcttaatggaccccttttcgtatggtattttttggccaccgtgaggtgcctaaagtttgtactggactgttttggtctattttggaccttgtttcctttttaatataatgatacacaactctcctgtgttttcgagaaaaaagttttctgcaaccaaagccatttactttgtagtgcccagcacatgtattgcaagtcggggattctaaccctccaaggttaagaggccttgtaactttatcccaagacataaggcaattgcctccatttacctcctt

SEQ ID NO: 201318 - DNA, 855 bp, Zea Mays
ggaatgcggtcacttggtgaaacatgagaaaggcgatgagacattttgctgggcacaatacgcattcaaggtggtggctgacaaagcagcaggcgtgtataaatgcaaatgcatgcagtgggagcatataggtgagatgaattgcaacctcgttacattaaaaaaattacacattgatgttcctgcatatttacgtccaaattgcaaaaaaaatgcaggtctattctgcatgcacataataaaggcattcactcacctccaagtccaaacatacctgaaaagtacattctggagcgatatacacgtaatgcaagatctgtggttctgtgggaccgacacgatgtgagtgttggtggtcagaatgagacagagcagtcgaggttgtcgaaactgctgccaaagttaatgcacctgggaagagcgggaagcaaatctgatagaccatacactgaaactatcaggcacatcgacatgataactcctgggattgagcttctacgaacagcggagattggtccggatgaagcaacaaatactgagttgcagcaagatgcagatggacggcagaatattggtcccattgcaccaacacaacaaagttctgaaaacaatatggaacctgttgtgatgtccactggtcctacaccaccaccagaatcgggcctcaatccaggttctgcaaacttcctcgctgatctaacattgactaaaacgccagtgtcgcgcacgaagggtaggaagtctgccagtggggctaaatgtgctaaaaatagtgtggaacctgctaatccatacagcacatacagtgggggtcagggcataagagagtgccaaacctgccatgttagggggcac

SEQ ID NO: 201319 - DNA, 390 bp, Zea Mays
tgtcaccatagcgagctgataaccaatgcagaatggccacagctttctgagacgacattttgatattggatcctaaagcatcttctggaagctcccattaggaagccctttatgacatggcagaatggagggaggatatttccacccatatctccaaaagatccataacccatataatccttacaggattatagcaagttcacttcatcatacttttttcattgcaaaataacacagtttaggactattgtcaccatagcgagctgagagccaatgaagaatgggcctagctttctgagatgacattttgatattggatcctcaagcattacatcagagctcccataaggaagcccatagagacatggcagaatgatgggaggatatttt

SEQ ID NO: 201320 - DNA, 289 bp, Zea Mays
ccattacttgtaataaaaatatcaataatgctgacctctgccatgcatgtcagttaggtcgccatgtccgtcttcccttttcctcttcccagtctcgtgctcggcacccttttgatcttattcattgtgatctctggacctccccggttcccagtatgtctggttttaagtattatcttgcaatcctcgatgactgctcgcaccacctgtggacatttcctcttcgtctcaaatccgacacgttctccactattgctcactttttctcctacgttgccacgcaatttcg

SEQ ID NO: 201321 - DNA, 338 bp, Zea Mays
aagctctgtccagatctgaccgtctagggcgaggtgaccccctcctggcggcgagcgagacagcccccactccaccccacctcgcaacagccaccggtacagccccctcccctactggtataagcggtttgcatcacctttgactggatctctacttcctccacaaacttgtctagcgtaccttgagtgacctcgtttgaggccttgacagccacctcggtcttgtcaggtaaattccctttgtgaacctcaccaaatcatcccttgccaagagacaacgaattgttcatggttattttgccgagttcatcttttgtgaatatttttagagttttcac

SEQ ID NO: 201322 - DNA, 543 bp, Zea Mays
ggcgacgggcctgctggagatcgtcctcagccgccacaacccgttcctcctctccgcgtccaagcgcctccgtttccggcagtgcctcgcctaccttgtcatcgacgtgtggcccgtcagggcgcccttcgagctctgctacgcgctgctcggaccctactgcctcatcgccaaccgctccttcctgccaaaggtaaacttagtaataaatttccctctatcatcatcgtcatcgtttcagtggaaacggcgtgtgtcatgcacattaattaatcagctgcacctgcatgcaaattttttttttttacaaaaaattcttcgtccaggcatcggagcccggcttcgtcgttccgctggcgctgttcctggcctacaacgcgtacaacctgggcgagtacgtggactgccggctctcggcgcgcgcctggtggaacaaccagcggatgcagcggatcacgtcgtcctccgcatggctgctcgcgttcctcaccgtggtcctcaagacggtgggcctctcggagacggtgttcgaggtgacacgca

SEQ ID NO: 201323 - DNA, 520 bp, Zea Mays
gctaaacaagttccaattcctactcaaagcctcatattcataaaaggcggctaaagaagttccaataaagaagaacacccaattccatcgatcttgactcttgttcccaatccgggctataaagaagaatatccattgatggtgggtgttgaccaaactgcaaggtttctgtgagttactagcatatatataggtttgcaagtagtttgggttaccatcaaatatttctgcagttccatcccaaaggctgcgaaggcgcacacaagccaagttctactcaacatcgttccctaatcatggtagtaagcacactctgcagcagcttgccacttctacccaacatcatcgtcctcctcttgttcacaaccatttccgactccacgaacagcaacagcgatctcaatgcactcttgtcattcaaatccctcataacaaaggacccaatgggtgcactgtcatcttgggatggggacgcttctaacaggagcgctcctcatttctgccggtggaacggcgtgac

SEQ ID NO: 201324 - DNA, 339 bp, Zea Mays
atggcctgtcacaactctgtgcttgaaagatgcacttcccagaagacgaagaatgacagggaacagatgaattgtgctctttggatgagctcgcccagctaaagcagtaacaggtccatggcgtttgccacacataatctgctgtatatcactggagacagtttcaaggataccagggaccaaagaagcaaccaactgcacaaatgcttctgtacattgatgaatgaaaccctccttctcttttccaaatctatcaacagctgatattaattttgcattgcaaaagaaatgaggaagccaccttcgactattcttgcaaagcagagcaacaaacaaaaa

SEQ ID NO: 201325 - DNA, 685 bp, Zea Mays
ggcgaagatgaaggggcgcactaccgcggggcagtggcatgctccttgtgtggcggttctccttcttcgcactcgaagaccagcgcgccaactgtatgacttgtgagaccgggcccccgtgtcataggatggataccccggtgtgcatcgggggagacttctcgcgacgtttcgaggcgggagcgggggagtctgcctttaaagagggggttcatccctcgagtagcagccatgccttgcttctctcacactcgcggtgccctttcgcctttgagctctctgcgcccctttgccttcaaggtttctgctttgtgttgccatagtttaccatggccttgtaagttcatctcgagctgcccagactgagtgagtgctcgacatggtataccgcctgcttggatgggatgcgccggttttcggcggaaggatttgcgccggcgccatccaccccggtgaacttgccgctgaagagttcgtgccttttgtcctccctagcgggttggtgctgtcggtcttgtgtttcctctgctggaggtgcgcggccttgcgggagcggcactcttccaccggtgcttggcttcaaggatgttcatcagcctcgcggtggtggagagcgagctgagccgcggctctgcctcccacatgggctggtgacccgcctcttcctctagcattcgaaggaaaa

SEQ ID NO: 201326 - DNA, 296 bp, Zea Mays
ctcgggttgataggataacgatcgcggggtgaaaaatctcatcgccgaggataagcttcggccagtaaagaactccggccaccgtaactagctcgccacggcggaattagataagctcgtcggtgactgccgccttccggccttgtgccgcgtgtcttggcatctccaccgcatctccgtgatctgctatagctctccgttgatcaccggagtgaatgccacggtaataggacaccaatccagtgcgccagtgagctccccctcctccgaccgccgcacgtcttcaccaaattcac

SEQ ID NO: 201327 - DNA, 284 bp, Zea Mays
gaaaagtggagtgcctatagggaagataatccacgtcaggctcaatttgtaaaggacaagattgtgaatgatttgtgatgggataaagtgcgctatttccttagtttcactgagcctatctatacaatgatacgagcagcagatactgacaagccatgcctccatttgatatatgagatgtgggacacaatgatagagaaggtgaagagtgtgatctatcgtcatgaaatgaaagagacacatgaagaatctatcttttactcagctgtgcatgacatcttggt

SEQ ID NO: 201328 - DNA, 354 bp, Zea Mays
ggttgaccttggttatatgatcgtgatgtccagatttttggaagaaccaacaagttgtctttcttgtacaaaggagagcgaatctctttgcttccttagacactggaggaaattatgaaggatgatctaagaaacagcgagagagcaagaagcacttgagagtgatccacaaaaatagtaaggaagagtttccaaagccaaataaaactccacagcctccaataaccaagacaccgggaaaagagggattaatcatgatgactaggaaggggcatctaaaagaattgagtgaacctaatgccatgttctttgtgctcctgtacaaggacaaccttttttctactaacgacttac

SEQ ID NO: 201329 - DNA, 4569 bp, Zea Mays
atgaccatttatctgaaacaagaagtgggaaattagatcaatcaacatgcatcacaggattagtctctgacaattgtgttgtctcagaggacaaaacattgatgagtgaaggtgaggtcaacatttggtggtaatggcatactagttgttaatttattctctgcatagccaaatctataggctttaattatgtttaagttatatggcatcacaattgtattattattttttgatcttctttggatgctggaaagctggcatattaataccctattgattttgtgatgttgtaattagctttgtccattattgtcatgttatatactcaaagggagactttgttggtccaaaatcaccaaatggtttatcaattagtttcattgtcgcagaccgtgaagagcaaagccctgtgtccggagaacagagagttagcttggaagcaaatgccaatgagcctgaggaaaagaacctagctaacgtcacatcaactgatctccacaccaaaagtctgcagcatgatattgacagaatagctaaagagactgataaaggtacaactgaattaatcctgtatccataataaaaactctgcaacattgatgagtgaagataatatgtatgctgaacatctaaatccacctgtgccagctgattattcactgttttttttctaaagatcttgcttagtaatcttgcttcaagattttcaattcactaaattaaacttgctaaatctccagatgttttgtctttggttttccctattgaagagcatgaagaaaaatatggagtgagccctatagctgttgaaaagtgcgtctgtcgtgaagcaagtgcatgtgaatctgcacgaaaacccctaaccgttatcttttctaacaatctccacaccaaacatctgcaacatgattgtgatgtgctaattaaggagactggtgaaggtaatattgcattaatacttgttccacaacttgttactgatctgtggagatggtgatgaaaacttgtgctgtttgcactgtgtttaatttaccaattttaaacatactgagttctaagtcaagttgttggctacttgtaattctaattatttttaataggctttatgtttgttctatctggaacagctaggcatatgtttcattgtcatttgttgtcttttaagtatcttacatttttttgaatgtattctttccctttctcagaagttttagctcaggagaattgtaatgaccagcctgttcctgcccagactgaccaagaaattaagttaaacgatgaacttgctgatccgggtatggactgtgtttaatttaccaattttaaacatactgagttctaagtcaagttgttggttactttcattctaattatttttaataggctttatgtttgttctatctgcaacagctaggcacatgtttcattgtcatttattgtcttttaagtatctgacatttattttttaaatgtattctttccctttatcagatgttttagctcaggagaattgtaatgaccagcccgttcctgcccagactgacctagaaattaagttacacgatgaacttgctgatccgggtatgtactgtgtttaatttaccaattttcaacatactgagttctaagtcaaattattggctacgtgtaattctaattattagatttgtgcattattgtcatgttatatactgaaaggaagactttgtcgttccaaaatcaccaaatggtttatcaattagtttcactgttgcagaccatgaagagcaaagccctgtatccggagaacggagagttagcttggaagcaaatgccaacgagcctgaggaaaagaacctagctaacgtcatatcaattgatctccacaccaaaagtctgcagcatgataatggcagaatagctgaagagactgataaaggtacaactgaattaatcctgtatccccaataaaagctctgcaacattgatgagtgaagataatatgtatgctgaacatctaaatccacctgtgccagctctcattcactgtttttttctaaagatcttgcttcaagattttcaattcactaaattaaacttgctaaatctccagatgttttgtcttttgttttccctattgaagagcatgaagaaaaatatgcagttagccctatagccgttgaaaagagcttccgtcaggaagcaagtgcaattgaatctgcaggaaaacccctaactgtcatcttttctaacgatctccacaccaaacatctgcaacatgattgtgatgtgctaattaaggagactggtgaaggtaatattgcattaatacttgttccacaacttgttactgatctgcggagatggtgatgaaaacttgtgctgtttgcactgtgttgacattttttaaatgtattctttccctttctcagaagttttagctcaggagaattgtaatgaccagcctgttcctgcccagaccgacctagaaattaagttaaatgatgaacttgctgatccgggtatggaccgtgtttaatttaccaattttaaacataccgagttctaagtcaagttgttggctacttgtaattctaattgtttttaataggctttatatttattctatctgcaaaagctaggcatatgtttcattgtcatttgatgtcttttaagtatctgacatttattttttaaatgtattctttccctttatcagatgttttagctcaggagaattgtaatgaccagcctgttcctgccaacgagcctgaggaaaagaacctagctaacgtcatatcaactgatctccacaccaaaactctgcagcatgataatgacagaatagctgaagagactgataaaggtacaaccgaattaatcctgcccagactgacctagaaattaagttaaacgatgaacttgctgatccgggtatggactgtgtttaatttaccaattttaaacatactgcagagttttggtttatcaattagtttcactgttgcagaccatgaagagcaaagcaatgtgttcggagaacggagagttagcttggaagcaaatgccaacgagcctgaggaaaagaacctagctaacgtcatatcaactgatctccacaccaaaactctgcagcatgataatgacagaatagctgaagagactgataaaggtacaaccgaattaatcctgcccagactgacctagaaattaagttaaacgatgaacttgctgatccgggtatggactgtgtttaatttaccaattttaaacatactgagttctaagtcaaattgttggctacgtgtaattctaatcattagctttgtccattattgtcatgttatatactgaaaggaagactttgtcgttccaaaatcaccaaatggtttatcaattagtttcactgttgcagaccatgaagagcaaagcaatgtgtccggagaacggagagttagcttggaagcaaatgccaacgagcctgaggaaaagaacctagctaacgtcatatcaactgatctccacaccaaaactctgcagcatgataatgacagaatagctgaagagactgataaaggtacaaccgaattaatcctgtatccataataaaaactccgcaacattgatgagtgaagataatatgtatgctgaacatctaaatccacctgtgccaactgattattcactattttttttctaaagatcttgcttagtaatcttgcttcaagattttcaattcactaaattaaacttgctaaatctccagatgtttcgtctttggttttccctattgaagagcatgaagaaaaatatgcagtgagccctatagctgttgaaaagagcgtcagtcgggaagccagtgcatgtgaatctgcaggaaaacccctaactgtcatcttttctaacgatctccacaccaaacatctgcaacatgattgtgatgtgctaattaaggagactggtgaaggtaatattgcattaatatttgttccacaacttgttactgatctgcggagatggtgatgaaaacttgtgctgtttgcactgtgtttaatttaccaattttaaacatactgagttctaagtcaagttgttggctacttgtaattctatatatttttaataggctttatgtttgttgtatctgcaacagttaggcatatgtttcattgtcatttgttgtcttttaagtatctgacatttattttttaaatgtattctttccctttctcagatgttttagctcaggagaattgtaatgaccagcctgttccggcccagactgacctagaaatgaagttaaacgatgaacttgctgatccgggtatggactgtgtttaatttaccaattttaaacatactgagttctaagtcaaattgttggctacgtgtaattctaattatttttaataggctttattgttgttctatctgcaacagctaggcatatgtttcattgtcatttgttgtcttttaagtatctgacatttattttttaaatgtattatttccttttcacagaagttttagctcaggagaattgtaatgaccagcctgttcttgctcagactgacctagaaactaagttaa

SEQ ID NO: 201330 - DNA, 279 bp, Zea Mays
acaaaatatagtgatgacaagaaacaactaattccttttgttccagaaaatggtattgacacgcataagtataaaacctatctgtataatgttcgtgtacactccaacacctacctatgtatgaacatctcaactgactaaaccagcgtgaattcatcggttcaaaataaatcaggggcgctctgaggtatctgcaacatcattgtttcaaatttgtgaggttattcatgcctaattttatagctttgtgcatgatttggttacacaaactggcccaac

SEQ ID NO: 201331 - DNA, 309 bp, Zea Mays
ccagccggcgaggacaacaattcccgcttgccagtcccgtccacacgaaggcgaccaccttccacctcaccacgatgacgcctatcacttcgcggcaactcactcaccctctgtttcgccaccgcccttcgccgcctatgcccaacactcgcacccggaagatcctcatcacccattacacgcggtgaagcctccgccgcagccgcatccaatgccgcaaagtaatccaaatcctcatccgaagactcctctgtccacacaatcgaactcccagaatcatcagactcaaaacacttagacacagaatca

SEQ ID NO: 201332 - DNA, 365 bp, Zea Mays
cacatattcagctctggctccttggtgccctggtctctcactctgagtttgacgtcgtggatttcctcatttgtgagatcgaggacactgtattggatggtctgcatgctcgacgccagctaccgtatgctcactacttgtgccacatttttgcgcagctgattcagcctcctcagtttcagggcacacttgaggcctcacgccttgtctttggatcctaccgtcctacgcctgaggctcctgtgccagcttctgctcctgtttttgactctcagaccgaggatgccgctcttcgtcagttcgacactcaggatacagcagttgatgatgatgatgatgattttggggttcctcctccgcctccg

SEQ ID NO: 201333 - DNA, 325 bp, Zea Mays
ggggggctcgctttttaacttttttttactgtgccttcttccccggtgggtggcagtggtgatagcgctgggagatgagaataaagcagcgttcatcagagtgcagcgcagctcatgcatgcagggcaaagtaggcggcgaattctatagtttatggagggttttacttgcattgcagagatagatgacaaaataaaatgagaaaatagatttcatgtggctagtataagaactactacacaggcgaagcaatgcaaagtaagaaacaaaggtcgcagtcactttgtaaaggcattggcaagatccaattctaaaagcctgaaag

SEQ ID NO: 201334 - DNA, 276 bp, Zea Mays
cacgtgggcattctgatggtgtattccacggttatccaagaacacgccaagcaggtgtggtacatactgcacatgctcctgcatgaacttcatgtagcgggttactgtctccaggtacaccaatgcaactaagcggtgtgtgtgacacgagaacctcgcagttaggagcatgggcacaagctggcctatcagccctgccccagtccgaatctcctcctcacccacagcttctccaagccggaagaacagggtaagagcaacctcaacatcctccac

SEQ ID NO: 201335 - DNA, 382 bp, Zea Mays
gacggctgataatgcagtgaggaagtcgcccgcttgtagtgttgttgattcagctagctcgacgaatagttaggacccaccgaattgccttcgttgtcaggtctaattttgtcaacagcactgtctattatggtagtaacctcgtctcaatttggtcaggggaatacatggcgccggagccgtgacgccccagtggtgtcttaagatgtgtcgaccctttcagggccttggaattgacagaacaaagggccccggaaataccagcctgactcccagctaggtctaatgcaggcctgtcttctactgatggaatgttgaagaaatctttatcagcatccgagagtgtattttctcagacgctgacatgtattttgcgaagtcg

SEQ ID NO: 201336 - DNA, 402 bp, Zea Mays
gctccagaaatcctcttaggtatccagtgtcctacatcattgccatgtccgagaaggccaacattgtaagttccatctccccatgtataaagctcacccgttgttgtaacagcacatgtatgaaattcaccacaggcaacaaaatctacattggaaactgtcaaagactcaaccagacgtggacgaacacaatcttctcgtgttccatggccaaggcggcctccagaatcttcaccccatgtaaaaacctcaccatttttcatgaccaatgcagcatgcttaaccccacaatctacatgatacacatcaagaactaaattggactccaatggcttcgggaggagaatgtcaatcctgccagttgaactaataacagtatcagaaccagttcgtactgaagta

SEQ ID NO: 201337 - DNA, 359 bp, Zea Mays
gttcattagagaagtgctgcatcctgagtggctagcaaattttgttcttgtactaaaaagaataaagtggattgacgcttctgcgtcgactatactgatctcaacaagcattgtccgaaggatcccttcgggctccctagaatagatcaggtggttgattcgaccgcttgctgttctatgttgtccttcctagacttttattctggatattatcagatcagcttggcaaaagaagatgaggaaaaaacggcattcatcaccccatttggagctttctgctatacctccatgtcgttcggtcttaagaacgcaggagtgacctaccagagagccattcaaacatgcttagccgatcactg

SEQ ID NO: 201338 - DNA, 338 bp, Zea Mays
ctgttttaaaattcctttacacgtatcaggacggaggattgaataggtaaaaccctagggtctcttttgcaattgtctcaagccaaaggggtatcccccaacctcagccgttggattcacagcctgcggccgagattagatctctttaacatttaaatcaatcggttacatgggccgttagattggcgatccacggatcgcattactccaacaaccagacgcgatccaagccacacgctcacctagatctagcggttcaggactcatcggcgaagagaatacgctagagtaaatttaggccactgatccggtaatcgacggcaacggcgttatccctc

SEQ ID NO: 201339 - DNA, 788 bp, Zea Mays
gcatgtcgcaccgtcttaagtcatcgccaacttaagccgattgctccgttagtagggtatagtggtcaccccgagttaagtaagcatgagcatgtcgcactgtcttaagtcatcgccgacttaaaccgattgctctgttagtagggtatagtggtcaccccgagttaagtaagcgtgagcatgtcgcaccgtcttaggtcatcgccgacttaagtcgattgctccgttagtagggtatagtggtcaccccgagttaagtaagcgtgagcatgtcgcatcgtcttaagtcatcgccgacttaagccgattgctccgttagtagggtatagtggtcaccccgagttaagtaagcgtgagcatgtcgcaccgtcttaagtcatcgccaacttaagtcgattgctccgttagtagggtatagtggtcaccctgagttgagcaagaatgcaggttgacaatgaacaattcttgaagtctttttattgatgatgcatttcccagtttacagaatacattatcgccccaatagcttttgaaatatagctaaggataaaacttgctgaggtgttctatgttccatgagttcccaatttccgtgccgtccatctgagtgaggcggtatgatcccggtcgagtgacttcagctactacgaatggtccttcccatagaggtgacaatttgtgccgtccctcccccgttagaattcggcggaggacgagatctcccactgcgaaggatcgaggtcgtatggccttatcgtgatagcgcctcagagtttgctgataccgtg

SEQ ID NO: 201340 - DNA, 333 bp, Zea Mays
ggagatggagccgtatgtgtccaagaacccaagaactggatatgtcaactacagggacctggatcttgggacgaacgagttggaggacaatgtgactagctacgccagggcgaggatctggggggagaagtatttcaaaggcaattttgagaggctggcagctgtgaaggccatggcggatcctaatgacttcttcaggaatgagcagagcatccctcctcttcccgctgcaaaaggatggggctccatttgagtggtcgtttgtttcgtagctttgtggtggtggatttcttgtctacgtttgtgaattgtgatcacggctgaggatttgca

SEQ ID NO: 201341 - DNA, 633 bp, Zea Mays
tgtgctgatcctgaggtgccatacacatttgatgaaatccagcttgcaggtccaaagtagaaaaccaagcagctccatgtaattcatcaagaaattcatcgataataggaacaggaaaccttgtcttaacagtaagggcattaaggtgtctatagtccacacagaattgataagtgttatacttgttcttaactaggataactgacgatgaaaattcactttggctcggttggataatgcctgaagtcaacatttcatccacctgacgctcaattttcgacttaagagcgggtgcataacgatagggcctcatgtgaaagggctgagctccaggcaatagatctatatgatgatcacaatccctggttgggggtaaacctttaggtagctcaaacacagactgatatttggatatcagtgactgtagctcctctggcaacgtagaaaattggcagtagatctatatgatgatcacaaccgattggtcctttgctggcaggtctgaaagttggcagcactcaatgactgcacactgccctttagaagattggataccccacagttttacagtagcgcctccataaggaataaccaaccatttctcacaccagtctacccacatagggctatgga

SEQ ID NO: 201342 - DNA, 291 bp, Zea Mays
ctccggtcagtcccgacccgcgacaaatccgcaggcgtgggaagctacaagtgatgatgaaggcgggaaagatgatgaaattgatcttcccctgcccacgcccctgttattcgagggttggtcctccaccgggcggaggctcggcgtgctggcaatgagccaataactgatttcactgccagtggaggttctgctctccttcaggatctccgtttccagaatcctgcattgcgcattcgtgatgccaggattgatgggaaccgtttttggacgcttcatcatgtggatttt

SEQ ID NO: 201343 - DNA, 333 bp, Zea Mays
attttgttagaaacacgactcaagtttcgtcacataccctgtaaagctagtggcgctcctgcttctttacacagaccaatcattcctctgattcttcccaactagaagtctggatgtgcaacgctgtgcaagtttacaaatgcagtgtcaagtgcggcgcatgggaactgaatctgcagcgaatgtgcaagaaatacacggcatcatatttcacagttcacaccgagcaacatttaatttctttttcctgttaacttacactaccgctgtctgtattttcattgaattactgtcaagaacaaactgcaactctagcagtttgagatgtgaaac

SEQ ID NO: 201344 - DNA, 1381 bp, Zea Mays
tgctaggttttccatgggagatgggggagtcgcgtgcgccgtccgctcagtcgagagcttccgtgccggcgccctcgtgaggagaggaggagcgggagaagcgatgccggacaagggggagagggcccatggccaccgccaccagcaccagcactggaagaaccagcagtcggcgacagctgctgacctggaggagggggagctgcttaatggggaggccgggaccaatgggttgcccgagaggagcatgccacctaagaagtggaggaaggtgctggcagcctccgcagctgctgtggaggtggagcctggggagattgtgagtacaaagcaagcagtgccattgaagaaggaaagaagaaacggggacgttgagaaggtagagctgctgccagagaggcagaggaaggaaaagtcttctgggaagagcaccaggaagtctatcaaggatgatgtggagccaggggagattgcactgccaggaaaaaggcgggatgccaagtcccaactggcccatgataacagcaggaggccaagttcgtctgcccagaaaggctccttgcgggattctgatgaagaacctggtgaaattaagccagagagcggcatcagtggcagtgtaaggaagaaccggccaacagagcctcatagcagtaaccacaagcaccacactgacacctctgaccagtcaggatcaaaacatcgcaggaagggagaaggaaagagttcatctgctgccagacatttgtctgggagaattcgtgaggtctcgccaccaacacgggatcggcgtgataagcacgagaggagcccaggcatcttgggccgttttcctcatgaccgttttcgtcatgacaggtatgacaggagcccgagccgcttggagcgttccccacatcgcactcgccactatgatagcagagaccgcagtccatatatttcacctcgacatagagctcgtccgccccaattcagggataacacaccaagtcgtgttgataattcccctcgtgggagggtccagcatgaagatatcagagaccgtagcccatttcgtcatgacaggtcgccttctgaacgttgtcgtcctactgacacgcatgaagcaagcaagaagagcagaagtagcaacaactcagagaagtcacatcacaaaagcaaatcagcgaagcaatcttcaaaaatcaagagtggtagcaatgggaagaatgaggagaaaatctccaaagaaaagcacactgaaagcagtcagtacactgaactgccaccaccacctcctcttcctctaccaccgccaccaccaccgccgccgccaccgccacccctgccgcctgctgtaccacctccattgcctccatcaccagaacctgagccacctgga

SEQ ID NO: 201345 - DNA, 273 bp, Zea Mays
ctctaaaggaacacagcctacaacccaggttggatggctcgacttctcctggactattctgatttgctcgctttgaatctgacagtgaggactagctcatttgaaagtagacttcctgatctttccaacatgtccttaatcaccttctttggatctcgtatgacggagttatggtcatattggtgagtttattgctgctggtttcgggaagagttgggaacatcagtgcgttggaacttggacctcctcttaatgatgcttgctggccaatct

SEQ ID NO: 201346 - DNA, 386 bp, Zea Mays
aggagctggtcgctggtgatagtcccatccaggatgcagtcaattcattcgacatccagaacgacctcgccatacatactactgcatctcccaaggtatcatcgaagctctcttcagataatgcagtaacttcacttgctagtatgcctgtgttcagtgctatttcgaatctgaataatactctgaatcacaataactcaatcgtggacacaactcaacaaccgcatcaggggttacttcgtgtcgagccccaagtagattcaaatggtaaacatgccgagcaagtctgtaaggtgactgttctacaggacgaaactccagtactctcaattgctgcagcagttaatcggcatagtcaggaggtttgtagtttaccagtggaccct

SEQ ID NO: 201347 - DNA, 271 bp, Zea Mays
ggcgagcaggatagcaccgtcgattctccctgaccgtgactatttcgagccctgagaatagtatcgccatggaaactagaagactacactcaccagagatcccgccggagttgaagctcccaatcccgatcaccgagatcccaagccgcagcatcgtctgagttcatggcggcggcggcgacgttcatcagtgctctggtgatggattccccgacggccacattccctttaccaccgcacggagcctatgccatggaggacgagggtcgcg

SEQ ID NO: 201348 - DNA, 393 bp, Zea Mays
gcgtgacgagactgaggtgcgaccactcactgctaatcctcgactgctcaaccttcaatgggccacggctgcagggtacgtcagttcagacacgtacccgtggactcgtggttgctagctcagagagacccagcggttgcaccactttttagcaccaggacccaggagtccttctttagggcacaattgtttgctcaaattgccctgagagctcaccgacgattagatctcactgatttttgtttagcagtcggtgcagagtcaaagggttgcatcacctatctgctaggtttatactcccttctcaccttcggtggcagatatgttgaggagtgggtcaaagttttctatgccatagtttggatagacccagatcatcagtggatgaggttc

SEQ ID NO: 201349 - DNA, 396 bp, Zea Mays
cggtggggcggagtggccgtgcaacgaggaagcagtcgtccacgtccgcggcgggcaaggagcagagcactaggcgagcggcgcgggacgcataggccagcgagatgcagaggtcacgagggcaggttggtcgcgagcggggagggacacccacgacgcacgaaggcggctacgcacgaggctacaggttggacgatcgggaaggggaggttgcgatggacgatggcagccacaagcgggggatgcgatggctcgagagggcgaggatcgatcaagggatacactgacgacataggcagaacagggagtcagcttaccccgtgcacacaatttacggcgtggggggcgccatccacggcataggatctcaaactgccaaatcggtggggaacgggg

SEQ ID NO: 201350 - DNA, 364 bp, Zea Mays
ggctacgatggacgaatagagacaaagcatggactgggttgcaattaccttgtgataaagcagatgtcgatctatttaatgcatctacgattgtaacaattggtgatggcaaaatggctgatttctcgagatcaagctggatttagggtcaggcgccaaagaacattgcgccaaccttattcatgaaagcaaagaggaaaaatatctcggtgtgccaagcccttacaaacaatcgctgcatgcacttttgttctccttacacacatgaggatgagataaaagaattcatttccctctggcaaggtatcaacagcactcatgaactcaatgatctcgacgatactattttatggaggtggacgac

SEQ ID NO: 201351 - DNA, 278 bp, Zea Mays
ctaggctgctgcaagctgctccctcaacatcaaggtgaattgagccctttctactaacagatgtgccacatcaacgacggcatcagatggaatatgaggtgctgctgcaaacggagggtcataaccgtacatcactttgaaaggagaacaagccagggaagtgtggtatgtggtattgtaccaaaattctgccaaaggcaaccaattcttccatttagtgggttgagcatggactgcgcaccgcaggtacatctccacacatttgttaacccgctcac

SEQ ID NO: 201352 - DNA, 308 bp, Zea Mays
tgcgtccagacaatggatgttttcatgtcgccagttgtttctgtcatttcccttccggacactccatatataactacaggttcagcagatggcactattcatttgtggagttctgctaatttcaggtgactaaaaccatagtatgaaattctgtgagatactagcaaactattttaaatatacatcagtgcctattttatgtatatataacttatttctcatttcttcttatcgagaatttgcccatgagacatattaaccttttctccttaggcttgagagaatacttagccttggtttatgtggcc

SEQ ID NO: 201353 - DNA, 386 bp, Zea Mays
ggacacccttacacaacagcatcggtagcaaaagccttctttgataacattgtccgtctccatgggttgccttactccattgtcagtgatagagatacagtatttactagcacattctggtcagaattgttctagctagcaggagtcaagctgcacatgagttcagctttccacccccaatctgatggacaatcggaagtggtaaatcgaattatcaccatgtatcttcggtgcctggcaggggatagaccaagagagtggctttaatggcttccatgggccgaattctgctacaacacttccttccaaactgctctccgatgctctccatttaaggtggtatatggccgagaacctcctgctcttctgccctatcatccaggaac

SEQ ID NO: 201354 - DNA, 763 bp, Zea Mays
ttgatggtgattgatttggacgtcaccatgtgcgagcggggacggctcgctgatttccgctatttttatttctcacccatgttttccttctccgcgctggattcaggaggtcgttctgccttcgttggatcacgtggagaagaggcgtcgcagtggcgctgacagtggagagcgacaggtctgttggctgttacttttattgaaagcgattgttttctttgtgattttgttttgtttggaatggatagacgttattgcggggggcaccgaaatgatgtctattagttatgtcctgtttaagaccgatcgcgaagtttgaagcgcttcgaaagcctacgtgttctgcaatcagaggcaatgctttgtgggttgcttcctcacctgttagtgctgtaggaacaattattttaactatttttctctccattttgcgcgcatgaagtacaagtgaatctatcgctgaaaattgcttaagcattttgaattgaaggttgcttctgcagttcgtgacagttgcatttctctcaggatgcgccggagaagatccccagaagtagtgcaggaacgattcatcaacgaacaccagagaagaacatctccaaaggcagtgctgcagtcattcatcaacaaacaccggagaagaacatctccaaaggcagtgctggagtcattcatcaacaaacaccagagaagaacatctccaaaggcagtgcaggagtcgttcgtcagcataagcaaattggtagcaacacgacaagggatg

SEQ ID NO: 201355 - DNA, 305 bp, Zea Mays
ggtgggcaataaggggaagctcgacaaaagctaggaaggaaaaactcttgacttgtttcttggtggcagtctcaggttctctaaaatccaataggagaaccagctgtttggtctctctttagattttagcaagagaactgaagctagaagtggggcaaaaaagattgtacgtagcagttaaaagctaatttattccatgtaccttttaaaatatgctgctgattcttatcaaagaattgggcagattcttttgtatgatattcttggacacagaaagtattgatattgtacaatttgtcagtgtt

SEQ ID NO: 201356 - DNA, 329 bp, Zea Mays
ccttcgcacactttctttatcactctttcaagaaggatcacatcggggactactacttgtcagaactctgcagcagcatgccagtaattgatagctatggctatgttgtcaaggaaagaaatagcattatagttcctgccaagggaagcaaatgggttggtttgatgggaacaaacccatggagggatcacggctacattgagttgtcagcagaatacaagtcagcaggacattttgctggaaactatacttctgaagaccagctattggaattcctcaagacaaatttgcaggcttcggatgtgccattcatactcccaccagatgcc

SEQ ID NO: 201357 - DNA, 443 bp, Zea Mays
atcaacggggtgagggtcgtcgcccgggacacccacaaactagcgagtggtttcgatgagctagcgctcgagggtgacgaaggtcgcacactccagctcccaggcacgggcggcagtctacacgcactaatgaatggcggtgagggtagtgaggacatcgttaggagcacgacgttgagaggaagtgagcgccaatgtgtgagtgtagatcgatagggaagggacagagcacgccaagcccctcgcgagagggtaggacccactagctccactcactaggcccaaatatgggaagtgaggagctaaaagctcgacacagagggcagcggtgttgggtaaggagaacgtgggggcgccgccggctcattgagcaagggcggtgggatgaggctactgttgagggccatgtgctggagggaggtggtcgcgctagacattgtggc

SEQ ID NO: 201358 - DNA, 328 bp, Zea Mays
ttctcgtccgacccgcttattcgtgtcggggcagcctgggctcgttttaagcgggccaggctgggcttgttttaagcgggctgggttgggctcgtaatacggggccaaaaaacgtgctctctgggtcgggcttggtggacatctataatgcaaatctttgcaaggagggaaacatgcatgcttcctttggtgatcctataaccccttttgtttatcctggattattccatgtctgcgtatccacttagctcatcatgcagtacgtagtggtggtacggagctcgtctcagccctatcgatttcaagcacaaccgaagcagcttggtta

SEQ ID NO: 201359 - DNA, 534 bp, Zea Mays
cccagcttatcaccaacaaggacgatgctgatcttcaattgatttcaatgtggggtgcaggtggaggcaccgggacgacatccatcataaggaagtgctacagtgatccagagatcatccaaaatttcatatgccgagcctgggtcaacctcagccatccattcaacccccatgagtttgtgcggtctttgatggctcacttttatgcaaacagttgccaagaaagacaaggagggatcatcggtgttgatgtcctaactagcatggatgcgactgccacccagggggatctcctcagcgagttcgttcagctagttgacaagaacaggtaccttgttgtcttggaagacctgcccaccatggcagagtgggactctatcaggacgttccttcccgacagaaagaatggcagctggatcatcgtgtcctcgcagaaatatgaaattgcaagtttatgtgtcggacatccctaccaaatattggacctgaagcagtcctcgcccactgagcactccgtatgtgccttcttgagag

SEQ ID NO: 201360 - DNA, 322 bp, Zea Mays
cagaaaaatagcaaaggagggagagggaagaacgcctggaatactggattattgggggaagaggagaagggctgtgctgacctggacgattggggaagagcctaagaggacaatccggcaggcggcaacagcagacttggataaagtggaaatgcagcagctcccgcttttttccctcctctgtcctctccacagcagctcccaccacttttccctactctcaaatgcagcagcagctcccgagcagataaagtggaaatcccgccactttatttcccgccaccctttttttcccgccacacttcttttccctgcgcagaaa

SEQ ID NO: 201361 - DNA, 334 bp, Zea Mays
cggcaacgagcagtgtggggtcttgtgaacagggagtcacatgggggcattttggtcaaatgtacaaatgctctaatttttagggctcacatggggatgcattttggcgtacactgacagaaagcaaaggaagtggcaaataaggaatataagttaaactggatgatggataaggaaccaaaaagaaatcagtggcaaatagagcactgagttatgtacatatggcggataagatattctctttttatggtgatggaagaatagttctcagataccacctagcgtagcatattaattccagtggttttgatgatattttatcagaatctatagc

SEQ ID NO: 201362 - DNA, 774 bp, Zea Mays
gtccggggacgggagggagaccaatcggagctgatggaggcagcggcggcgctgccgccggagagggatacgtcagcggactggggagatggcgtggtaccgctaggtttccgggtgaaggcatcctctcgcgagtcgccgtcacagaaggcggggaacgtgctggaggccgacctgcgctcccactgggccaccgccaccaacaccaaggaatggatcctccttgagctccaggttcccgtttccatatgcttctagagcttattcttctccctcttctcccattgtagttggggatcgaattcgaattgagtagtcactccccagctgcttgcaggaaccgtgcctcctctcccacatccgcatctacaacaaatccgtcctcgagtgggagctcactgccggactgcgatacaagcccgatgcattcgtcaagttgcgcccccgctgcgaggcccccaagcgcgacgtcgtctaccccgccaaccacaccccttgccgctaccttcgcatttcctgcctgcgcggcaaccccatcgccatcttcttcatccaactctttggcatccccgtgcctggcctcgaacctgagctccagccactgctcagctatttactcccgcaaatcacatcctccaaacaacccctttctcacaacatgcacctccaggttctcttctcttactacttcgtttcttctttcatattcgacccttctgcttcggggttcaccatttcatgagttcctgatgcatttctgctctatccattcta

SEQ ID NO: 201363 - DNA, 327 bp, Zea Mays
gggaagaaggacaagaattcgagagaggaagagaaattatccctcatgtaatcaactttgcatctcgggaaccataatatttgtcaaagaaaagataaacagagtcctgaatcctgtaatgcacaaatccagaagcttatgccatatatggatatatgatgtgtcatcgtaataggcttacatgaggggggaaaaagatggtatgctaagctgagcatatggagtatttaaataagtgcatgacgtatacaaaacttagctttaaacactaatgataattgaataacagatgtacaccatcccaaacctaatgaaacgataagagac

SEQ ID NO: 201364 - DNA, 545 bp, Zea Mays
cttctagcgatgctcctcttgttgcctttgggtcatctgatggtgtcatcagggtcctttcgatgttgacatggaaggttaaatataccctaccctacacccttttcttcattactggtgtgctgcaagtttaaactgagtcatttgatccttgcagcttgtgcgtaggtatacgggtggacataaaggagcaatagcttgcttaatgacgtacatgtctgcagctggtgaggtaaacttttgcataaatatgtcttgtctttgactctggttgcttcattgtggtagttacaattatgttccttttgttgtgttcatatgttgtaattttctattctcatgtttcatttcttaacaatcaattgttgttaattcttctgattttcatttcttcagatattactgtcatatcttccaattaacaatgcattctcttcaggtacatttagtttctggtggcagcgatggcctgctgatattatggagtgctgatcatatccatgactcacgtgagcttgtgcctaaaattagtatgaaggtactgg

SEQ ID NO: 201365 - DNA, 339 bp, Zea Mays
tgaatttcggtcgctagctggcccagccgtcatgctcacttgccgcgcggtcggtcgagattatcatcaccggagttggatgcccgtcgaccgaacgccacgtgcctcagcaattaccacgtcgcaatcaccagtattatgcatgtctgatgatcgccggggaggccgccacggtgaaggccacgaatcaccatgccggtgactcatcttgtttcttaccgatagccatccgccgctcaaattcgtcgtgctcacggtcgatctctataaattgatgcctctgtgagctccgttaggttatccccaagccatagcacccactctcatctccaatcatcc

SEQ ID NO: 201366 - DNA, 392 bp, Zea Mays
accagcagcctcaccatttgcaaaggcagcatgatgcagctattgaacaacttattcaagccaaatttggtcacgggcttcatagggagcaccataatgatatgttggatgttctctcacgttcaaatcagagacaaatgcttcctttagagcagcaaattcttttaggccttcagcatgagcatgaacaacaacttcagtcccaacaattggcaaatgctctgcggcaacattcaggcagggaagaagaaatgcacttaagtggggtctggccaatggatgatgctgcccagtttatccgctcaggaaccagtccaaatcagagacacggttgtttcgatctcctggagaaccttcagagatcgtcatcgtttgatcatcatgaccatcta

SEQ ID NO: 201367 - DNA, 1836 bp, Zea Mays
gttgcctctcgtgcttccccaagagtaggcggggcaggtcggggctcgcgaggttcgcgccgtgcgcgctcccgcacgcgtcgggactatcgtttcgcagccggttgagcgggtccaaggttcgttctcatctgttgctttggatcgacagctgaagtgaattgtcagattaggaatcatgatgccgatttccttagttttggattgagacattgagtgcgataaggactaaagaggtgcttagtgccttacttccatggctaccttttctttgcttgcatgccaatcgtgtgtgatggatgcaacgggcatatcgtcagttcagaacaataaatgcacatattcggattggaatatctgtcctcggcagtacaacattaagtggtagaaccgtgccttttcttatcataaaacaaattaaggttctccccatctctggaatctacagaaggagcaatcacatttgtttttgaatatctggtagcctaatcgttcaatgaacatcaaaattcgaacttagtgagaggtcttgtgcagtagtaccaagtatcatatcattgtaacaagcatcaatttgccaggatagttttcatatctcatcagtatcttgatggtgcagctcaaccattcttgttgtattgatagtgttatttagtttctagggctgtcatatgttcgttccaaattccgatgcacttactcctgtattttttagaaagattagaaggagtgtttttgctaaaaaattaaggaaacaacaaggttacattgtgctccagaatataatctgatctcatgtccatgtcatctttgtgtccttttaagggccctgtagaatgtggacatccttttgctaaatcaattctttgataattttcaggtcaagcctagccatatattgcacgccgctggacctgatgaaccacatgttgcaagtccaacatggtctgatacttcccttgatacacgtgacatggatcatgctattagtaaggaggagcttgaagatgttctcaacactccgcttcctgagcatccgaagctaattcgtggtcaattgaagaatggacttcggtatcttatcttaccaaataaagttccagcaaacaggttagaaaatcttttttctgctcacatctgttagtttttatatatggcaaaggacttcctctgtacaatttcacccttgatttccatacaatgattggaactttgatggttttctgtactttttaatttgattggagttacttgaaagttgacaactatgggtggagtctttaacatctgaactaatgtgaggtgtttatttgatttgttgaacatcagaactgtgtaatagtaaataaatcaagcgacaaatattatcctgatgcccatttcatgctaaatttcatgcaactgtgaagcaaccaaacattgttatgatatacgtgtagaatttgtatattattatggtttcatctagctattttgcaggtttgaggctcacatggaagttcatgttggatcaattgatgaggaggaggatgagcaaggaattgcccatatgattgaacatgtcgcgtttcttggcagtaaaaaacgtgaaaaacttttggggacaggtgcgaggtctaatgcgtatacagacttccaccatacggtgttccatatccactctccaactaaaacaaaggtctttacttttctgtccttatttctttgtggaacttatcagtgtctatttccaatttggaaataagcttatgataatttgtatttggtgaagcccaaatttgttttcttgtttagttgtccttggaaaaaatcatacgtaaatggactgaatgtatt

SEQ ID NO: 201368 - DNA, 412 bp, Zea Mays
tgcagttgtttattttatcagctgtaaggttattaggacatacaatggcgcgtgtagctaggtatgtagggtccatatatctctctaacaaatctgggtagacctcggatatgagggccgcagcagcatcaccatccgtgcgtatcaataaatcttcaggaatcgtaacccatgtaggttcggactcgtctcctcttgtcatggttggcaaagcaccatcgccgatatctaagacccatttgctaaattgttccaagtccgcacgttccttcccatgtaaagacgggttggagagcctcatatttgttcgtagtttcaaaacagttgcatgctgccacaacggtgagctggtaatcgatgcgttcactatggcagaccgtgagcctttgcgcaccacgggtagaatctggcg

SEQ ID NO: 201369 - DNA, 328 bp, Zea Mays
cttaatcatccagatagatgtcccttgtgtgatgaagaatctgagacaatagatcatcttctagtgtgttgtgtcttcactagagaattctggttctttcctttgaggcaattcgggttacagagtttagccccacagccaggctcttctttcatcgttcatgaactggtggcaagaggcttcagaagcagtgaatagtcttatcaagaagggcctcaactctcatcattttgggagcttggataatttggaaccaccgaaacaaatgtgtttttgaaggaaggacacccagcttagcagcagcccttagactagcaggggaggaaag

SEQ ID NO: 201370 - DNA, 1117 bp, Zea Mays
ctggccagggaggtggaaggcatcggaacctactgctgaatgcgttggcttgtatttcttctcagataatatgaggtgtgtgccctaccgtcctacctatggacgattgcttagtttgtcttttctggtacatggtttaaaatgtacttgttgcttttgtagggaactggatcaacttgtgcattatctcaatgatcatagcttagtcctaaaatatgtcgttggctttgccaagctgctgatctccccgtctgttttcctaccagagcaatgccaaagtaagtaccatattgctgatttcacaatgtaatttgcaaatgtcatggatacgatatgagctaagccactgagccaagcaaaaaggtcctgtgttgaatgcagtcacattgcaaaatacaggggtaagacttgcctcggttattcgttagacaccacatgaaccacttatgtcagagccgccaacactggttctgtccatggatatgatgacagtgttcctgttttaaatttgcgaccatgaactttgatgccactgtgccttggtgcaattttgcattatattgcttctactgtccattagcgcacacttaaaaagttctttgccgttgaattcttgtagttttatagttctggcagctttactttgttctatggctaatattttcagcttacttatcaaaccctgtcttttgtagcgttccaagggaaacgctatctgtggggagtgttcaagcgcaggatgaatacggggagaatacatcatgtgaatgcaaagtgacaccctagtccaataaatccatgttgtgaagggtatcgctagctcaaagagacaacagttcgccaagcactgttgatgcctttttgagctgagaccgacccctgtgatcataagcagccccgcgagaactctcccctacccaggctatcgggccttgtcattgtgcggacgtctgaggtcggagcacttcatttgtttgggagctggaaaaatgaaggtgcactggttggtttctctgaacttgtgaaagggttagcgaaggaccgtactgtaatgttcatggcctggaggaatgatgcagcaagtaggatcagaaatcagaactagccagcgacaatc

SEQ ID NO: 201371 - DNA, 349 bp, Zea Mays
cttgctctagagacttgaattattctaacactttaccatttattagagttaaaataatcaaatgaggactaacaagtagactcactaattttcatccaagttatttcgcgcgctagaactaacatacacatttaatcaacgtattcaccacaatcatcaatttcggcatatatgtatatcaacgcgcttttcacccactagttcgtattttaatttagacaccacatgagcatagatttttacccgcgatcataaccatacacatttagactacaacaagcaaatcatcgtgactacaagcttaactaaagtcatctaagagtcggctagctagaacaacgacatcgcc

SEQ ID NO: 201372 - DNA, 312 bp, Zea Mays
aaaaggtgtcttacaaccttaacctatgtttggacagttcactcacgcaatttggctaaattttccatagtctttattttattttgagaggattattggaaacctggtatcacaaaaaggtcattagctagcccaataacgtcttcatccactagttatactctaataccctctagtgtgaatacaatgcccacaatatcatagaaacatcatttgaggtttaaaaggtgatctattgttttgaattctttatattccaactttttagcaactgtatggtagaaaaaagttgccttacaaccttaaactatg

SEQ ID NO: 201373 - DNA, 274 bp, Zea Mays
ttatatgccagacaacagacagctatgctacctacaaatatgaatatatatgctgtgctttgagaatacttcaagcatcaaccacgctttggcaatacactgcatagtatgtacttatgacaaaacagtactgttccaacacccaccacccacctgaacgaatataatccaatcagcttcagtagcccaaaacaaaaggctaactaaaataaatgccaactaaaactagatatcagcaccctacctgccaacagcactaattaataaggtccca

SEQ ID NO: 201374 - DNA, 359 bp, Zea Mays
ctgcgaccttccttcaacggcgcaatccatgcgcaattcccgttcccaccgtatcggcctcgctcgcgcaatccatgtggcctaaccttcaatcaaggctccgggcaaggtttccatcgttggcgaagcaccaacctccatccttctccacgctctcctggaagactatcatccatggtttacggagaaatcacgcctccccagacgtccaccaggggctacaccatgaccccgccccctctcccacaccgccggccagcctccatcgtcgatggaagggcgcgatctccgcaatccgcaggccccttcccccacaaatgccgccatggatggcgggtgcagcggatttcgcctccatc

SEQ ID NO: 201375 - DNA, 283 bp, Zea Mays
caggatgccttagtaatccatcttgtatacgctcctcatcatgccacctcatgtcacttgctatcttagatgacagaaataacctctgaagccttctttttattggaaaataacgaataactttgcatggaaccttgtgtacacgttttccatttaaacttatcctttttgatttccagcgtgacctttcacatgtgggacatgcatcatacttagcatactccttcctaaacaaaatacaatcattttcacatgcaataattttgatatacccgagtcctag

SEQ ID NO: 201376 - DNA, 324 bp, Zea Mays
gctctagctagccgactcgttagatgactttagttaagctcgtagtcacgatgatttgcttgttgtagcctaaatgtgtatgattatggtcgcgggtaaaaatctgtagtgctcatatggtgtctaaactaaaatgcggactagtgggtgaaaagcgcttagatataagtatatgccggatttgatgattgtggtgaatgcgtttgttaactgaatgtggtaattttagtgcactaaataacttggatgaaaattagtgagtctacttgttagtcctcatatgattattttaactctaacaattggtaaagtgttagaataatt

SEQ ID NO: 201377 - DNA, 376 bp, Zea Mays
cattaattgatcttctttctttgtataatttccaagaatatcattacacatggtctctatcaattctaaccattcagtgcatggttctttaaatcttttccgaaacttgaaacggtacggcagacggacaagctcatacttcttcccctcttctctcttcttcggcatcccccagccgccagaagttgggaatgtccggtacaccagatattcttgtaccaaatctctcgtgctgatatgctcagccacgaccctgaaatccacttcagctagctgacaaggagaccccaactgcatgttgcacaggggccgagtcatgccgaagtttaatcgcagcagactcatcaccatgcttataagtttttcccttttcttc

SEQ ID NO: 201378 - DNA, 744 bp, Zea Mays
aaagtatgcatgctgatggattcttttctgattttgatttcttagacaataaggtggaagcaggaatgggctgaaccacaccgtctgttgaagagaagattgcttatgcctcaaaaagaagccgaagttttttttaattcactaggtgataaatttgtatactgtaatgtcgagtggctagtgaaatggaaggatctgggctatgaacatgctacatgggaactcgagtcctcatcctttttatgtactcctgaggccgaggagcttaaaaggagctatgaggaccgctttaaaactgcaagaaaagcatctgatccttcaaaagtagacaaggtatgctatagaaaacatttatttgtattaactggcacactgcaacttcatttgagaagaaagtgattataatctgtgcattttcatcatctagggtatatgctcatccctttgctagtccacaacaatcaacaagctctattagttccaagcaagtttgtatttttctgcaattgtctgtcagtctgtcacattgctttgctaagctgccacacaaataatgagctctattagttccaaacagtccttagattgcttaaagagttcacatttcacaattttcagtgatgctaaactatctatgtgctatacaggctaagggggggatatttcagcaactcgagagactgccagatggttgccctcctggtttagacgatgaccatttgagatcacttaaccagcttcgtg

SEQ ID NO: 201379 - DNA, 679 bp, Zea Mays
catggcgcacagcggcacaagtacagccgcacaggcacacgaaagtgagcgcgcctccgcggtccccgtccacccccagcaccccctctgacgtgcttgccggcgagttgcgtactgggtgaggatcggcttctcatctttctcctccttcatgtgatactacttctccataggtagcaaaaacaattcctccctatttgttcactgtttctgcagtgttcttttggcacttaacttttacaaacttcggatgatgcttggtcattttggccttttgggtacattatgggggtcaggtaggttttggggtcagaaaacggtacacaaatgaaagcaaatgtgataaaagggtgaattcatattgataaggaatgttgtccagcacgagataggagagataatgtcacaaaaaatcctcaagctgaaacaagaatatactgtccagttcatatgggtattacattagatcgagtgacaaggaattattaggtgtttgatctgattcttggacacaatcatgttcttcagccctccgtgctcctggatacttgctgattttggattgtgcttgtagcctcatttgccacaccaaagctcaaccaggatgttcccgtgggagatggacattgatggagagtcgagcaaaactctgggacagatggaagacctggtattgtgc

SEQ ID NO: 201380 - DNA, 401 bp, Zea Mays
tacccgatgaaaattagttaacttacatcaaccacttatacgttcgtcggaagttagcggtataaattcgctggtctgtaccttcccacaaacatccctctcacatgcacttgtgctcttgtgtctgcacctgtgctgacgacactacgtcgtcgtgttgcccaactgctgcatagtcgcacaccccgccacaccgcctgcttgtcaagctcccttgtccaacttgaaaatgagagcaaaataagaggatgtgacagtgtatagcaaacttctatggttcctccttcaagaaatccaggggcaaaacccttgcctaaaaaaatgatgtttcttggagttctagatcgtcaacccactaaaatgaaaggagtgttcatggagaaagaagatggggttggttg

SEQ ID NO: 201381 - DNA, 320 bp, Zea Mays
tgcgttagggaaaacctttttgatagctatcgctacatcatgacagtagtttgtaattattgaatgtggtggtttggcattcatacatcttaaccatgtaccaaaaagccacacataagccccaagagatctaccagcaagcaggccacaacctagtaacactggctgtgcatggtggttagttcccatgaatgacacaaactgcatatcatactgatcgctgaagtttgtgacattaatagcaacaacatcaccaaagtaattgtatgaactgcgtgatttggcgtcagaccaaaagacattccttagttgcccttgct

SEQ ID NO: 201382 - DNA, 2080 bp, Zea Mays
ccaccagccaacacaatagacacaatccaaactcacattttcctcttcgtctgccatcgactcatcgtgtggctctttcattgcggccagcagctccagcctccagcaacggtgagcgaggccccgggacctctcctctctccccgccgccgctgttcttgcaccgaggcaagtgctcctcctcactcgtcccctgctaatctgctatagaccgattagtctgcactgtatatcccttctattccaatccactgttctccagtatttgcggtagattagattaaatgaattcggaacatagctcagggccgtggctataagccatcacttgtagattgatctcaggtgtaccaataccaaccttactttcgtgatcttttcagagaactccaacttttcgcgagttgagggttggccttgggaggaggcggggcaatgggcagcagcacggcggagaagttcaggttctgcattgacaggggcggcacctttactgacatctatgccgaggtacccgggagaagagaaggctacgtcatgaagcttctctccgtcgacccgtcgaactacgacgacgcgcccatcgaagggatcaggaggatcctggaggagttctctggagagaggatcccccggtcggccaagatccccaccggcaggatcgagtggatcaggatgggcaccacggtcgccacgaacgccctcctggagaggaagggcgagaggatcgcgctttgcgtgacaagggggtttagggatttgctccagatcggtaaccaggctcgcccgaacatattcgacctcaaggtgtcaaagccgtcgaatctttacgaggaggtgattgaggtcgacgagcgagttgagctcgttcgggatggtgacagagatgagtcatctgttgaagggatctctggggaactggtgagggtgtcaaaacctgtcgatgtccaagcactgaagcctctgttgaaaggtttgcttgacaaggggatcagatgcttggcagtggtgttgatgcattcgtacacttatcctcaccatgaactcctggttgagaagttagctctggggatgggattcaagcacgtatcattgtcttcgtctctgacaccgatggtccgtgcagtgcctcggggcctgacggcaagcgtggacgcgtatctcacaccagtgatcaaagagtacctatcgggattcatgtcgagatatgaagggggctctgaacaagtgaatgtgctatttatgcagtcagatggaggactagcaccagagaggcgattctctgggcataaagcagtattgtcaggccctgcaggtggcgtggttggctattcgcagaccttatttggacttgagacatccaagccactgattgggtttgacatgggaggtacatccacagatgtcagccgctatgatggaagctatgaacaagttctggagacacagattgctggggctattattcaagctccccagcttgacataaacactgtggctgctggtggcggatcaaagcttaagtttcaatttggcgctttcaaggttgggccagaatctgttggagcacaccctggtccagtttgttaccgaaaaggtggtgagctagcaattaccgatgccaatttgatcctaggaaccgttattcctgaatacttcccatcaatatttggtccgaatgaagacatgcctcttgattatgaggctacaagaaaggcctttgaaaatcttgcacttgaaatcaactctcaccgaaagagtcaggacccatcagcaaaggacatgacaattgaagaggttgcacttgggtttgtcaatgtcgcaaatgagacaatgtgccggcctatacgccaactgactgaaatgaaggggcacgatacaaagaaccatgccctcgcatgctttggtggtgctggtccacaacatgcatgcgcaatggcaaggtctttgggcatgtctgaggtacttgtccaccggtactgtggaatactaagtgcatatgggatgggtcttgctgatgtcattgaggatttgcaagaaccatactctgctgtttataataccgattcttctgcagaag

SEQ ID NO: 201383 - DNA, 295 bp, Zea Mays
ctggcctggcagcccctggctttccctctctgaatgatgccacgtagcagatcaggaaaggagcaagaagacggaccagaggaggcggagggatggagagggatcggggccttcgacggcacatatgggaacgagtacgagatgggaacgggactgtcgagtggtggcggatcgggagcagatgttggcggcggagaagaagcctgaaatattcgtggaggttgagaagagcgcaaacggtatagggccacgcttctctgtgtctcaaatatcctacccttcaagttgggcccca

SEQ ID NO: 201384 - DNA, 288 bp, Zea Mays
cttcttcaagcttcggcataccccacttcctcagcgttgggaatactctattggctaagtattcctggactagatccctagttccaatatgttcagacacaattctaaactcatatacatcatcttggcatggatcccccggtgtcatgttgcactgaggcctagtcagcccgaatattagcttcagtgggctctgaactagcttctctttttcctcatcaattttaacataaaaccattcagacttccaactggtcggccatttagtacgatagctgaccaccggtg

SEQ ID NO: 201385 - DNA, 414 bp, Zea Mays
tgattgaaatattgatcccaatatttgggttcatgtcactcgtattgctggtgcacattttactcctagagaagaggcagtcaagaagactatggatcgaagcaatcatttggtgagcattttgagaaagttacttataatgacttagctcaatcaacatgtaacttctcagaatctaacttaattggtagaggaagatatggttcggtgtaccgagggaagctgaaggaaatggaagtggcagtaaaggtttttgacctggagatgagaggagcagaaagaagcttcttgtcagagtgtgaagcattgagaagcattcaacaccggaatcttatccccatcataactgcttgctcaatagtaggtactttcaaagctttaatttttgagttcatgtctaatggcaacctggac

SEQ ID NO: 201386 - DNA, 680 bp, Zea Mays
ctgcaccgtccacgaatctccaagaaagccatcagcgtctgaaaaaacaatgaactgtgggacctcctccagggacgtgacccgcaccctgagcaaagtcctataaatattgcgtctgtcttcttcccacagaatcagtctgccaaaggagccaatagccacctgcaagtgctctgaagaacggtagtccagagggaatcccaacaacataagccaacattcccggttaaaataaagggccctatggttccaagcatcattgtgccgctgaacagtgaaagtagcatcaagatactgctgcggaccgagcagaacaaggttgtctctttcaagaatgctgctgaactggaccaaaacctgccccaggtgcgaccgctggatatcgcgcaccccaagccgacggtgctccacaaggtattctctaaccacatccctcaccgcggggaaagtaatctcatggtcaggtaaaggttgaatgctgataatagcccagtcctcatgcaaaggcgggagacgccgagagactgacctggccataatatcccggtgaaggaccaccgaagcgctgaagcccggagggaggaagggttcgggatcaacgcgcctaaacgccatctgagcaggaagcgaggatcgacaaccagcagacgaagacggagcaagttggggttttgttgaag

SEQ ID NO: 201387 - DNA, 365 bp, Zea Mays
tccgcacagtagcaggcttcacgacagggctgaaggtctcatcaaaatcaatgtcgggtcgttgcataaatccacggagaacccagcgagccttgtacctttcaagagagccatcagcattaaatttgtgcttgaaaatccacttgccggtcacaatgtttgccccatggggtcgaggtaccagatcccatgtgtgattctgcaatagtgcagcatactcatcttccatggcagctcgccaattaggatcagcaagagcgccacgaaaggtcttcggaattggagatagaggggcggcttggaacaatgttggcacccggaagccagccttggcgcgcgtgaccatgcgatggtggttaatcact

SEQ ID NO: 201388 - DNA, 520 bp, Zea Mays
gggagatcgtgggggattcctttgcgcgggcgtctgggagtgagcgggtgctcctgagatggctgagatcgacgatgaacatgagagcacaggacggagatggcgctagcaggaagagctagatggtgagggctcgctgggtagagaaagcaagggagactgaccctaaagccaagctgggtcagggtaagaagagtgcggcctcctggcagctacttgggccgcaccaaagaaacacagcccatgcgacctatgtcgtcgtcacggcttacacatttttatgaccataccggtcagccaacatagcttctaccggcttataagtcttccttcttcagagaaagcaatcatggtcaaatgctcctgccagtgtcaaattgaggcaactttttgcgcgagcagacgtgggtccggtgtgtgcaaaactaagggtggctgtcacgtgggcgcccgtagtctgcaatgtgggcccaacgtccggagtgtgtcatggcttgcacgataggaatgggaatggggg

SEQ ID NO: 201389 - DNA, 390 bp, Zea Mays
agaaatctttggaaattggagaaaaggcagcggaggaagaagctatagaacagatcttgcctgaaaaagctgccgctcctactcccaaagcgccttccgaagtccttgattatattattcgacacgcttcgggaaaaagattatctgaagaagaaatttttgaagctaaacactacgcccgagaactgaagtacccgaaaggggccttagtgtttaatgacacagatgaagatgacttcttgtattgcctccgagacaacaaagaattatctgtctaccgggagatggccagaagtatgggctttccgaagctcgaagttggcctttgtgccatgacgaaggacgatcttgtggatagccttgcatacaacagtctgaaggtacgaaaat

SEQ ID NO: 201390 - DNA, 478 bp, Zea Mays
ttagtatgcttttggagttgctctaacgtccggttgatgtacatgttttaaggaatttcgcgtgagggaaaaatgggggcatgcctaatgttaatgagttaggccctctttggtagggctctttctctaccagctgcagctttggctttagcttctctggtaaaacaattctctccttataaagagccctagaatgaccaccttgtttggttaggaacatagcttctcttgcagctccttgtttgtgaccctcgccgcgactgtctcctagccagtagccacgacggcaccatcgacgaccgcacgaatgcctccaactccggttgcagggacgccgtcgtcattgattcattgaggttgctgcatctcgtgcgccgtaaaggctagtccacctgtgggagagagcggcgggtgaaagggtttcactttttttaactattctgtgggaccatgttgtgtacgtgagccaagagaagct

SEQ ID NO: 201391 - DNA, 377 bp, Zea Mays
tgactccgcgatacggttgatcggcgaagtcctcttgctttggtgcttgagggtggttggggtggtggatgttttgctgttgatggtgtgggggtgggggtgggggaggtacgattcgtacctcctggtggtgttggtatgcgtggtgcggcggaggcggagcggggccatggttgtatggttgagggggttgctggtatgcgtgcgcgacaattctagggttgtcggctagctgtgctcgtgccattctgtctctggtggccttcgtctctgggcagtcctttgtgggatgcgcgcagtcttcgccgtggaataggcagtaaaatcttcgtggctgctgcgcacgcccccgtcctcgaccgcgagttccatttcct

SEQ ID NO: 201392 - DNA, 440 bp, Zea Mays
gtggaattcagtcatggttgacatttttagggctggttatcctgaggaagctattcttttgtacagaggattgaagttgcgtcagattgacttagatgagaaaactgttacttttggcttgaagagctgcattgaacttcggaatttgttattgggcaaaggaatgcatgcagactcagtaaagcttggcctcagtagggataaatttgttggttcttctcttgttgggttatactctaagcttgccagaatggatgattcacagaaggcatttgaagagattctggacaaggacatcgtttcttacacctcgatgatcactggttattctgaaaatatggattctacttcatggaatgcatttaaaattgttagtgacatgtcgtggagcaacttggaagtaaatcgtgtgactctggttagcttactgcaagttgcgg

SEQ ID NO: 201393 - DNA, 359 bp, Zea Mays
gtgttggatgtggttgcagcggagccttcaccgcgcgcggagggttccgaggaactcccgagcgcgagtactgggtataggcggcgaagggcggtggcgaagcggagagtgagtgaattgtcgcgaagtggtaggcgttatcgtagcaaggtagataaaggtcgtcttcgcgtggacgggactggtaagcgagaattgttgtcctcgccgattggggcaagtgtaggtgagggggagctgcgaaatctgtttgagggtgaggaactgaggataatgctgttcaactacagggagatgggtatcatcccgaaggttgagccaatgtaatatatgatgccctcgttgtgtgtatgtaaccg

SEQ ID NO: 201394 - DNA, 346 bp, Zea Mays
ggagacagctcggtctattgtccctgcaaagaatgagaagaaagaatcctcaggcattggcaagcgagaaactgggaaatctacaaaaaggactggtaattcaatctcttagccctgacacaacatatgcacattgtgtgacttggtgaaaacttatgcacaaaattttccagctcctatagacaaggctaagactgctaaagaggaggccagagagttgctcttgaaggaggaagcatctgtgcgtatgaaggttgggcaagtgcagaaggatctctccttaatgttggatgctcttggcaagttggctattgctaatcctatatttactcatggtcaactgccg

SEQ ID NO: 201395 - DNA, 278 bp, Zea Mays
gtaaagagaaactatcatctgaccctttcctgctagataatgttgttgcagctgattattttgattcacaggctgattatcaacagctggaaaactaccaggactgtgagttaagagctcaagaatttcatcgcatagcactcaacctatgcatgcaacaagaaccaacattagaagggcataatgctggaattgatgctttgctattagccgcagaatgttatgttaatccattttttctattgggattccagtctaatttagagcctctggacaag

SEQ ID NO: 201396 - DNA, 623 bp, Zea Mays
cgattgctgatggtgcacttggctttggaatcaaagaagacgagattacagcactgacaagggatcacaactactctggtctgcagcaatatggaggggtgagctaatcctggttcataatcatctacctcactagttgcctgtgatagcttcatcaaccttataatttcctccgcaggtttctggtgtagcacatatgctaaaaaccgattcggagaagggcattagtggagatgactcagatttgatagcaaggaaaaatacatttggttcaaacacatatcctcgtaagaaaggaagaagttttttggtatgctaaggtttcgtttatgatatagtacttctcttttctctgggttagtcacacctgctgattgaacatcttgtttaggctttcgtatgggatgcttgtaaagacctgacgctaatcatcctcatggttgctgctgctgtttcactggcattgggcataacaacagaggtgggcatcacatctgtagttctgactccctaactgtacaaaattgtcaactgtgttttgtcacactgaaacagttgttttattctttttcccttctgtgggtatcctatttcaaatctatccaacttcatctactttccag

SEQ ID NO: 201397 - DNA, 300 bp, Zea Mays
aataaaagaggggaagttatttaaaaatgcatacaaagtacaaatagaggaagataagagggggaatggttagagcgagcctaatggttaaattctaaatttctcccttctaaacccatgaaccccttttgcaggttgcagcctattccaccaccgacgctgaaggccatacgcccccaatcgaatcgatcacatctatgccgtcgatcaccagaggtgggcgtggggggctcttctccacgcaccggggcgcgctcttgtggctccgccgttgccaaagcccactcttgtcgacactag

SEQ ID NO: 201398 - DNA, 320 bp, Zea Mays
taggcaaaccattctaaacagccctccaagcagtggaccagcaagatctagtcgtttgtttccataatgatctcggtcatcctcagctcttcgactaagagcgcacatcagtaggcggtgaataatatacctgcaaaataaagggtagatcaaccttgctactttcaacagaactttaatttttgcagatgccagctacaagtccacaaggcttgacaaggagaacatacccaaaatagtatgccttcttagtttcacagaattccccaacaccaacatgaggcaacatttccttctgaagtatttcctttgcgtatctg

SEQ ID NO: 201399 - DNA, 361 bp, Zea Mays
gctgtcttttgtaaacattttggtactcttaaactttggttaagggtttaaatcatgaaatgtgcatttgcctaatctttctctcaactaaaggcttcaagagaggggcccaaggttcaatcctcccttgccctaggtgatcattgcctaaaagcttgggtaatactttggtccttggcatttcttaactcactcatgcttccaaggtcttaagtgctccctctcctccaagttttaaccacatgtgataataggtatatgtgccattaggaagccaacaccttggtaacacctggggtgttacactccgtcgcccatggtagggggtctcgggttgtaaagaaacaaaaacgggaggggc

SEQ ID NO: 201400 - DNA, 417 bp, Zea Mays
atcctttgtggtggggagaatacccaaggaagacacatagggtagagcgaggagataatttgtggggtgtagtgggggtgagattaggatagcacttgcagccgaaaacacgaaggtgttcgtacgaggggtgtttgccaagtaaggcgaagtggggtgtgccggaagcaagtgtatttgtgggaaggatattgagaagatatgtggcagtacgagagcagcagcccagaaagtgggagggatgctggcttggaagagaagcgtgcagacgacattattgatggagcgaattatgcattcggccttgctgttttggggggaagtgtaaggacaagacatgcgtaaaagaactccatgggaggagaaaaacttgcgagcgttgaggttgtcgaattcgcgaccattgtcacattggac

SEQ ID NO: 201401 - DNA, 395 bp, Zea Mays
gtcgctgcgtccttggaccgggttgtcagatatatcccctccggattgcctgcccaggaagtggaactctccgtaaccaccgcccatggtgctcactgccgatctatgcgcagcatgagctccaacctgcgtaaccgacagctacatcctgtgctccctcgcgccaccgttatgtgggcccgccctgtcatcatttttccttgctgtgtgctcatctcaacggaatccgccgttctcgcgtggtcagctctcccgtcctcctcgccgcggattccgcgatctcctaggcgtcgtcgcctactctacccgttggggccttgttcaccacgatgttgtgccatgtatgccgccctaaccagctcaccgcagctatatagcatgagccccttgttcat

SEQ ID NO: 201402 - DNA, 326 bp, Zea Mays
gacaagggctgtatggacagacgcgcgtactagtttttttgtgagcactctcagagagttcaattcacctagatatcgtggtcaaaatggttgggtaaaagaaggttggaatgcaatagcagatcgtatgaatgagaaattcaatcaaccaaatttgttgtatcgcaattgaaggatagagaacagaggctcaagaaagattacaatgcggtggcactactcttgttaaagagtggttttggttgggatccaaacttgaagatggttactacaatagatgaaaaatggagcgagctgccagaaaatttgcagaaatttaaggacaa

SEQ ID NO: 201403 - DNA, 649 bp, Zea Mays
ccccatgccccatccccctccacctgccaaaataaatccatgcgctctccagctcggtgctgcaatcccatcaaaagctagggtttcacgcctctcccgacttcacagttcacattcctctcctccccttcccacctccccaactcggccgccgtagacgcggtggcgcacgaactgccctagatttgagcgagccaccctgcgaatcttcacctgacgcacaaagtctgtcagagacagtgaagaattcgaacacgatcttaaacatcgttgattaagaccacacacaaacacatctacctggcttcccccctatcagttgtttttgtgtgtttttttttgctgtttcggacgattcataagaaccgacctgcaaggcttgcagatctaccttgagaaccagggcccttgttttggacgtccagaacgaacccttgaccctgcggatctgcttgatccgttttggatctgcttgtttttttgctggatctggagagaatgttcaagtcgatggtttattacgtgaacacctcaatcggagaggtggaggtgtggcccaagggcgaggcgagcgcgggcctgaccatggcggcgtgggcgcgagaaatccgcgttgaacgcatttccccgcccagcgagcggtgccctc

SEQ ID NO: 201404 - DNA, 329 bp, Zea Mays
tgtttcgaacctagctctgacaagtaaatttgtgtgcatgttctgggctatggacggtgggaacggtgggcataagattaatactagttcgggtggaatgtccctacatccagtcttcggtggctcgcgctatcaacacctttgttgatcaatgcttgtattaggggttataagcagacgagagatggaggagaagctcccaagtctcttgtacggaggaggtggacctaaaggctacagagttggagtcctaactaagccttggctcagcgttggggctccagtctctggctcttcactcctggtccttgtcgatgtgtccctcttcc

SEQ ID NO: 201405 - DNA, 286 bp, Zea Mays
caagaacggaagggtggcaggcccttaggttcttcaaatactgtttgatgtttgtgcaacactgaagaaattattggatccaggtcaactgagaagggagcactattatccgactgaaggagatacaccacgtgcagcatatccaattgatctgataggggcaacacaccttgtagcacaatgtgtttcccttggtatggcatagaaatccatttgtccttccagtggatcttcatagggctgtaagcttccaaccagtccattccgagcaccacatcatacgcag

SEQ ID NO: 201406 - DNA, 278 bp, Zea Mays
gcataacagagagacggagcgaaggtagtgctcaatttaaaggagccaactacgtgcttcgccagtttgagacgaaggcgatcacggaggcggtgagatattccactggacgagttcgtcgttgcacccgccggtacaacggctcaagggcagtgactccttgcttgccacagttatagctacgtggtgaaatggtcacggcgtggcgcaaccacaaaggacagttgccaccacggtgatggtcgccccagccacgtcgccgtgcaagtgggtacgac

SEQ ID NO: 201407 - DNA, 484 bp, Zea Mays
ataccaaaatggttgatcagaacaggatttctgcaaccgcttttgagggggatctgaaagacattaatatgacaaatgatgataaacctggagaaagcatcgaatcgtcacagggaaagccttctcaaacttctgaacctgttggaacagcgacagaaattggaactgaacagccttataaatcagataaagctaattatggaaccaatgatagcagtgaagggcagcatataacagaacaggacaatgaaatgactccaaagcaagtttctgatgatcagtcagtggccaactgtaatgggccttctaaagaaagggagcaatcagcagatgctacaacagaccagaatctacaatctaacacaacaacagaaaaggaaggtgacacaagtcgcacaggtgaagataagactgctcataatgtgaatgatcaaagcacacaagtctctaaaacagaagaatcaaaaccttcccccattactgt

SEQ ID NO: 201408 - DNA, 320 bp, Zea Mays
atccaatctagctcaacggcaagcttccctagtggctagcaaagcttcccaactgctcggaccgaatgttacctcgccggacttgttccgtccgccggttccctcggtccaggtaatctaatcgtccattcttcgattcctcgcatgcgcacactccctgccactcagtgaacctccctgtgtcgtctgattgagctctaccatcgtggtatggctagtagagatatcgccggcgagctccaccgcctggcttcgtggccaaaccagctccgggcaccagagacgccgactcgtacctcgacgtgaccgccagaggctcc

SEQ ID NO: 201409 - DNA, 374 bp, Zea Mays
gcctaaaatagcatcataggcccccagccctagcaccctcatatcattctggtatgtgtgtccgttggcccaccactccagtgatcgcaccattgtgtcactatacataatctctccatttgccaccctcactttacatgaagcacaagggtgcacggtcaggcccattcgatcgaccagctgcttgttaataaagctcgtagaactccccgaatccaccaggaccaacatgacttgattctgcagcaaggcgcgcacaaccatacattcgtcattggtagtaccgctgagagcattcagagacaagcgaaaattctcctcttcccctttttcctccaactcaatctgtgtcaatgtttgctctgataaggtca

SEQ ID NO: 201410 - DNA, 382 bp, Zea Mays
cttcaggagtctacatatgtctctggcaacagcagtggccgacttaagttgggggtggaggacaggtgtcgcaaagaaggcattttcagtgaaacgctttatggtacaacataaatgactgtcataatgttgcatttcaacctggccctctctccttttgatgttccattatttcagtttgtttgaaacttaaaaattttaatgtcaattgcggaattgcctgatatccattctcattttgtttctccctaacttgatcttagcgtgaagattggagactgcctcctatgactccagaaatgatcgagtatgcacgcactgatgctcactatctgttatacattgcaaattgtttggcatcagagctccatgcaaaagcctg

SEQ ID NO: 201411 - DNA, 853 bp, Zea Mays
tggagtcaaaagaccaaggcagcgaaatgccggccgccttgcctggtggcacgctggtcgacgagtcctacgtcgccgctcccaccgagctcaactctctcctgttctcggcgagctcagacttctggccagcagtggcggagctccaaggaacgagcgggttccagatcgagccgtggaagctcgacagcagcgagagcttcgtgcagaggacactgagctacacgaaggccgcaagcaagctggtgaaggccgtgaaagccacggaagagcagaagtacctgaaagcggccgggaactcgtacgcggtgttctccgtcgtcagcactcccgacgtcccctgcgggaactgcttcaaggtggagatactgtactgcgtcacgccgggtccccagctcccgtccgaagagcagacgtgccacctcaccgtgagctggagggtgaacttcgtccagagcacgatgatcaaagggatgatcgagagtggcgccaagcaaggcatggccgaaggtttcgcccagttctccgaggtgctgtcccagaagctcaagacggccgagcttgacgacgccaactccaacaaggagaagattctggcttcgctgcacgcgcagaaggaatcgtgctggcggctggtcgtccgcttcctcgggaacttcacgttcattttctccgtcgccatagcgctctacgtcatagcgcaccttcatctgtccaagcccgacgtgatgcacgggctcgagtattttggcctcgaccttccggactccatcggggaggttgtggtctgcgcggttttgatccttcagggacagaacatcgtcaaggtaacacggcgcttcttgagtgcgtg

SEQ ID NO: 201412 - DNA, 548 bp, Zea Mays
ctttccttatgctgaaagactgcagagtcagatctgatttgtgtgtgctttctacagatgtctgagaacaggcgccgaggtgcaaggcatgctcagccagaacaacagacaccccaggaagagcagctcagcagcagttgccacccccacccccgatgaccattgagcagatgttcctgatgcagacccaagcagtccaagcaattggtcagaccttagcagcaatgcagcagtagcagcagcagccacccccacctcaacttcaggtgcaagtccagatgccacaggtgcccagagacaatcgggcagaattcatgaggggctacccctgtgtctttgcctattctgctgatcccatggacaccgaagattgtctgcgtaccttggaacgtgagttgcacattgctcagtgcaacaatcgtgagaaggtgttgtatggtccccgacagctaaggggagcagcacagccttggtaagagtcttaccttgccacccatccctaccctgaagccatcacttgggaagaattcagggacaacttccgtcgc

SEQ ID NO: 201413 - DNA, 390 bp, Zea Mays
attcgtgctagactcaggcaggatagtaccgggcgggtgaaaagattggagggggagcggatttggtcgcggggtgaagcttatcaacctgtagtcgtgcgacgtggccggaccaccggtgtcgtcgtggaaactccggtgacctcaattatgccacgccatggctatttactgcgcaattgtaactgtggcacacctagacttaccatctcagaaccgctgcaccggtgaacgccacgactgagccaccagtgaccttcttcctctccggccgccagcacgccatgcccaaattaggagacaccgcccttggatactataaattggtgccccagccggctccgctaagtagttgtgcacccagtgaaccaaccctcaccttcaatcgtc

SEQ ID NO: 201414 - DNA, 629 bp, Zea Mays
agaagagcaaatcagtcttatggtacgaggatctccatttttattatgtttttttgtattttttgctgattttttttcatttataggaaggaagcacaaaagatttccaaatattagctggcacccaagatggacaaatatttggtgattctcaggtttgtgcttggatgcattatgtatctacttcatatttttctagcatgttggttaaatttagcactattcatttacaacaatactctggtttaaaatgtctaaactttacatttaatatcctttaaactcctttcagagatttttattacccattatccttttcaactgtattcaatcagctaacaccaattctatgagttcttcaagttatcatgttggttcaagcctggaaaatagggttgttattatttgtctcaatgattttttttcctttccaaatcttaatgctgtgacaattgtttgctcttgtctttgctcatttgattggctatactgtagtttttctgagtttgctaatttctctccatctttgcagttcaaatatatggacattgagttgcatcttgacgatgagattctggagcttattggtccaagcgaatcaatggatggacccgaattttcaattaaag

SEQ ID NO: 201415 - DNA, 800 bp, Zea Mays
gggctacaacattcgctaccagcacgctgggacagcaggccctgcattggttctggttcatgggtttggggcaaacaggtgtgtgccatacactgataaacccgtgtttcagtgtttctgtaccatttctgtctccaaatctgctagcaactgcatttcttgatagcaaagttttccttagctaccggtgcactttccgttggactgctaaggtacacaaatgcatctttttcaaaaacaacaacaacaacaacaaccaggtatgcactatgcagaaatgtagaattggccagcgaaagtagttcgttaaggtctcggttggatgcatgtatccacctcaaaactgcatgtgttggagttgattagagtggaacttagtttaatttacacttcaattcacttcgacacgtgggttgaggtaatcacacggccatcaaaacaagccctaacttagtaggtacttgagaactagttcatttgataaaccagctgttgagctttaagagaatatctgtttacctattacatcgaacattttctgattattttgcttcaaagctactttgaacccatatgagactaaagaaacgctaggcccttactaaccacacatatgtctctcttaaatttattagctacctttcttgcagtgatcgacatattccttttttttcagtgaccattggcggaaaaatatgtctgttctagccatggcacacagggtatatgctatagatctaattggttatggctattctgataagcctaacccacgtgagatcgaagagaacttttatact

SEQ ID NO: 201416 - DNA, 1129 bp, Zea Mays
tgtcattccgtttccatcaacaagctgtcttattgatttcaacaaccatgaagagacagatcgtctttcgagcaatctaagtctttttagtgacttccctattgcagtcacgtttgctgcccttgtgtgatcaaaatctttgacgttgtcaccatcgttattaggttcatggtggggacagctcatcttgctttcacaaacatgactagtagatgccccctggctaccttcgattctagcagctgcaagctgtgcaagactttgtgttttacgaacaacttttgccctacctctagaagtttgcttaacagacttctgtacaggttcaacgttgaaagattcttgtaactttgtccctttcttcacccaccaaatatcctcctcgcctgattgaatcaatggaaacccttggaaaggagtggcgctgtcatccaatttctgccccttggacctcatacaatcctcgcatccacttttggcttccccagtctcaacttgtgtgagcgttgacgttactgattcttgaaagcttgttttgatttcacaaagttttgattccactaggggaggatatgtaaaacccaacagacttgacaaaagagctttaacatcttctacttgttctagcactcttccatgcttatcaccttctgatgcaactggaagatcactctgcttccgaatgcaggaacttgaagtgtactcacctctgccacttgcataaaatgaatgaccacatgaaagttctgagagaacaaggcgtcgctcactagagtatgttgacatcatctcatatagctgttgctcttctgcagtcctagtttcctcaagaacatcaaataaagaagacccaggaagctgcttcaaagttctgtgatgcctcctttttctttcaacatccagcattgtatcgttcttatcagtaattccactaataattagctgcctgacataaacctgagggaaaaatataccattgcggataagctccgcgataagaacatccacccgggtaaaacctgcaacgttgctaacttcatgctgatccaaccaacacacaataatatcatgcagtggaccagggctttcaaagatatcatttgtatccttcttctcatcaacatttttt

SEQ ID NO: 201417 - DNA, 448 bp, Zea Mays
ttcatttcagcaccagatctcgctctatgcagacgacgtggctctcttcctaaaaccagagcctagggacttaaacactgctgtgaggattttggatctgtttggggatgcttcagggttgagaactaatatggcaaagagcagtattgtacccatccgttgcacacatgctgatttgaatttggtccagcagctccttccctgcagatttgagacttttccaattaaatacttgggtctccctctctccctgaagaagttatctaaacctcagcttcagcctcttattgacaaggtggctgatctcttaccggcttggaaagctgacctgatgacccgtgctggcagagctacccaggtgcaatttgtgctcactactactgttatttatcaaatgatggctctggatttgcctaagtgggctattaaagcaattgataaaatccgt

SEQ ID NO: 201418 - DNA, 278 bp, Zea Mays
ctcgggagcttcggtagaaacaagagttggcatatttttagatttcaaaatgacatccaaaataatggccattctccttttctaggagttgttgttgcagcggttgttagcttcggcaaccccgtcatggttgggggactttgcagatttggatgttcttctgtcgttgaactctttgttttcgtctcttctatcggatcgacactagcttccactgtcacgtcaagaattgtctccgaagccaagggggtagcttcgacctgttcagcaatctctat

SEQ ID NO: 201419 - DNA, 378 bp, Zea Mays
atttttagaagcgaattaccgagacctgcacccaagccgccacatgtcgtgcaaaccctagataacccatttggatcgtccacttatgacgcaagacagtccgaatataatgtcggacggtccggccacatagccagacagtccgcgcacggagccggacggtccgcgtatttaaccggacggtctggcacaaagttttttgaggaggatggatatccaactccgtatccgtcccagctagactccccatctcaccatacgacacaccagcaccataatataatctaccaaacccgtgagagtgagtactttccggcccccagaaggccagaaaggaatggccagtcctatgagcctcatagggcatgtattaacgcg

SEQ ID NO: 201420 - DNA, 1195 bp, Zea Mays
cccaaacaagctggacaggcccccacgtctccctggcccagcttctacaatccttggtctgggtccattcaaatgtggcccggaccacggacggcgtcctctacccgcccggtcactcctgcgccggctgcgctagctcctcagctgccccagtccctcctcacgggcatccagggcccctggccagggacacagcagcaaacatgggcgcaccctcaacctcaaccgtggtccgcgccaccaccgagtttccctcagcaggttgttcccatgccatcatgggaccagcaatcgctcgtctccaacttcaacaccatgacgctccagccccctcaacaaaatgagtggtacttcgactccggggcaaccacccacatgtcctctgatgccggtactctctcccattccactcctttacaacacccttttccctcctctattattgtcggtaacgggaattctattccagttacatccacgggtgctgctgttcttacagattctcttcgccttaataatgtccttgtttccccaagtcttattaagaacctcatttctgttcgacagtttacctctgacaataattgttctgtggaatttgatcctcttggttgctctgtgaaggaccttcactctcggagagagatcgtccgatgtgacagctccggtccactctaccctctgcggtttccggcatctaccttccttgcctccaccacttcgtcgctctggcatcaacgcctcgggcaccccggtcgtgaagttttgtccaaattagctcactcagggatttcatgtaataaacctgctagtgatactttatgccatgcttgtcagttgggtcgccacacacgtcttccctttcatgtgtcttcatctcgtgccactacaaattttcagttaatccattgtgacctttggacgtcccctgtcccaagtatttctggttttaaatattaccttgtcatacttgatgattgctctcattatttgtggacatttcctctgcgactcaaatctaacactttttccaccctcaccaattttttctcattcgttcacacccagtttgacgctacaatcagaggaattcaatgcgacaatggccgcgagtttgacaactccagtgcccgcactttttttctcacccatggcgttcacctgcggatgtcttgcccctacacttcacctcaaa

SEQ ID NO: 201421 - DNA, 490 bp, Zea Mays
gtggtggtggtagcggtagcgcgggggcggggcggcgctgcgtgaccgacgccacgggagatgaaggccaaggccctccctttcatcgccttcgagcacaagcggttcgttcccgccccgcttcgcctctagccctctacacgggcgcgcaactctgcctcgtgctggttgctccatgctgttcgaaacttccgcccgtgtgtttcggatatattttgggatttacctgctgcgcggggatctcgatccgggccgaaatgttgggggtccgagtttgggcaatgcagggcctagatctccgcatttctgctgtgatggattgcttttggtatcaaaatgttctaattgtggctttatcacgctagcaggatccgtgtgatgcgaaactgtcgagtttattttttttgtactgtaattattagcatagacgaaatcccaaatttattagtgggccggatgagtttcagcaaaaccgaatcacttgtggctt

SEQ ID NO: 201422 - DNA, 385 bp, Zea Mays
cgccggaagccgctagcttttgtgcaaaagctagtcggggtcaggtacgacgacgacgacgacgagtgagtggcgaacatctctagtgggctgcgaggctagtgtgtggccgtgtgggtggcctccaggtaggcgtagtgtgtcatcgaacaattggcgtttctgaatgtcttctgtgttcttctcctcgctgtggactgtggttgcatcatcgccgccgtagtgccggtctctgcgagactgcgtggaatggaatccgtcgccgtctggccaggcgatcaactgaatcgatctgttccctgacggcagagagaatttcggagtgcgccccatttgtgctcggccagtcagacgacgtgtgtactgggttcagaatcagatgatg

SEQ ID NO: 201423 - DNA, 567 bp, Zea Mays
gtaagttgatttgttgttttgggtaaagttaataaataaatagaggtatggtgatcgtgatgattctcgagcaataagtgatgatttaatagtatcgtttagtattcggtagttgtagattatataaagggtgctcgaagactgtatttgtcgaatatggttaactagatgctatgcacataataattggtaacgatgatttggtgtagaacgttaaggagatgatcgcctctatggttaaaatgtttggtggtaggtcataattggttgtgttagcaacgtggaattatggtaggcatcgtcagtatccatgatgtattagattaagcgttgttatacgataaaactaaaaacgtgaatgtcatatgttgtgttccaattgagttagcccgtagatttaatatgtgtcgttcgcaatgaattattagtagggcctaaatggtgagttatgtgtgaactgtgttagagcccttccgagataaatagatttaacctatgctatgttgtcatgcaaataacctagaaaggtggtatatgttaataattggaaggacagtcgttcaaatt

SEQ ID NO: 201424 - DNA, 436 bp, Zea Mays
gtccgcggggaggtggcggagcttcacggcggggtcgccgtcggtgagctctgggcgaggaattggggtggaggagtggtgtcccgagttcgtggtggtgtggcgaagctgagaggcttgagcaatttcttgatggtccaacggaggggaagggagaagggagggaagggctcaccggggaggaagacgacgacggctcctctgcgaaattggactctggcgagggaggaggatggtggctgaggccggtgcgagggagaaaggagctcgggcgagctttttataggcgctcgggggcgaagggagcggtggaactccctgactccggcgagcttcccggtgtcgccataaatggcgcacagctccgccgaggggacgctacggcgggggcggtaccggcgaggatgatggtcaaggggaggaggacggagcggtg

SEQ ID NO: 201425 - DNA, 541 bp, Zea Mays
tcgcggtttagccggagctctgggctccgatggtgtgtgtttcagtcgccgcatgttaattagtggctccatctgatcacatgttagcagtggtgtggtagagcacggattgtgccttgagaaggaagaagaagataggaagtaggaggaaggcgacgcgtgttcactattgcagtattctgttttttcttaaacgtttacaaagacctgtgcctccttatattggagcactcacaagactcacgctacaacctagttcgggtcactcacacgagtgttgggctggcgcacacgcaagccacgtcgcggcccagtagtcacagattcaggtgtgtcgcgtgcagccatctcctgaacaccatcctctgtagcctgatcaccatcctcagcgctgacatcccccctgggagaaaacctgcttgtccccaagcaggggcaccgggaaacgattgctgtagagccacaaaatcttcccaagttaccaaggaggacgacatactggaccacttgatcagcacctgcaagcggccatcaactccca

SEQ ID NO: 201426 - DNA, 338 bp, Zea Mays
ggcgtacagtacctgggggcggaggcggtggcggattggggctagggttagggttttgggtggggcgctggaggctgcgggtgaagcggaggaggtggtcgttgaggccgttcggcgtaggggcggcggcagggagatggcgatccttggggacggcggtgacgggttcatcgatgtcgtcgtcgtcgagatcgccgcagaggtcgaagggagggggagacgccatctagccgcggagacgcccaagaggcaagaggcaaggggacggaatcgaatcgaggatgcgcagtggggatgggtgctcttcctcgtcggttcacacctctctcacttgccga

SEQ ID NO: 201427 - DNA, 1597 bp, Zea Mays
gcggtggttgggaatatctaatcacccaaatcctggtctgacactgttccactgatagaatcagtatgtccgacgctgagccacctcctgcaatggaggaggccacgctgacaacgccggatgttgtgctaggcgagggatacaaagatatcgagggtcagaaggatggccgaacttgttatggtgaaggtggcgatgttatagtggctgatgagttcgcgggtattgttgaagaccccaaccaacccgatgtttttaaggctaaagagccagaggagggtgttgatgtaggggggcaaactaatgtcattagtgctgctgtgcatgttctcacagaggtggatgctgctgtgtcatcctccacactggtggatgatcccatggaggttggcatgcaaaccaaagaggttagtgctgctgcggatgatctcatagaggtgggtgctgccctggtaccatctgcacaggatcacacagcagtggctgcttgcctggttaatgatgactgcaatatagttatcactggtggtgtgcataggtcggatgaccaaactgttcaggagtttgggggtgactcccttgacgctgatgaggttgctcccttggtaaatgatgtacaagatgacagtgcaaggattgatatggatgttgcagctaatgatcatgtgcatgctcaggatcaggaaagctcacagttggatgtggctacagctctgttaaatgaggtggaaacagagattgccgaagctggagaccatgttgtacaggactgcacaaatatggatatgcagatccaaactggagatgacaaacatgttggcactattgcggacactgccacagatgaggagggcaagcacatgggtgaagataccatgggcagagatggtagtgagaaacatgatggggcagtcggtgttgatgtgtctgatgagagggtagaaatgggtaggggtggactgtctggagatgataacgagcaaaaggaagttgcaacagctgatgaagatcgtgtggaagaggaagacatgcaggtggatgccgtaagcattactggagacatggttgaggaaggcagaattgctgttgaatacattgcaggcgaagctgtaaatggcaaggatggtattgatgtccctgaagaaaagactcctcagatagacaaggctggtaatgatatccctgaagaagagggtctccaaatggggggagctggcttgattggcaataaaaatgggccgaaagaggctgtgatagctgattaccatggagtggaagaaaataccatactgatggaggcagctaccacgactaacaatgatgatgatgatgacaacaaaattgttggtgaagatgttgcagaagctgtcaatgacataactggtgatggtgtccctgaacaagaggctgcacatatggatgacgatgatgacgatgagccacctcctttagtggcaaagaaaggtggagggcgtcgtaagaggggccgtccatcttccaaggtccaggctgtggtgaaaccatctgtaaaggggaaagatgaagaggaggtttgcttcatttgctttgatggtggtgatcttgtgatttgtgatcg

SEQ ID NO: 201428 - DNA, 342 bp, Zea Mays
tgacaggatagctggactgtgtgcaaccggtgctgcctgtgtgtctgtgcatgtccatgtccccctttggcgttggcgatctccttgtctccctgtctgcaagtgcaacactggaagtctgcaatcggtgctggcgtgctgcactgctgcctgtgtcgactgtgtctttgtctgtgtgtgcatgagccatatccctgtctctatttggcattggcgtcttgggctcttggatcttggcgaattgggattggagatgtccctgtctccctgtgagtgtgtgcaaccgataatagcagtagcactactgcagagaacctgaatgtatttttcatgctgccagcc

SEQ ID NO: 201429 - DNA, 559 bp, Zea Mays
ccccctgatctgcttgatctttgcatcaaccctcgcagtgaaaccaatctttgtcttctgcctggccttcgaccgctccctcttccacatcgtctggtcttcaacatctttctttaggtacttgatctcttgaatcacatggtgatcaagtggattgcacgatctctggtaggatatgtgtatcaggtaggggatgttgcaggcagcagtcaccagaagcgtcgctgcccagtatatgggagctggcccaaggacttctaataggatctggtagttgtcgccagacctcaatgtcatcccataggcgaggatgaagagataccaagttgttatgctgccccatacaaagagatgttgaatccatgtgaaatggctcattgttagggcaatctgcatgttgacagcccagatgatgcaggtgaacatggtagttcccaccgcagcaatgtctgcagtctgccccccaacacggattgcctgatcatagaatatgcagagattgaggaagaatatggccagagaggagtagaggccattccccatccatccaaggatccgg

SEQ ID NO: 201430 - DNA, 377 bp, Zea Mays
ctaagagcaactccaagaaggggccctaaatttaggtcctaaattttgttttagggaccaatttattcgtaatttaattggttaactccaacagcagggcctcaaatgtagtgcttagcaactaattctgtttttcggctcgcgcgctctgttttcccgcgcgcgctctgcttcctgcccaaaatcacgattcccagctaccctccctcggatctccctcaaatccctagtgcacacacgaacgtatccatgttctagggcgccgtcgttcttccctacagagggtggcatccatctccgcggaagagggtgcgcagaccatcctgctgcaaaaggccaccgttcttcacgtacgctcgttctctgttctgtcagtg

SEQ ID NO: 201431 - DNA, 493 bp, Zea Mays
ctcgatgtgcttcgttcgcttgtggtggatggggttggcagtcatgtagactgcactgacgttgtcgcagaagacaacggtggcagagggtagctggatgtggagctcctagagtaactgtcgaagccagcagcactcggccacaacatgagccatggcccgatattctgcctcggcgctggagcgggacaccgtggtctggcgcttggaggaccaggaaactagattgtcgccgagatagacgcagaagccggaggtggaccgtcgagagtctggacagcctgcccagtcagcatcagagtaggcagtcagcgtgtcgacagattcggtgccaatgtgaagactcgaggagagagtcccctggacgaagcgtaggatgcgcttgataagcgcacggtgaggctcgtgcggggcgtgcatgaagaggcacacctgctgaacagcatagtctagatcaggacgagtcagcgtcagggactgaagagcccccgcc

SEQ ID NO: 201432 - DNA, 2701 bp, Zea Mays
ctagatcatatatgaaagctcttagtggtgacacagcgggagctttatcaagtggacttgatgaattaatgcgtcatgcaccatcattacgatcctctggagttagcatgtttattgaaatcttgaacactatttttaaagtgtggtgtggtgtagactctatcccctataaggaatctgataattactctgcagttattcccatggatactgatgtggtggttgctacctcacagagtgagggtgtacctcctgaggtaggatgctcaggcgaaacagttgatgctcctttagatgctgtaacatcatcatccattgagttatttcttcctgagtgcatatgcaatgttgctcgcctgcttgaaactgttctgcaaaatgctgatatatgtaggctatttattgagaaaaaaggcatagaagctgttcttcaactgtttaagttgccatcaatacctgtatctgtctcaattggtcagagtatttctgttgcattcaaaaacttctcacctcagcattctgtttctcttgcacgagcagtgtgctcattctttagagaccaccttaaaataaccaatgaactgttgggttcgatctctggaactatgctggttggtagtgaacctgcaaagcaatcagctcttctgaagccactttctacccttgaagggcttttgtctattgccaattttctcctgaagggaactaccattatggtctcagaactggcttttgctgatgccgagatattgaaggaattggggaaggtttatattgaagtcacatggcagatatctttactcagtgattctaaggtggatacgcaagatgcagatcaagatgatttggctgaggaagcttcaatttctgaaagggatagtgatgatgacacaaatacagcaccactttcaagatatatgaatcctgtttcagcaagggcttctatatcaccgtggagcatggagcaagattttgtatcaactgtgcgatctgtttcccacatgcaccaccatggtcgacactcattatcaaggataagtgggcgcctaaatggagtgttgaatgcaacaagtactgatttggatggtccttgttttccagcagagacatcaaggcgtcatgatgctctaaagagaatccctgatgatgttgtttctgaacttctgaagaaattttgttgtaccatgcgttccttcctttctacccttgtcaaaggattaccggctcatcgtcggcctgactctaaccttaacccaaattcgagaagtcttgtgactgcactagctcaatttttccttagtgctcttggtttctctgggcattctactgctggttttgagatgtctttatctgtgaaatgccgttaccttggaaaggttgtggaagacatggctgtgcttacatttgacagtagacgtcgcttatgcaattctgcactcgttaatagcttctatgttaatggaacattcaaggatgttctaacgacctttgaagcaaccagtcagctactgtggacacttcctttctctgtccttgctgctgccacagatcaaggttcctctattaatgagaaggtgtctcacaattcctggctgctggatacgttacagagttactgtaaatttctggaatattatgtgaactccacgttcttattgtctccatcctcttctcataatcggcttcttgtccagcctattgtaactgagctgtcaattaatctattccctgtgccttcagatccagaatcatttgcgcgcatgctccaatctcaagttcttgatgcagttcttcctgtttggaatcatacaatgtttcctgtgtgcaacccagcttttgttacctccctggtgtcaattatgaacaatatatgctctgttgttggagatatgaagcaaagccgcagtagtgttggagttgccaatcagcgtgttactggcccccctcttgatgaatctgctattgctacaattgttgaaatgggattttcaagggctagggcagaagaatctcttagaagtgtgagaactaacagcgtggagatggcaacagattggttattcaaccatccagaagattctgtccaggaagatgtgcagcttgcacaagcgttagctttgtcacttggaagctccattgaaacacccaaggaggatggaagcaataagaatgatacagtcattgctgaagaaaaaggtgtatttgtgcttcctttggatgacatccttactgtatcgaccaagcttttccagtctagtgattccaccttggctttcccattgactgaccttctagcgacactgtgcaaccggaataagagcgaatactgcaagcgagtagtattgtatctttttgagcagttaagacatttttcgtcagatgccacggatatgggtgctttgtattctgttgctcatgtgctggctttgcttctgagtgaagacagtggcatacgtgaaactagtgctgaaaatggtgtcatctcccaagttcttaacatattaggaagtcttaaatcaaggacagaccagacagatcatacttggaattctatcagtgctctgttgcttatattgtataacatgctacaatttaatccaaaactcagtatggaaacaatggatggtatatccaagtcaatttctgatgcatccagtgctgacagcgaggaaaatccattaccaactgctgaacatagaac

SEQ ID NO: 201433 - DNA, 513 bp, Zea Mays
cttgagatgattcttagaggccaggtgtcgaatatcggtgctcctattgcgtattctgcctagaatctgcctccttccaagactttcatcagttttgtgtcaaatcctcctactggtgatagtggtttgggccttagagtgcgaccctctctcgaagaggtcgaggctttggttgtttcgcttggtgaaatccccaatgacgagaggcaggttcattttgagatgcatataaacccgagcgacgcagaaataagtgctatgctggacatgttggctgaggattcctctgattcggtccctgctgaaacactagctgtagcacctatcccagagcctggaaagaccttggacatttaaagatctgatagcactcgcccgaagcgtcctcgccaggccagtcatccaacttctcctgctgacgggaagaaaaagaaaaagagacggcttcggcgagtgtcatgcttgaatcaggatgtcggccttctgctcctgctgccgaggaagtgccagtgg

SEQ ID NO: 201434 - DNA, 429 bp, Zea Mays
atttgttaatctgtgccgatttgagtggcagacaggacatcgggaactagcaactgggctatttcaggcgcagatggagtttagcttatttgcccctcctttgtatctgacaacaagcagtaagcaaaggctctttgaacacttctggaacagtggtggtgccagaattggggaagatggagctcttggatggtctgaatggttagcaaaagacgaggagagtagacaaaagttgtctatgcaagaaaattcacaagagactgaaacaggaggctggagtggttggtttgatccttctctgggtaatactgagacaaatgatttatcaaacaaatcactggaaccatcattgaccgatggaaatgatgctgaagaccttgatgctgaggactcaccagcacaagatgatgttgaatccttgctgaaaaa

SEQ ID NO: 201435 - DNA, 405 bp, Zea Mays
cataaagcataatctggtgatttagacgcttgcaagaagcaagagacgtgtgtgctgttttatctatctagattctagatcgagctatcaagcctattttatcttggaaaacaaggaggagtgtgtgggtgtggctagctactaaacaatccattctcattcctcgttctcaaacaagtaagggtacaacaattaacttgttcttcggcgtgcagctgctgctaggatgaggtgcttccgcatctgctcagtctggtagttggacaggaacttcatgcacataggcggctccaccttgaagatggccagcagcgaagacggcagcgcccagagcccatcgccacagatcaaaccagacgccaccacgaccgacagcaggttcgctgcctgcttgttccttctcct

SEQ ID NO: 201436 - DNA, 341 bp, Zea Mays
ctactgctgctggttgccgctgccactgcccttgcaaaactaggtcttcgtgcacttttgctgcccgtcgccgcgctgctgcttccccggctgttggtgttgcacccaaaactgctggggagacggtgtacaggagcggcagggacctatgcagccggaggacgacgaggaggatgtggaggagacgtggagggaagtggactttaccatcttgccctcctcagccagccgcagttccttgagggcgagcatgttgagggcgccagtgaagtccatggtggcgtcaccagcgatgatgtcgcaggtggtgccgaagcggggattggcgctgtggaggaggt

SEQ ID NO: 201437 - DNA, 645 bp, Zea Mays
ggattggtggcgcaggacgacgggccgcggcggccgccattcgacatcaacctcgccgtcgtgctcgccgggttcgcgtttgaagcctataccagtcctccggtgagcactttgctcccgtcacaacctactcgtccctatccttgaactggactagtccaagccggtggtggaggcaaccgccatggattagcttacgtggcacgattggtcgtcgtatttcacaggcagatgtgggctggcgcgaaactgatgcggctgactgtcagacagtgttcctgtccgagtaagtcctaggcccacccttctttacagagcttggaccaattgttgtagctatatggtgctaattgctaagccgttactgtaaatgttatgaatgatgtacccatgccacaactattgcagtgtgtttcttcgtgaagtatacgatggacggcttgtcgtcaggctgaagaaaggcataaaccttcctgcaatggatccatgggtatgatgatgcgtagttgtgcatgctgctgaatagtcattatatttatattaagccgcattctctagtggatcactacaacgtttttatgtttggagttattaatcaaagtgctacttttctactctaacaattcccttagccaattcttttgt

SEQ ID NO: 201438 - DNA, 695 bp, Zea Mays
ctgttttttttatccaacgactcatcaagatctttcacagccagaagcagctcagagttggattccttcatcttttgaagttgcagacgaagatctgaatttagattcttctcatgactcagatcttgcttcagttcttcaatctgtgaccatgggtcatccccatctgagagccgtttctctgagccatttgaatcatggatcatattctttgcccctctgagtctttcacattctcttctgagtgcatccctctcctccctcaggctactcatctccttgaagagatcttgcccacgccgactctccttcacaatttgctttcggagagtctgcaactccatatctgaaacatccactttcctggttaaagtggctatctcacttcttagcttatctacatcatcctcttcccctcttaaccctgcctcaccagaattgcttgttgacccatccgtactagcatcaggagctgagcttcctgaccagtcaccagaactggtcaatgggttcctcacggtgcgattgttggcaaatggcgagagagcattgctactatcctgaagaaatgagttgtgtgtgcttgcgctaattttgggggtatatcgcccagaacttccatctgaacccgacactgagacggcatcgaaactgctgccattgtggagatggcccactggatcagcagacatagg

SEQ ID NO: 201439 - DNA, 457 bp, Zea Mays
ctgccttgcgtgcttatcgtcgagctcgaggcctgtgtcaacgttgtgcggagaaatggtctcgtgaccaccagtgcccagcaacggttcagctgcatgctttacaagaagtttgggatttatatccaatgggtgatgatgaatctgcagttgtacctgatcagaccaatgataccgaggagcagttgtttgtcgcagtgtcagttgtagctgttcgaggtagtgaatctttacatactataaattttcatggtctaattcaaggcaaagaggccctagtgttggtggatttgggaagctcacattcctttgtgagttctgccctggcatctagtctgacaggcgtcgtcaacatgcccaattctgtgatggtgcaagtagctgatggaagttgtctgccatgttctagtcagttgtttcagagtcttacatattgctgcgtacgatatgattctcg

SEQ ID NO: 201440 - DNA, 287 bp, Zea Mays
tatataatggatctaaagggtggcacctctgggcttgtgtcatgaccggtatcacttctccttgattgaaaccaattagacatcccattcccacaactgtgtgctgaagtaagcctctatgtcagatgaaaactcctcatcccactgaacttcaccatctgtcaactcaacctgcagcacctcatcctcagccccttctttagattcagcgaggtaatcttccacatcttcttcactggtttcatccgcctgtggcatctccctatcagccccatctttgcctccag

SEQ ID NO: 201441 - DNA, 361 bp, Zea Mays
gggcgggtgaaaagattggagggggagcggatttggtcgcggggtgaagcttatcaaccgcgcttgtagccgtgcgacgtggccggaccgccggtgtcatcgtggaaactccgacgacctcaattatgccatgccgtggctctttactgcacagtagtaaccatggcacgcctaggctcaccatctcagaaccgctgcaccggtgaacgccacaactgagccaccagtgaccttcttcctctccgaccgccagcacgccatgccaaaattaggagccacgtcccttggaaacaataaattggtgccccagcctgctccgctaagtaattgtgcacccagtgaaccagccctcacctccaat

SEQ ID NO: 201442 - DNA, 668 bp, Zea Mays
gctggcacagctgtttgaaatgagaccatgataatggtggtgcatcacgctggagctgtccataccaggttcgggcgacccctgtcatgtgatatgaggccagccagaccttctcttatatcgtgcgttggccgtcgaagaactggtcacaccggtttaaccactggatggggtcctcgccatcaaacgtggcaaattctagtcggtggaaacggggaacgccgaccatggatggtgggaatgggttgctaggcatgtgctgtggaatgtttggcatttgtggcagaggtgatggcgagtgcggcaagggcagtaggtggattggcaggggtgtggtggtggttgtgtatgcggcggcggaggtgtggatgggctgcgggggtaaggatccctcagggactagtgtggttggcggcaggccgccgtaccctggcatgccgtaggggcagccagatggaggtgtatcagctgaggttcctggatttttttccatggccgtgacgcgagatgagatggaggacatatgggagttgaactcccccagctggcgctgcatgtcagcgagcatcgtggtgatcgactccaacgatggcgacaccgtggcggaggccaaactatcgccggtgttggaccctggcatctccgataccaggttggtatgatctcta

SEQ ID NO: 201443 - DNA, 1224 bp, Zea Mays
aatggctctgttagactaaggatgtttcttgtctccctcaatgaatgtgaagattcgtcattggacgcaaagagcttggagagtgaaccagagtatcattttgttgttgctgtgaacaatcttgcacatttgggccggagcattagtggcaacaatttaatgagccagccgagccatcaattggatccttctccacactcctttagagactcacctgtctgtcaagccaatacagaagttaaagccaaagattctgttggagcaactctcaatgaatcttcctctcagtttttccttgctccatacacacaacaattggtggtcgagccatcgacaactccgtccccaagtttaagtcagcagaggaccatgaaacaatctaggaagcaaccccctgcagatgaattgacaacaaaccaagaacatgtgagtagaagtgaagtttccagtagctcaaatttgaaaaccatgcttccgaaccatctagataagaagcacaatgatgcggacaagggtattggaactggatctcccttgaaacatcttcacattcgaaggcaggtaaaagattgggctggaaatggtattgacttgattccacataccaactatgatgtttctactccagtggaagcgtccttatattctgaaaaggttatcatgcatccagaaaatgcaggagggacatctgggctgcaggaacatgccggtcaaattctaggcatgccccatgccttctcagatcctttactaaagaatcttaatgacttgcctgcatcgaatttgtcattacctgctggttcttacataacccaatcattttcccagaaaatatgccatactaatgagttggagagaacaataagtaggactgggccagcttttgaatgtgtcaaaccccctgacattgcccgtgcagatgaatcaaattatcttgtttctaatcatattgaccaaaggtacaatcaaggaattattggcccagccagttcacagccaccagtatattaccaagatgaaagtttgtcaagtaatgtgacacaaaaatgccatgatggttatcatgtagttcaacagcaggataagttttttcatcaggataaaagcgcaggtccaattattgctccctggaacaattttgttcaaacagggttaatttacaacgcacatggtgcaaagttgccctcagataatttagatgctctagaaagttcagttccaaag

SEQ ID NO: 201444 - DNA, 309 bp, Zea Mays
cgagaaaagggagtatccgggtgaacgtcgtggaagggatttggttcgccgcgactgggatcaagatgatgatgatgtgtatcagcatggtagaagacatggtcctcgtcgtcatcgtagcctttctggttgggttcgttcgtcgcgttgtcggggtgggactgatgactgcatcagctcgaatggaaaatacagaacttccactcccttcagacgtaatgagatggggatgtcacaatcaaagcgttgggtacctaaattaagagctaaagctgtttcttttgctgacccactgatatctgctgtttg

SEQ ID NO: 201445 - DNA, 542 bp, Zea Mays
gcgctcttgggcggtagtgcgacgtgccacctcctgccgtgatgggacgggggcagcagcactggatgggaccggagcaataggacctgtagaatacatagtaccaacaggcaaagaagtgcaatccaagtccaaaagaaaatcaaagtgggatgaaggtgggttagaaatttcagcaaaaggaaaagaggactcgtcaaaagtaacgtgacgagagatgataattctatttgtagtaagatcaagacatttatatcctttgtgttctaaagggtatccaagaaagacacatacggtggaacgcggagcaagcttatgaggagctgttgccgacaggtttgggtaacacttgcacccaaaaacacgtagatgggaaagatcaaggtggatgcgaaacaaggcaaagtacggtgtagcaaatgatagtgtttttgtggggcgcaagtttagcaagtaggttgctgcacgaagagcctcgacccagtatgtggtaggaagactagcctgaaacataagtgttcgcataatatcatttgtggtgc

SEQ ID NO: 201446 - DNA, 347 bp, Zea Mays
caggatactccatttttgtttgccactgttcctgagtactaaaatttgaaaccagtgttctccacctccttcgctttttgccccttccatcttgtctcatgcacacataggatactaatgtgcctcctgctcgctacatcgactaactctcttagcttacctgtaagggaccctacgttccaactacctacacggatcctagccggctcaactagcttccttaccccttgcacccgttgagacagatgcgaagacccttgcccatttgtcactacacccgggcgccgatgtagcgcgccactaaggaagcgacgacccgatccttgctcacttgacaccgcatccag

SEQ ID NO: 201447 - DNA, 336 bp, Zea Mays
ctgacactggatcctcaagggctagacaataagagccaaagaggaggcgagaggcctcaagggtgccctggaactgcggtggctggatcagctgtgcgaagatatagctgatatagtgagcatatggcagctgttgccgggcacgaagaccatccaatacggtgtcctctatctcacaaatgaggaagtcaacaacatcaaactctgaatgagagatcagggcaccgaggagccagagctggatatgagtacaacctccttgtaactcatccgccacaaaagcgtccgtctcatgagctgatataggtacttggccgctgtagtgaaatcttccgg

SEQ ID NO: 201448 - DNA, 299 bp, Zea Mays
tattcttaatttgcagcaacgcgatgcagtacaatgcacctgatacaatttatttcagacaggtatacagtccctaaaaaactttctgcgcttataataccatgttttgactattggtattgaacatttttgcactatggttgggaatataggctcattccatacaagagctggcaagaaagaagtttcaggaactgagggatgaaggcatacctacagaaaatccgataaagagtgaacagaaaagtagaccaaatttctgcagtggagaacaggttaaaaaacctgttttgaggtat

SEQ ID NO: 201449 - DNA, 515 bp, Zea Mays
gctgatgcatctcagtcacaggaagaagcagtgcaggagaagcatgatcagggattggtagatgaaaacacaaacagaggttcagctgacaatgatgcacttgaatgtggtggagtgaatcctgatgtggccataacaatgtttcatgaaactattcttacaacagaagctgtcaatatagctgggtctaaaatttcgtctgagaaccagcaaaaggaagcaccctttgaagtacactctataacagaagtcgaaggttctgaatcaaatgaatcatcaagaaaggagcctgaaggagctcttgctcttccacaagagcctggcaacctggtaaaagttaaacaagaaagtttggagaatgaaaccgagatgtccatttttagggagaatgacaaagtttctggaaaagatcaggcatcagcagagtttataattgatccttcaaatacggatgaacggagggagaatgatattgggcggcccgatgaatcagcaaaaggctgtgaaaggttaac

SEQ ID NO: 201450 - DNA, 1255 bp, Zea Mays
aattttataccaatctcacaagtacgcgaggacgtggcatctgcctacagaaaagaagaagaatggcgagcgagtaatatgctagttcctttccagaagatgtgtgctcagagaaaggttaggattagcctgcataattgtctaatcgttccacctgcagttagtcttttgttttcagaaccatttgaacttagtatggctgacgaaccatagcgtctttaccctacatcttattaacaggtagaggccgaagctgttttacttgaatcagatgatgttgcttctgctataagcgaagagatagggaaattcaatatttgcaagttagttttaggttcttcatcaaagagcatatttcgaaggtaatttcttaattaccagtatttgtttgaacaaatttttatattactgcatatcattgactagtctgtgcatgagcatatgtatgctgaccagtcctatagtcatactacattattttgattaagtgaactagaagagattgcaagtatgaataagatcaatattgtgaggccagtactaaaattagccacgttatactctacccatactaatttgtagtctataaaacagaactggtcatagtctgttacattaatttacccctgggaccttcttgcttactacgtcctaaccatttatgaagtttaaacagtacttcatgtgtattaatgtaccctctagtgctgatttcttaagtttgaacaaactctatgcaaatatggatgaactaattaagaaaacctagcataaaggctacaaacttttgctggtagttgttctagtataattaagaagtcatgataaaagcatagaagttttgctggtacttcaaataagaaggcatttcttatttgatgccccatccactggcctaagcatctagagggtgctgtacaagtgccttgtacatggcatttataaaaaatggtaaagaaagtaatgcaacgcgaacaaataattagctaaaagagcatcagtactgtaggacagatatgtaaggactaaggactgtactaatgacatgtttcatagccaaccaaaaagactggtgcaataaaatcgaatcgtcgatgatggatccttatgtaaataacactaagaactcgatgcaattagacagcagtttgaaaattatcattatggttaaccgaagtatttataacatgcatcacttttcaggaaactcaaaggaagtaagactgcaaccaaaatatctgagtgcattccaagc

SEQ ID NO: 201451 - DNA, 951 bp, Zea Mays
tctgcatccaatggcaggttatcagaaggtagttattacttataattagtttcatttatttgcgtatattatatgttactagtttgtattgtgttccaccctcatcctactcaaaaactgtcgatgtgattgttttgtcctatgtttaagtgttcaaaagaacagctttaatatatttattttttacatgcaaagaaaccatgtacttactacttagataaaataattaatactcttcattgaatttaaatcattttacagggaagtatatcggaggaagagagatcatcctttactaccaagcaggctagtcttgaaaatgaaatcaaacaattgaaacagcagctcagcaataattctgagaaagaaactgaaattaggaggaggctagaaggtatgcttgatctaagtccaaactgttagatcttaaacagttagcagcctatattaaaattcagtgagctttatttttctaaattttctgtttccacattttagatgaaaccaagcggagtgaatttcttcagcagcaactaaatgagctcaagatggacaaagagagggtaagtttttctacctatgtaggacattcctgtgtatcttgatccactgtcatcaacatgtttaaggtaatagatttgactctatgggtgtgaaaattatttcttatgtacttctgcagatgacaactagcatggaagagctacaaaaggaactgagtgagaagaaatcagagtttagacgtgttcaggatgagcaaagcaaaagggacaaggagcacgtctcggacggatctcttcagagcctaagaaatatgttgatggctttacagaaggagaactctagcctaaaggtctcaatagatcatgcatatactgtaataatagtgctaatacaatgatcatatgtaaatgtcgcaacagattttgacaacataatatttgcttctgc

SEQ ID NO: 201452 - DNA, 489 bp, Zea Mays
gcgggatctcctcgggggggggggggtctccactggtagattctaactggagctcacgtgattcgtcatcggagcttcaagcatgccgtgattccgccgtgttgcgtggctgggggtctctgctgcgccatagccggtatgtcctcctcccgcgtgttagccattgattctgtgtaggttagcacccgattgcgttgagattggggcgttcgggcctaacatggggggatctgaccatggcgccgccgcgcccgtgcttacgttgtcgcgtcggatggctgggtggagaagaagcctcttcgctgtccatcctgggatagacggttgtgataagaagtaggaatattgctttgcaggaaagatcagggccacgtattgagaatcgaacggtgtagattcgatcctgtggatcactatgcactttaaatcctggctgtcggacctaatctgaatggctctggatgcgtcccccttcgtcgtctaatccgg

SEQ ID NO: 201453 - DNA, 382 bp, Zea Mays
aagcatttgaaatctatccttattatacattggcactcaaccaccttgcgaatcattatttctttaccggccaacattttgttgttgaacaattgactgagacggctctttcttcaagcaaccatggactactgaaatcacatgcttactacaacttagccagatcataccacagtaaggtaatatactctttccatgtacatataaaactaatagcggtccttttccttgtttatgttagcattttggattcctttgttaaaaataggcaaccacatttatttatgcatatatttggtattttaataaaatgcagggggacattgagactgctggacgatattacatggcatctgttaatgaaatcagtaaaccacaagac

SEQ ID NO: 201454 - DNA, 540 bp, Zea Mays
ctttggaacacgaaagaattgcacaaggccattgttaatttgaaaactgtgtgggtcagactagcttttcgtcacctttctttgcccgtcctccaatggcagccgtgactcagactagcttattttgatagtgtactagacaggacctttgaaaattgtgtgtcctccgaactttttcatcacctttctttgctcctctaatccaatggcggccgcaagaaccgaaaaggtagcatatgtatgtgcccctacactacaccaacacacgaagagaactacgtagcctacccagcatgtcttcctcgtgcttttcgttccctcagtgctcgtcaaagaatcaccatgcccatgtgaaagggaaaccgatcgaaaccgcaacagatatagctgctgacctgtcacgtaaacttgggcgacggttactcctcggatgccatgccagtgttcacgttcatgccacgcctacaaatcgaccgaccaaggtccaagctgcagctagcgcacgtacaccaccagcaccatgccgccggaggccgcctc

SEQ ID NO: 201455 - DNA, 1459 bp, Zea Mays
caaattttctgtaaaacaacactgtaagttcaccactagactaaacatctgttattataaagtttgtagtggttgataagcactacattaccttgatttgtaacattcccttttattcgtctttttccatacaattgtctcatcttgttgtgacagcatctcccaacaaaggccctcagcgtagtcacgaatggctgtccatttcttttggttttctttgtctcgcaaggccctatgtgtattcaaattcgatgtccatacaaaatatccaccaggcctcaaaagcctgttcacttcaaccaagaaaatgccatctgcagaattacagagaaaaccaacgtttacatatttagtaagactgtaagagatactactttatagccaaattaccataaatgtgtctttgcagaaatcagatgtatgcaaagtttgaagtgacaagggttacaagtcaaccaaaagtcacccacaactgtatatccttaaatatttaatattcagctaggcatgtaccgatctttatatgtgaagtgccaacttaagacattgctgaataacattataatcgtcaatgagggccagggcatgtgaaagaagactttcacacataccgtttttgtaccattcgatattgcatttagcacaatgcaccatatcaaaggaaagatagggatacggaagctgcttcgttgcaaatgaaccaatcattgcaggaatgcctctctccagtgtaatttgcacttggctacctgatgcttcatagttagcaatgcacatggtcaagagatctctctcaaaaagatgcgccccaaaggtaccaaatccacattctatgtcaaggacagtcctaacctgaaaatggcatagcaagaaacaccatcagaaataaaagttactgtaaacataacaattacccaaagacttacttcagccaatcagagcataaagtgatctacatagtatgtccagatgtattttgtatgatgatctttaaaaacaactgtgctttaataatatatcgtagtggagatcctaaggtcctgccaacatacttttgcaggcacaatagtaagctctgatatacactttccagcacattgggcatgcagagtttcccagatttctaaagtaccgccaagtggaaagaccacggcagacaagtgttgctgaataacaaatcatgatgtgaagggtcattttgaagttcctagtggaaaacagacccatgagcaaaagctccttgccttgaacgttgaaccccagaattcattgatgatcaatatatggagaagcttgaatacatatcattatgtgatagagattttgtttgcttatgtcatctgattgggatgataatttgtttatcttaaaattagtaactaatgtctaatacaacttctgattagattggcaaacatcttggactcaacaattcaaaaaaacttcataaacgagtatc

SEQ ID NO: 201456 - DNA, 323 bp, Zea Mays
cacaggagcacccaagaattatggtgccacctagacttcttgacttcatattgacaccatacctcactactcccaaatggactctattggaataccttaaggagcactggataagtaattccatctaacaaatattgcttttattgccatcattcttttttcatgaagactcccaaattgcatcagctagggcagtgaggagaccataccttgttactacctccgttcgcttatatttgtcgctgtgcagttcaattttgaactaagcagcgtcaaataaaaaaaccagagggagtacattccaaatctatgtatgagaggcc

SEQ ID NO: 201457 - DNA, 626 bp, Zea Mays
gtcgctgatcgtcctccacggtgccggtgcaatataaggctttcagctcggccaagctgttgtgtcgaagtggaggcccgaaccgcatgttgatgtactgggcgaagcggcgccatgagaccataccgtagtcgagctcgaagccgtagtaccagtccaatgacgcgccttccaagtgcagggacacgacccacactctgtcgtcgtcgagtgtgcgcatcccacgaaaacatgtttcacacttgttgagccatggaaggggatcagattcgccgtcgaatgatggaaacttcagcttggggcggcgattgtgatcctcatagcaatcacggtcatagaagccgtccctccgatgccgatcgcggccttctggttgccggtcgtggcgccgttggtagccgctaccattggggtctcgattaccgcgtcggtcgtccctatggaagccatcacgtccttcgccccggcgtcctctagtgatgcggcggtcctcccgccaatcgttgtcgagggagtcattggtggcgttgtcggtgttgtcgccggagggccaaccgttgccacgacgtcggtcgtgggtacgatggtcggtcgggaatggagagtaggattgggcaaaaaaaaac

SEQ ID NO: 201458 - DNA, 521 bp, Zea Mays
gctcgttaccatcgtgatcgatctcctgcgctcaatcggcagccgtgctggtcctctctgtgcttctgtagagcaaggcgaatctgccgtgcttgcaaccttgcatcacgacaaacctcgctggccccgtcattattgtaatctaatggtaacgccgaatgcgatgttcttctggagctgacacgcgtagaaaaaaaagggaaaacgggcaggcatatcaaagtagaagagcaggcaagcaacaacacctgggcacgagcacgatagcaccacggtccaacaacagtgcagcggaccggcacgaatggcgcctacggcagcacatcgccactaatcgcacatttgcacggtcgcgcctcacaccagagcacccgtgctgcggatcgcgctggaaaaagcctggtgcagatcgccaccccggatcgaatcagttgtgccatccatccatgatccgtccacgtgacctcaccgaactcaaccaacgatcgggaacgggaatcacccgcctcaacctcacagag

SEQ ID NO: 201459 - DNA, 357 bp, Zea Mays
aacttcattggtggtaatagaaattttgcttgggtctggtctccccctaatggtaggtctggaggcttgctggtagggtttgatgctgacatttttgatgtcagagagaaagaagtgggagaatttatgattcgtattctggtgattcaaaaagaatcaggatttatttggaattttattaatgtttatggggctgctcaaaatgatcaaaaatagaaattccagagtgagttatcctctatgtgctccaaatgctctcatccaatgttgattggtggcgactttaacattcttagaaaagaatcagattaaaacaaacctggtggcaccaataagtggagttccttatttaactct

SEQ ID NO: 201460 - DNA, 587 bp, Zea Mays
atgaaaaaaagaatcgcattttaggaatgattgacgagttagcacaatgcaggttcagaacctttggttatttccaaaataaagacttgcatgtatggctataacaatttatacttttaaaaatggatacttattgagacctgataaccacatttagctagcttagtaggagggagcatgctaactcataatgccttgtaattactgaatactgatgaaccagcggagccatacctcattgacatcctcaagtagctctgacaaacaaattaggggacatgacaaacaaattaggggacactacctctgcgtatctgcacaagggcccaagagaggtggggctcggccataggaatggagctctcagctcccacaccgtgcaccagtgaatgcgagcagctggtctggccttccagtaatccgatctgcatgcagtgtgatccaggattcacgtggataaggatgaaatcaagatagcgctagctaagatcacacgccaatagcacacggaaggaaggaatgagcgagtgaaccttgaggaaaacatcgccgacgggcttctttgtgtggctctccgtcgttggtcc

SEQ ID NO: 201461 - DNA, 369 bp, Zea Mays
gggggctgctcgcataaaatcctagactcagtgaacaatgtatgtggacggcgggttggtttctgagtttcccgagggctcttgtgcaaaatgaactaacgaaagggtacgggtgattctcggccgttggattgaggatgcgcgactccgattagactggccactaccgaacgggtacgaaaccccagccgtcggattctacatctacggctcaggttctatgtaatcgccatcgaatccggtgcgttggttacgtatccaacgccatccaatcaagtctgcccaagcgttaccctgcttctgatcgcaaccgttggtcatccgatcgatggcccgcacgccgtcatcaacccaatgatgctctctctc

SEQ ID NO: 201462 - DNA, 955 bp, Zea Mays
atgaactacagcaagatgctgttggaagtggaactggaatgggtgagggggatggtcaaaagagtgtaagctctgatatagatgatgaatcacaacttggtgacagtaaggttagtgtgttcaagtagatccttcttacttctttttataacaggatgaaacaaatatcccagcctctacactacaaattgagatgtatatgaacgatatatacttttgactgtagcagtttctgtatgcttcattgaagctgatcttttttcgtgttagcaggacttgacatgtaaggcagatcccgctcctaagaacgatgataaagctgttgaaatgcaagacggttttaatgcacaattatctgatgtttctgaggatcttgaaggcaaagactcgggtggcgaagatgaggataccttggataatcagatgggtgatactggtgatgcaagtgaagtggttggcaagaaatcatgggataaggatgaagatgatgatcctaagacatctattgagaaatatgagtcaggctcatcagccaagggaacacaacaggatgatagggaaatgagagctaaggatgatggttctattgaggaggaagatccgatggaaatggattctgaggaaggaaagaataataatcttgaacatgatcctagtacccatgatgaaaccgaactgaatactgatgaagtcatggacaaagctgatgcatatgatgaccggactggacctgaactccctgaaccagagaatgattccattgatgttgacatggtggaacaagaacaaacggatgaaataaatgctgacaatgaagatataggtacagaagaagctgaacaagcagatcagaggttagatgcttcagatgatatggaggaaggagatatggcacaacatagcgatggtgtggtagataatgaaggggagcatgttgaagatgcaaatacagacg

SEQ ID NO: 201463 - DNA, 509 bp, Zea Mays
gcgtgatcttttccccgccctgcatctgcgatctaacggccatcctttgctcaccccgaaacgatgacattgaccagatctacaacgttgcacaccgatccaacggtcatggttccatctgcgaagcagtacgcccttgttccaatctggacgctggtttatggatctacggctaccactcatcttctagctcctgacaccgagtcccgacgaccaacaagagcaccgtggcggcgccaggaccggccacctctaccaactaccatgcaaccccaatgccccaaactcaacgcaatcaggtgctaacctacacagaatcgatggctaacacgcttacacgcgggaggaggacatactggcgagcggtgatggcgcagcagagacccccggccacgcaacacggcggatacatggaggagttcacaccctggttgaccaaattatgggctctcgatcgccaaaccttcacagagagaacccaggtaatgtcctcggggcgcggcgaggct

SEQ ID NO: 201464 - DNA, 361 bp, Zea Mays
gaatgtgaaaaaactttgtattcgcatcaccttctcctaaccatgtgatcctagatctcagccttgccatagtacgtttgaaagaagacagcaacaatgagtgttttttgaggcagttcttgaaccagttttcagctggggagagggctctttcgtcctgtgccatctcaaacctgtgaagcagttcttttgccaaggctaactgcaatctcacatggcccacctgtttgtcactccagccttgaagagatcttgctgttactccgagcttcaaatccaggttttggaatggacacctggtattgtgtaccgaatcccaagcagtctgtaccacctccaggaaaccttccaattttggcca

SEQ ID NO: 201465 - DNA, 580 bp, Zea Mays
gtcctcattttgtgcggcattatagcctgtcagagaggaagttgcagcaacaccgtcgtttgcaataacagtctggcccatgctagctgttccagcctgcatggcggcctgctggtataactcgagggagtgccactgctgggtgttggtgtcgaagtaccaaccagggtactctgcatagaagagcatgttgggtgggtactctgaggcagccccttggccccaacttgagacagcaccggttgcggtagtgccctcctcagcaattgtctcaagccctgaatgcactgaattgtgcagataagaggcgtggagctgctgctgctgctgtgcataccgagtgctgttgtccagcacctgagctgcattcccagttgaatttacactgtcgtcaagctggtaccattgctgggaggcctcatcatacttccacccagggtacatggcctccaaagacatgggatctgctgaatccactgcagtgctgccgccgccctggtcgtgctgaccactgacattatgctgattggaggagttgctcccggcgaagaagtcctggtccgtcacctcggcggccaag

SEQ ID NO: 201466 - DNA, 577 bp, Zea Mays
cgggtatcatccaacccagctcgagcccattttcgtcatcagtattactggttgagaaaaaagatagctcgtggaggttttgtgtggattttaggcacttgaatgcgttgacagtcaagactacatttcctgtacctgtgatagaggaactcttggatgagttgggacatgctgcatggttcaccagtttggacctgaccgccagttaccaccaaattcgtcttcatccatccgatacttacaagacaacatttcaaacccactctgaccactatgaattccgcgtcatggctttcggcttggcaggggcaccgacaactttccaacaggctatgaatgcaatattatcatctttgttgaggcgttgtgtgcttgtatttttggatgatatattggtttacagttcttcctttgaggatcacctacgccatgtgcgtctggttttggaattattgcagcatgaccagtggcaacttaagctctcgaagtgttcttttgctaagcaacaactttcttacccgggacacgttattttagctaatggtgtctcgactgaccctggtaaaatttaggctgt

SEQ ID NO: 201467 - DNA, 474 bp, Zea Mays
cctgctcccggacgccgaccaaactgtacgtgactgtactgtactattcagcatgcgaattagtcgatggatccatcgatcttgacttgacgacgacacatgtggtggtggcgcagaagaagctgagcatccccaccaccgtgtcccgagttctcaagtacatcccggagctgcagaagcaggtggacaacctggagaggaggaagaaggagctgaccaacgccaactgcaagccgggagttctgaaaaccaccaaggccgtaactcccattgtttctgctacctgcctcaacgacacggagatcatggttcaggtcagcctgcacagcgatgtggccgccacagctctccctctctccaagtgcatcaaggtgctagagaacgaaggccttcatctcgtcagctcatcaacctactcctccgcctttgagaacaagacattctacagcctccatcttcaggtgcatcactgct

SEQ ID NO: 201468 - DNA, 357 bp, Zea Mays
gcctgggccgtggatccctggatcaacggttaggatcgtagcgtggtcttataaaatctggtccgtatgtcgcccatccgagggctcggatgcagcactggcatggtcggatctcgagcgtcgatctcggatcggaggaacatgattgcgtaccgattcatgcgttggcgcgtctaatctgggccgtcaattttagatcggatggccgagatttatgcgtaccccttcgccgcaccccttttcttaaagagcccctgcacttttacacaatcagcccgccatccacgcgcggggtgagtatgagtcttggagaaatatacgaaatagcccctggaccttccaggaattgaggcccag

SEQ ID NO: 201469 - DNA, 315 bp, Zea Mays
attctgtgcaggctacacatggctggccatccaagcttctctgctactggagtggagcagtcgacgagagggagaagcaggtcgccatcgcatgggcttcgttggggtagcaggttgttgcagtcttgcggtcttgcctttgccgccgtggcgccgccagttgggagtggataaggaggggtggggcgctagggttattgaacaataacgatgaatgtgggcactgggctgggttgcatgtgcacagtaagttgttgggccagtatgctgcatcccatggcctattaacgaatgcagtgtttagttatttcgggt

SEQ ID NO: 201470 - DNA, 273 bp, Zea Mays
ggcggggcttaccatcaacgatctagcactggtgaggtgtccaaggaggtcggggaggtcacgacggtcacatcgatggtcgactcgtcgctggcggtggtcggagtcggtcggtcctcgtgtgcaggcaggggagctcgtcggctgcgagtgttccggcctaaccacggtggtatagttcaattaaaccgttcagcgagcttcagtgagtgtcagggaagacatgggcgcgagtaatcaaactatggcttatcggtgagtcgtggccacgcg

SEQ ID NO: 201471 - DNA, 338 bp, Zea Mays
cgggggaaggccgatgcaaccaccaaacctggagccaccagttgcccctatcctcgcccgtgtataagtcggtgtcgtccccttccctatggaggtgtggacttgccgagatagttgttgtagtcataaggagagaaacaccacatcaccaccgagggcgaagaaccagccacacggtcgtcctacccttggaactggcattttagacatcgcttgagggtgcaaaagatttccatggccgaatcgtgcggcgactaggcgtggaggacaccggaagtcctcactagactctgtggattcgccgcaggcccgtacttcgccgtggagggtgttcctcg

SEQ ID NO: 201472 - DNA, 367 bp, Zea Mays
taaacaccaacacttaccatggagctcatgccttcactgttccacaagcacaacccaaagggtgccacgaccacgacaccacgatgaatcaggcgactacgtgtctttcactgagaacacggcgaacttcggcgatgacagactgaccatgtgggcaagtgggcacgacagatgagcctgcccagacccctggttcaccctcccccatgatcttttcactccaccgtagaattcgtccttagccgtgcacgaatcacagcattaaacatgaatcatggcacaaggtttgccaccagcgggtttagtgaacctaggatcttgttcagttaccattcccactgaatacccctttctaactgactgatag

SEQ ID NO: 201473 - DNA, 277 bp, Zea Mays
ataaaacctaatcaagatcttgcacacagtgccgctaccttgtgtcatagtccgcaccagtagatgggtaggctatcggtaggatctttccttggcaccatgacgccatctacgctcactatctcactaggtctcactatgccgttgcaacgcggcaatggctgccgcttgctgccgctgccatgtaccgacgcatcatcgtcagccctcgctaaccctcgcatgttgtcacctcaccgtcaccgtttcgcgttggattcattgacatgtgacacgc

SEQ ID NO: 201474 - DNA, 399 bp, Zea Mays
gtctctgtgcatgaagaagtctgatctgagcctatgtagtatcttttgtactccaccgtgtcttgcagaatgtgcgacctctagtattgctggaatgagtgtggaggaggctggaacaaacacctggttgccatgcattattagtccctcctgtgtatgccatggatcccccaagcttccttctttgatctgtgcactgagctgctgcccttcctcgctttgtgcacattcttcttctagatctttgtacagttggaaagtgggtgctgttagagcataatgattcattggttgtatcacggcgcggtaatgcatccgccactgtgttaagtcttcctgccctatattctaccttgaagtcaaatccaaacagtttactaatccaccgatgttgtggta

SEQ ID NO: 201475 - DNA, 317 bp, Zea Mays
atctaatctaacccaccttcttttaacaacccgggcacatgtttttccttcccactactgtaacgctacgtctaatcctctttcatagatgacttcgcccacccccgccaacggaggagacactcgtttcagttctgatttcctttctcacgagggtttcccttccatcttgtgggaggtgctcagctccgtcggttaccctacaccccctatacacggtgcagctatacgaggagcatcgggtgccatgttgccgagtttggctaactctagaggctcgccccctacagccgggttggcgttcccttgactctgag

SEQ ID NO: 201476 - DNA, 1179 bp, Zea Mays
gcggcaagccgcaacaaccttcatcgtgctttgcatcttgtcatccttctacatctgcaaagcgcagttcacgcctgcggacagctaccttgttgactgtgggtcctccaagagcacaatggttggccagaggaccttcacagcggatggcgcatctccggtgaaggtgtccacctcccaggatatacttgcgggcacctcagcaaacggggtggcctcttttgataactcggcgctgtaccagactgcccggatcttcaccgggccatcatcctacactttccctatccagaagcagggccggcatttcgtccggttttacttcttccccttcacctaccagagctatgatctttcacttgccaaatttactgtgtccacccaagatgttctcctgcttagtgacttccagcaaccagacaagaccgcacccttgttcaaggaatactcactgaatatcacccgcgacacgctcgtgatttccttcaagccgtcaaatggaattgcatttgtcaacgcaattgaggtggtctctgtcccagatgatctcatcaccgatgatgcacaaatggtcaaccctgtccagcagtacagtggtttgtctacacagccactggagacagtatatcgggttaacatgggtggtccgaaggtcactcctgacaatgataccctctcgaggacctgggtgactgatctaaagtacttgttgaacccatctgtgaccaaacaggttaattatggcaagcgtgtcaactataagaagggtggaggtggagctactcagctgtcagcccctgatattgtctatggcacagctacagagttggcagcgacaaatacatccaatgctcttttcaacatgacatggcagtttgatgtggatgctggcttcagctatttggtaaggtttcacttctgtgatattgtcagcaaggcacttaaccagctctacttcaatgcatatgttggaggcttttatgcacagaataatcttgatctgtcagcaatgtctgatagtcagttagctacacctatatatatagatgtggttctttcatctaatgatgcatccagcaaacttagcatcagcattggcccatcggtcttgaacaatgtattgcccgacgggattctgaatgggcttgaggttatgaagataagtaccggaggttctgc

SEQ ID NO: 201477 - DNA, 359 bp, Zea Mays
tgatcctgtgaaatcagcctacactgcaactgatgatagagactgttataattgtggtgagaagggacacttgagctataattgtcctcatcctcgtggcagtggtgaacgaggtggtggaactcgtggagccactcgtagtacctatggaagaggtcgtggaggctatggaagggggcgtggtggccgtgccaggggtagaggtcgtggtggccctcgtgttaatgttgcggtcactgaagacactccctcaatcaccctgactggggaacaagctaaacggtgggaagaatggcataaggaaaaagaatctgagtgtccaaccagcactcctcttggttctgtggcaactacatcca

SEQ ID NO: 201478 - DNA, 989 bp, Zea Mays
gttttcagatgcagatgctaaacttggtattttatcttggtaaggatttttttgtctcaatgatattcaagaacagtccacaacatattcactactgagtcgcatgtgagtctgttcgcatctttatttttattggctgattcgtttaaacctcactgtgtacagggcagaatcactgtccctgcatcgctggtctgccaagtattgccctcttttgccacctcctaggtcaactattgcagctgctttcagtccagatggaaaatcacttgcgtccacacagtaagtttattgattcactgtataacaaactgaaatgaaagacacgccaactaactcaatctgttttctcagtggtgaccatactgtgaaaataatggactgccatacagggaaatgtgtgaaggttttgagtggacatcgacgcactccttgggtggtatgtctatcataccagcatatatttttttcttgtgtatttagattagcaccctgtgcttcgagctcttgcaaagaaaggaaactagttatagtgtgattgtcgatttttcagtaatgatctggctagaacattagttttataatttcgtttttcatattatatatttttttacttggtgacaatctggctagttgacagcatttttttatcaaaatgatatttttgatctttctttgcatcccaatattacctcagaagtcagaaatgtaagctgctaacctattgcaggtcaggtaccatcctttacattctgacattctggctagtggaagtttggatcatgaggttcgtctgtgggatgctaatacttcagactgtattggatcacaagacttccgtaatttctctcagaggactccttgcatcctattcataaccaattctgagaaataagtaacttatattatatttgatgttcctctggtagatcggccaattgcgtccattgcatttcatggaagaggagagattctggcagttgcatcag

SEQ ID NO: 201479 - DNA, 312 bp, Zea Mays
aaccatgaggacatatttattttggataccaagtcaaaaattttccagttcaatggttctaactcatgcattcaggagagagcaaaagctcttgaagttgtacagtatatcagagatactttccatgagggcaagtgtgaagttgcaggggttggtaagcaaatacactaatgtactagaatattagatgtcacatttaagaagatgtgttaatttaaatttctcttctagaggatggaaaattgatggctgatgcagaagctggtgaattttgggctttgtttggtggcttcgctcctcttccaaagaaga

SEQ ID NO: 201480 - DNA, 300 bp, Zea Mays
tgctctactggtttgcttagtttgcagtgtgtcaattgtcactattgctaatttgctattcttgctttctctaaactgacacatactagttttgcttggtgtttcattcttcgaagcatgtgcacccataaacaatttcctttgccaaatgcatgttctctgacagttccttgtcatgctatttttatatagttttcatcagcaaaatacatagttgggttttggttttatgcagtttgctaatcttacgatttgtgcctgctaagggaattttggtagaccatgccagtgttgtttatt

SEQ ID NO: 201481 - DNA, 276 bp, Zea Mays
gatgttgtgtataaggtatcatcgccgcacgggagattacttgttcctaacaatgaagactataacttggacccagacacatatgatggagagttcttccaagaagatgggctagaagggcgatttgagatagacttaaccgaatctaatggaatggacatatatatggaaatggttgttgataaggaggatgatgaggtgcaaaatgagaatgacttagtaatccttgaaggcaatgacattaatgacaaaattgcgccttcatatggtgttgac

SEQ ID NO: 201482 - DNA, 602 bp, Zea Mays
ctttcaattcttttctcgtgttgcagattgtgttggttctagtctgcactcgcggagctggtgcggattctggtgaaagcaaaggatcgtttctgcaagactctgaagctggagaaaaggatgtctaccttagccactcctgcatccacgacgagatactacatcaacggcgacgagctgggaggaaggagtactctgtcatgccacaagtgtaccatgagtctcgggaggatgcggagcgtgtaagaggacgacacttgttgggcatgtcatcttggcgtgctccgcacgagaatgccaggaagccaatacgaatatacctcaattatgatgccgtcgggcattcgcccgaccgtgattgtaaaaatgttggcgacatcgtgaaggtcagtttgtcacattagcttttctcattgcaccaccagctattttatctgtgtagtagaattgaaactgttgtttctatttggtagcttggcgaacctcctgtatcatcagcaccaggaacacctatatgcgatcctcatggtgatccaccactggtgggagactgctggtacaattgcacccttgaggacatagctgggaaagacaagaggcaa

SEQ ID NO: 201483 - DNA, 291 bp, Zea Mays
cttgccagttgccacggttactagatggctctataaaatctttgtcctgccatagcatgcagtcctcagatcaatcaaccagcaagtcgccttcttcccatccctctccatcaagcaaaagactgacaggaaagctaaaccccaacaatcaccatgggattcttccaaggcaagacctccaagcagaccacgagggtcaagaagcttctcggactcgccctgtcgcgcctcgccattgcacgccgtccccgccttgctcgcaggtccatctgccgtaacgatgtcggccag

SEQ ID NO: 201484 - DNA, 292 bp, Zea Mays
ttttgaatttcctaagggttgtggactacggacacaaaactccagaagtccagggtctaaactgcgaaaaacagggcctgttggtattgattttataactttaggggacggcgggtttattataacaaaaccgaggggctctttagaaagatctccaggccgaaggggtatcttgcatcctgaaccgcccgatcttctatcagcggctacaattagatcatcattattccgaacaacattcaatacagaccacaggatttgagatctacggcccacagtacgactacatccg

SEQ ID NO: 201485 - DNA, 360 bp, Zea Mays
gatggaggtatggtacttgcagggcgtcgttgtgcttgggatggaggagtggagaggcgctgaatcccttcgccgatggcgcgcctccgttgccctcgtgttgacgtatgatgtgtgtgctgtgtatgcagggtgcccgcgactgcgtgtgctgtgggaaagagacgatgtcgacagggtttagaaagtttactcagtgatgtagccatcgtgggctgaccgggcctaaatggctaaacgaagtgggccaaaatcccaaaatagttcatttgatcgtccatgacctaatcactcgattaatcgtgactgatcggcgattagttggacgaccaacttcctaatcgctctgatcgcgtcgtt

SEQ ID NO: 201486 - DNA, 297 bp, Zea Mays
aaaaggaggatggccagtgttttgaaatccacgaagatgccaagtcctgctactaccgaagcttctgatgacaaaattgaagatgtaagggaagtggccgttgcaagcgcttcttctattcatgttgaagcggggcctttgggagctaagccagtagagatggtgaaggagagtcttccaggaaagccaacatcacatgttcccgaggtaccttctcagggtgatctagactatattgttcgacatgcttcggggaagcaactatccgaagagcaaattgctgaagtgcaacattat

SEQ ID NO: 201487 - DNA, 314 bp, Zea Mays
gtctctcagggccttagcaaagctatatagcaagtggcttcagtcaaacataataagtagcaaacccataacaacacgcatgttgccaagtgggtattagtaagggatagcatgttttcttactggcgtcttagcaggcacgttaagatctatttacgctaaattggtgatctacttacgctaaattggttttttgtttactgcataaatgtatatttttgtttgtcgggatatgaatgtttattctagtactgtataaatgtttattttgttgcttagtcactactactactgcataactgtttattttgctg

SEQ ID NO: 201488 - DNA, 437 bp, Zea Mays
caccgactcaacccgggttaccaacaagaggattcctgctgtggatttggtgagccgactggagatgatcttgagaggcaaagtatcaaatattggtgctcctgttgcatattctgcttggaatctgccaccttctaagtcctttttcaattttgtgtccaatcctcctgttggtgatagtggtttgggtcttaaagtgcgaccctctttcgaagatgttgaggtcctagatgcttcacttggtgatcttcccgatgatgagaggcaagttcacttcgagatgcctccgagtttaggtgatgcagagataagtgctatgctggacatgttggcttgggattcttctgactcgatccctgctgaaacaatggctgttgcaactatcccagagcttgaaaaaaccgtggacacccaaaatcctgagggtactcgcccga

SEQ ID NO: 201489 - DNA, 286 bp, Zea Mays
gctccgggccgcaccgtgccatggctagccccctccacgctctcagcaccggtaagtaacctgcacacgagttcgttatcttcgccccatcgtgtatcaccggttgaatcgtagcttagggcacagaatcatggcaccgtgctctccggcgaggccaccgtcgggtgacgtgaacgcgccaccgctctggagggagggggtcgtgatgtggaagaatgcccgggaccgttcgatctaatgggcggacgcgattaaagcgggtactatcgattcgggcaattggatc

SEQ ID NO: 201490 - DNA, 368 bp, Zea Mays
atgtcattatcaggagcttgctccagtatgccaggaattttctgttagaattcggctcctttagcctatttatggctggcccaattcattttatgaagctaatatggtgtgcagagatggcataggggtttagaaagctaatcggtgcgtagatatggcttaactcctcgcgacggcactgggtgtgccgttgttaacggcgtgttgcattttataatctcgggtgaataagaagaagatcaagatcagatttgtgaacacgcatgtggctttatagttctttctgctgaatgcttggatgtatcctatattcctttcgatggtgatgcttttcttctctcaacatgtatgtgagtcagcttttttac

SEQ ID NO: 201491 - DNA, 425 bp, Zea Mays
ggctttacaaattctacccccctaacagaaatctcgtcctcgagatttgtaagataagggatatagagagattggttgtaatatagcttttagtttctagttggtaccaaaatcaagagattttttttatacaaatgagtaggtgattatgaaggcatgggtatatatgtacaaccaccaaatgtgtaaaacaatgtctttaaagcatggataggttgggtaggacatagtagggtaaggaaggacttcataatgcatagtggatcttgattcctttggaagtatggcttgattcttattattcctcaacgagtttgatctccttcttctcgagtcttgatgtcttcatccgggtttgggacaagaggttaagatagatctgtaggcaacagatgggtagagggtttagtaggtagctatatgat

SEQ ID NO: 201492 - DNA, 447 bp, Zea Mays
cgggtgccaatctttccaagtctgcaaccacggttcgagataactcttttgcacaaagctaacggaagaaataactcaactctgaaagcgctagccagacatgctcatggacatagcctcgaaccatcgcaggaagaatccgttcaattcatatgtggaagtcatgactcttcatccctaagactcgcatagtagataagttcaccccctactcaggttagctgcatacccatcagggaacatcaacatcttgatccactaaagtacttccttcctctaggccctgcttaggacgaaatcggccttaggccttctccacgtctttccgccacttggcggcttcatctctagttttggtctatcacataacgctgccagatccactcttgccttcacattatctgttgacttatcaggaatgtccataattgttgcccatagtgcctc

SEQ ID NO: 201493 - DNA, 306 bp, Zea Mays
tcttgctacggtgttctacgcgggatttgctgtctgtgtttctctttcattgtcttccatgtaggtttgatctacgcgccgccctttcattttggttcctgatgctttcttccatgattccgcttgcggttcgcctgatcggtattgacgaggaggtagtatgatggcgatgacgaaaaactatggttcgctcgtctgatcggcggcggggtttaatccccactgccttgctgagcttaaaagtagtccgagccactcgtttccttcctctgaacccagatctggtccgcttttttccgatatgtg

SEQ ID NO: 201494 - DNA, 427 bp, Zea Mays
aaaaaactacagagtaatgcgattggagaaacgccatccattatccgcaaacaccatcatcaccactttctccagatgtctgcaagcatggactagcttctcctttgcatcttcatgcctttgaagcagcgcccaggaacgacaccagtaggttcccctgtagattacctgcatgtaagttttcgggttatcacgatcaaaaaccacctcattcctgctaagccaaagagcccaaaccaaagccgccacccccatcataattagggatttgtcatgtttactgaaacccatcaaccaattcccaacaacgtgctccatatcccgagggatcggcagaccgaaagcggctaacaacgccctccaaatgaaatgagcgtaatgacactcaaagaacaggtgtctgatcgtttcactattagagcaaaac

SEQ ID NO: 201495 - DNA, 1757 bp, Zea Mays
gccagtaccaaaatgtttttgcgccactgataaaacttgaggctgattatgacaaggtactgtgttctgattaagagatcatgttttttatcttttccatcacaaaactgagttgtgttactgttttatatgttgttgtagatgacgaaagagtcacagagcaaggataatgtaactgtccggtgggatattgggttgaacaagaagcgtgtagcttactttgtctttccaaaggtctgttcaagaagtgaaatatatgggattagtgaattaataccataattgtatagttatctgttgttgatgatgttcggtattgcttcgtgatactctattgtctaacacgggaaacaattatgtattttaggaagacaatgagttgaggcttgtgcctggagatgagctacgcttgagatatcctggtgatagctcacatcccacatggcaatctgtgggacatgtggtaattagaaacctgctgataatcttaattgggccagttttatctttgtggctatgctaaggacatttgttctttcagattaagctcactgcacaagaggaggtggcacttgagcttcgtgcaagtcaggtataaccgtataaggcagtatgatttttctcatgttcctttttagcatccactcagcctattttaacaatttccttgaatttcagggggtgcctactgagctaaacgttggattcagtgttgatttcgtttggaagagtaccagttttgataggatgcaaggagcaatgaaaacttttgctgtggacgagacaagtgtcagtgggtgagtataatatgtgatactgtgcatagggttacgacatatcgttgtcattataatcgaacaaggctctttgatagaaaacaactccatcaaatcctaaaccacttcatatattattagtcggcgagatatttgattgtttctgttacacacactgtttcattggttaactatgtgcatactgaagaatattcttataataagatccattctatctcattctttataattttgttcttctgaagtgtttgtcatagttgtatcactattaacaaagttttactgtctgttctttcacacagatacatataccaccaccttttgggacatgaagttgagcatcaaataatacgtaacaccctaccaagacgctttggtgcacctggacttccagaactaaatgcttcccaggtacattatctctctctctctctctgtctctctctacactcacacatgtgtgtgtattctttgttctatatttcctcttttttttgcttttcatgtcttctaacatggtgcattcatgcctttgattaacatggttgtcttctgttctgggacaatctgtgtatattatatattttaaattttgggtgcagctttgcaaatttgctgctgttatggcctgtgtatgttgttattgattgtttgatctgatgttgtcttctgtattatttattgtgtattcaggttttagcagttaaaagtgtcctgcagaagccagttagtttgattcaaggtccacctggcactggaaaaactgtcacatctggtgcaattgtgtatcacatggccaaacaaggtcaaggacaggtatgggattattagaagtatgttgttcacttgtttgacatggtttagggagaattgtctgacctctaattttgtcaaatttgtaggttcttgtatgtgccccaagtaatgttgctgttgatcagctggcagagaagataagct

SEQ ID NO: 201496 - DNA, 377 bp, Zea Mays
attagagcatttgtattgtatattcaactttgtgtttccagtttgggtagcccccaactactgtttggttttccatgttaatatcgcaatgtcttcacacattcttgaatccttcagctgacaggcaagataagggaactcccaggctgccaagttatcttcgttggcctcacattcagactgatcaagttcatggtctaagtttgagagagataggtggtttcactaagcattgtcgagctccctctgtacgtgcatcttgctatgccatcgcgaagccatccacccttgttgaaaagatgcaaatcataaagagattgagggggcatcaaaatgctgtgtattgtggttcgttgaactttcttgctctcttagct

SEQ ID NO: 201497 - DNA, 349 bp, Zea Mays
caagggcggggtagggaaaacaacactctcggattgaaatggaataagtgaggctaaggaaaataggtaaacatcatggtaaatatggagagaggtcaagggtcaaaggtgataataggcaaggatataaaggaagaggtaaatgtgcataaaaaccaggaatctaggtacaaccaagaatagagttaagataagtcttgcaattggtaaagtataggatatatccacgggtgagataagtaagagaccacgcttgaactaaggtgggagattggaggttttagataacgaacatagtgtaaccgccaaggtaagattgagagatgagaagggtaaaggcaataagaaa

SEQ ID NO: 201498 - DNA, 353 bp, Zea Mays
gggattcatgattatatagggagtatatttattgatgtgacgagtagtttagaaaatgctagttgcgtagaggatgaattattaaaacatgagtatcggagttcatatattagtggttgcgccatattgattgaagtgtctcgagtgcacgccaccatatggttgtatgcgagacgaggttatgcgcatgacgagtttagtaaaaatccatcggtgtcacttgtgttaagttgaagtttatttgtgcgtggaaagtaataatgtgtttaatacttagaactcttagtcgatggtagaaattgtctcggcttaaatagaggggtggtgacatgccaaggtagtcatcatttcct

SEQ ID NO: 201499 - DNA, 469 bp, Zea Mays
agaggtggtattggattagcgcctgaacaaagttgggaggcttggtgggtgagtgaacatgaccacctgaggaatgcaacaattcgaagcttgctcttggagttcatcctttccctgcggttcttgatctatcagtatggtattgtttaccacttgcacatagtgcatggcaacaaaagcttcttggtattctacctacttagaatgtcccttgttttaatcttcattactgaactcagttaacttaatgcttgctttctccaacaggtatatgcactgtcatggctggttatagcagttgctcttgtgtcactaaaggtaacagtcttccgtgttgtagcgcatcttattttgtctgatactgcatttacagctggggtgtgctcccttgttccaggttgtttcaatggggagagagaagtttgttacaaggattcaactagtgttccgcatcctcaagggcattgtg

SEQ ID NO: 201500 - DNA, 389 bp, Zea Mays
tcattccattcatcaaatatctatgtgactcagttttctcgttcatagttgttaaggtaggaatattgtcgttggcatcatttacttcatttccattggggttcatcatctagtcagagggtaaaagagttagtgagacagactgcataagaggcttgcatgacattaagataaagagctaacacaacattttgatttccaagataagattagttaaggatgatttccgattccgcctagcttaatcatattacaagagtgtacaagtgttataatccttaacaaagatcttttgaactttatagattttagagcatgatatccaaatcatctttctgatccagcaatatttctttgagcacaaattgagagaaagacttgagcgagac

SEQ ID NO: 201501 - DNA, 327 bp, Zea Mays
cctcgcgtcctggccacgaagctgatcaacacccgaagacttctgcgactccatggtatactgatgctgcatctccacacctagtgcctgctccactgtagtacggaagtccaccaactgaaaggctcccaaggcatgcctgatagaaggtttcaggccctgacggaactggctcgccttctccatctcattaaaagccacatgagggacaaagcagaccatcttgttgaagcccacttcatactctgtgacagacttcttctcttgcttgaaagactgcaaatcaatcttcattttctccaggaaggtgaccgggtagaacctcct

SEQ ID NO: 201502 - DNA, 379 bp, Zea Mays
ttaacgaggttgatcttgttcttttccggtcttggtctcattgagtcggggtcggtgtatatcattagagttgggggaatatggttaagatagttatggatgagatagactacatgatgtaggtcaaaatttggtttgatgtcaggtgggggttgatagattatgcaatccatcaagactctattggttgtgttagatctcatgcatgtggctgagttggtctaagacactagaagtttcaagtgcatggggggttatggccttatcttttgtaccagcattaagtatcttactttagattagatcataatagattagatgggatctagattagattggtatgactagtttgactagatatgatctaattaatttgcat

SEQ ID NO: 201503 - DNA, 332 bp, Zea Mays
cctaaacaaacccagccctcggagccccgccttcttggcaaaagtggcgcgcacgccttccttgttccgacaaaacccagtgagaaccgcattgtatgtaacgaagttcctctgcggcatccgctcaaacacatccagtgccatgtcaacgagaccaaactccatgtacccattcagcaaaccagtccacgaaatcacgtccttcacgggcatcctctggaaaacgctcaccacgtcctcaacagaggcaccatgctccgcgtagaacccgatgagcgcgttgcccacactcaggtccgtctccagccccgacttgaacgacagagcatgca

SEQ ID NO: 201504 - DNA, 435 bp, Zea Mays
cgcggtgccccagggatccacccgtagtacgaatgtgcgtgaaacagagaggggactaaagcgaacccaatgatgcacgacttaccgtcgatcgggaagtggagggtggccaccaacggcgtcctgcagccctccggtgaatcttcgacaccggcgacaaatcgccatggccccggtcaaccattgctcaaatcaagcaggcgtacatctactgtgtggtctggggattacacgaagccattcattgatgcccaacccgccgtggctcggtgaaggtcggcaaggatttctgcgggtcttgaagattcgccctcgatatggtggcttccggtgcttcggttttgtggatgaagaaaggatgcggcttcgccatttatataccgagaaggagaccgaacgagggcagagccggtggataatttctgtatgaatccc

SEQ ID NO: 201505 - DNA, 280 bp, Zea Mays
tcaaattcccgaaggtcgaagggaagaaatgcaacctgacacagtaacttccaggcagcacactaatggtataccaagttgccgcgttgaagaaacgggcagagctgtaaagcggtccgaatatctcatcagaactgctcttcccgaccagtgacgccgcaagcccagggctgctcaaggtaaaattcccctcaggggttatgtcgccgatccatctccgcccatcagcatcgacagtgctgttcgagccacagctcagaagcaacccgcttccatgagc

SEQ ID NO: 201506 - DNA, 477 bp, Zea Mays
tttttttcctattgatacatgctgattcctggatgctgatttctaaggttgcactaccttaagcaaagtcgatactgcattcagcacactagtgaaaattgttatgaacctcaaagtttagttcttccatataaaacagcaaaatcacagtgaacttatatcagccaaaattttagatcgaatcttatttgtattttgagctacacatgtgtttagtttcagtaaccatccagacatattatactagcatttacacaatatgcatatcactttgtttgtcattcagatggctcctgacatcgactggggtaaaaatatacgcataatattggatgtcggatgcaaaagcgctggctttggtattgctctactcgagaaagatgtgataacactatctttaggccttacaaatgaccaaacagaccttgcgcaagttgcccttgaacgtggcatccctgcaacagttggcagtctggg

SEQ ID NO: 201507 - DNA, 296 bp, Zea Mays
gaactggaaaccttgtgttgtaaagatcttgtgcataatgagtcagtgactaatagcggcacatgttctattgatgacagacatgccatggagaagattcagtagtccctgcgcgtgcactgccttcagcacagccgactctacatagacgtcgacgtcggcgcggcgtgggtggcgcgcacccgggagatggagttccactttcgccccaccaacctggcctagaaccaattgttctgcttgcactgcacctgccccgccgtggtggtcaccttcacggtcaagaaccagcacct

SEQ ID NO: 201508 - DNA, 350 bp, Zea Mays
ccacatggcctggccatcagggtcgtcggccacgtacaccgcgtagtccttgtatatgggcacgcccttctccgacgtcatcccgatcacgtcggcgtcggcctgcgccgtcttgttgttgacgtagatgtcgaacgcccgctggttggcccggctgagcagcagctcgcagaagtggaggcgcgcgacgtaggtgaagttgccgtccaccgccatggtccaggtgaggttgtagttctggttcaggcgagggtcggagcccatggatcgggtgcccaggtacacctccggcggcgcggcgtactcggcgatctcgctggggtacttgatctggaaatgcgggccggccc

SEQ ID NO: 201509 - DNA, 287 bp, Zea Mays
gagatttaggcaagatcaacatctgatacttgagaacgggttatagcagataaccagataacggggcagattcaataggggatctcgagattcggatgataaagccaacatgattcacaagaaaaaggattaccagatccaagcaaaaggagaggtaggcaaacaggatcagctaggatgatcaacagaaatgctatgaagttttaggggcaaagatttatggaaagaaacatggccttgatagggtttgcgcatctagacaccaacaacaatttttttgacacaac

SEQ ID NO: 201510 - DNA, 420 bp, Zea Mays
ctgaggagcttcttatgagtgactcaataattaaggtaatttttccctgtttgtttcttgtgatattcaattattcacctactttgtatctgctttatatgtacaaattattgcgctttaacttgatttctcccccaggtgttcggtgctttgagaatgtctgtaaagatgctcctaatgtggaactccagaatggaaattgatggcggtggagattcgatagttgcaacttctttgttagatgctagcaacctgatagttctgaaggtttcttgttggtccaatattaattactgtttttatctgcttgtctcagtatgcataagtatttctcatatgtttccaggaatcatctgtgatacactctaatgctaatcttggagtccgtggccaaggtgtcctgaatttgtctggggacgg

SEQ ID NO: 201511 - DNA, 387 bp, Zea Mays
ctgagtttggtcaccaagttctttctctttctatgtctggcatgcatgtgaaaaaacttggtgtttgcatccccatccttcaaccaactgattcttgatcttaatcttgccatagtccttttgaatgaggtcaacaacaaggattgctttttaagcttatttttaagccacaattcagcaggagtaaggaagatcctgggcaatctcaaacctgtgcaaaagctcctttgccaaagccaactaggaagtcacatggccaacctgcctatcactccaactctgtagtctcctctcctagaattttctttaagcttcctttgcaaggtcagataaggacaaggagaaggtccaacagaagtccaagcagcctgtacagtatcaaggaat

SEQ ID NO: 201512 - DNA, 274 bp, Zea Mays
ccgagcgcacgcagcagccatgggaggaagaacggctaggcaccggccaacaggggagctcggctggagagcagcgagcaggaacagtcggccatggattgggcgcctggcgagcagacagagggaggaagcgagggcgcttgggggaggagagtgactgcgcgcgcaggaagctctgctggaggagacggaccacatctgggcaccagagacgagcggctgggcgaacagggagggtggtcgagcgccatgggaacaggggctgggcgccgag

SEQ ID NO: 201513 - DNA, 282 bp, Zea Mays
gtgtacaagaagaaacagacctcgccggatgaggcggcaaggaagcgtgagaggatgtctatgcgagagggttgcaatgctatgatggaggtggttagggaggcggaccattgggttgtctccaaacttgagaaggctcacaaccatgagctcggcacttgtagcgccaaggttgggtaccttcgtgcgagaagttctcttggtggctctgataaggccacaatggtggggcctgacgagatggcgtttcttaggcagaatgtcctgggggaaggaggagac

SEQ ID NO: 201514 - DNA, 285 bp, Zea Mays
aaagctgctacacccctaactgtccggcaccccaaggcatgaagggcccagacacttccactattagttacctcaagacacgaggggcaccaaaggcttacaatatcaattgtctcatgtgcaaggggcaccgaaggcttaaactactaggtgcccagaggcgcaagaaaccctagaggttcatacagttagatgccctaagacgtgagtgagcccaaggatttatattgttaagtgccccgagcacaatgggcagcaggggctttgtttgtcaggcgccctgag

SEQ ID NO: 201515 - DNA, 315 bp, Zea Mays
tccttctccagctttgtctgctctcgttgatctgcaggaattgtccatagcaaactttgatcaggctctcgaggatgtggttcctgaagatctgctgtccgagccaacagatggtggtatgatggacgtttgctctgacattccagatgtgggattagagttatcccgagcagcgtctcgtgcatcgtcgaccttggagtgtggtcttcggagtcaagaggctggtcaaggttgttccattcccatggaggtgactgagaatccttcagccttagaggtggctgctgcagagaacccggtccccaaggatggtgc

SEQ ID NO: 201516 - DNA, 595 bp, Zea Mays
ttgacctgcatgtggaggagccgtcggtgctggagggggatgtgccttcgtccccgcgcacggtgatctaccctgtttcgatcctggtgtctcaccctgaccggtcgtcgttggtgccccctaccccaccttctccgccgtttccgggcggccgcgacgatggccgggatcgcgactcgggttccaggcagaagcgtcgtctcagctgccggccccagtcgtcttcggttcgtgcttcggttctctcgcgcctggggccgcgcgtccattcaagccgcgacgatggcgggggtcgtgactctggttccatgcagacgcgtcattgcggcttccagcaccagtcgtcttcggttcgcgcttcggttctctcgcgcctggagccacgtgacaactcaaattcagatttttgcgggccagtcgatgccctagccttcccggtttctccggtcgatgggctggcggcgcctgtgcctgcaatctcctcccgggaggcggatgatgcttcgtttctgaggcctgtcggaccagttgatgcgtcagctcccccaaccttttcggtctctgagctggcagcgcctgtgtcttccaaggcctt

SEQ ID NO: 201517 - DNA, 368 bp, Zea Mays
cctccctcccctcccatgcttcgactacaccgccgcgctcgaccgtgccgtgcacctctcgacctcgctcaacgccgccgcgcccgacaagacggacgccattctcgcccaggcccggttcctcttccgctgcgcatccaagtggtcgctcaccacggggcggtttccacttcccctcgtcgcggctctgctcgccttctctgcggaggtgaacggggtcacttctgtctctttggaggacattgcaagggacatctcggcaggattgaggaccagcctgctccgatacaaggagctcgttgacgccctggtgcatgtcgcggggcacctgcttccatggggtgccgatgtcaatgccaagaacctgc

SEQ ID NO: 201518 - DNA, 424 bp, Zea Mays
gtctaatttctcaaatgaatcttggcgccgaggaaaccaacctcgcactgcctctggtgccacatttatgagccaatctggccatccaggttttgcatgttcatctaataataatggcctagcttcatggggcatacccaattctaacttattcccatattttcccattattccattatgcccgctgctgatccatattttcagtctatggtgcatgcttgatttcgtatggtggccaacagctgaaactgaagtctctgcattgtccaacttgtaactaggagcaagaaccttttcttctacctgagaagtatttccaccattggcacttgctacatttgcagtatcattactagtagatggtgtgaagaaccattgccaacatgtgcatccagtggtttggcttcctgaagttgtgtcatca

SEQ ID NO: 201519 - DNA, 716 bp, Zea Mays
cacagtttggtcaccctattcgtgctctccagtgcgacaatggtctcgagttcaaccactcctgctccttcctttctcacggtgttaagctgcttgcgcccttacacttcccctcaaaatggtcgagcaaatctcatgatttctactaccatcaatatgatgtgttggctccttttccaggcgtctcttcctgccagataataggtgatggcgctgaataccgccaactatctcctcaatcgtctgtcctccaagactgtctatcaccctactccctcattcgccctcttagccatcgcatgattctatacacacctctgcgtctttggttgtgcttgctatcctaatacctctaccaccgctccccacaaactcatgctttgatacactagttgtcttttcctcgggtacacctatgatcacaaggggtaaaggtgcctcgatctcctcaccccctgcatcatcatatcttgccatgtggttttgatgaagacgtttttcccttgttggctcctccccacatcccgacttagactctcgattctgatcccgccgacatccctccttttcctttacgtctagtcccggcgacctttcacgtgccatgcatggcaccgtcacctccgatcgcccctcgtgtgaccccgtcgcccccaaccatgccatgtgcggccccattagctcacgccacccatggccctgtcccctgcacccat

SEQ ID NO: 201520 - DNA, 390 bp, Zea Mays
ttcgcggcaacgaaatcgctcgacggaacgacctccgagctgcgcggtgccgttgcggagttcctcgggttgacctcctggggtccatatagttggccctcgggctataccagaccagtcgtgcccccacgttgccgccaccatagccagtacgagcagagggtgccgccgttggtgattaccgtctccattgccgcaccgccatcggaattcggggccgggacttcgcctctccgtgtggtgtgcttgcgcggtgtcgcggtgatcggagagccaacagggccgagcaatttctcgccgtagtacttcaccgccgcggcagccgcggaatcacggggtccggcttcgtcgtcgcttcaacccttcggtatggccttcaaccacctttac

SEQ ID NO: 201521 - DNA, 435 bp, Zea Mays
cagaaatcatgacggcaccgatggatgctatcaactacctgtttaaacatattaaacttacttctcgcttcgccactacaccaccctttagtcacatgaccatcgggagcatgcttcacacgattatacaatagcaacctacacgtcgggttacacaatacatacctcttttcttcgtcgcgagtataaccacattacggcatatacccgcacacctcaatcaattatcttacgccaccactactacattacaccacagcacactcgtacatacatgtccccactgccttctcatgcccaattttagcacaattatttatgacaacgtttatcgactagacaagtgaaacactaaccgatcattcgcacatctcgcctttaaaacatgaatcacatgtcacataatttatattttcaacccacactatcctacgc

SEQ ID NO: 201522 - DNA, 364 bp, Zea Mays
tttccctcaaaaaacggcacgtcaagaagatgacattcaggcattgttgccaaacaagaatacaagatgagcggagaattgaatctaaaatggcaagacaaggggaatttactttgcgagtgctagtagggtaataaagataaatgaacgaatgctatcgatcgaaaactagccttcttttcctttttcaatttccattagcatggcggagtaaatcgattgaacacttaccgcgagaagatgagaagagcggttctcgatctcgccgatcatatccctcgcggcggcggcacccccactggcgccagcttcggcggcagcggcggcgtccctagacctggagtccctccgcattagcgagtgg

SEQ ID NO: 201523 - DNA, 400 bp, Zea Mays
gtaggaaatatcgcccagggatgaacttcaaccgctattttactccggccgccgtaccctagcgtgtcgcgaccgccttggataggttcgccggagatagcctcttcgcggccttgcgccatgtgccttggcacattaacctcactgccgtgactcacgttagctcgtctggtggtcgctggggtgcttgccacggtaataggccacgaatcaccgcgccagtaaccttcttcttcttcggctgccgcgcgtctctctcaaattcaccggccaccgctgtggggagcctataaagtgccgacctcacctgctccggtaagtaattgtgcacccagcagagctaccagtgcatcgaatcatccactagaactccccaatttgggattacccccaaatcaac

SEQ ID NO: 201524 - DNA, 834 bp, Zea Mays
atgacactgcatttgagaagcaaagttcgttatttgcacttgcaatttcagacatagttctaattaacatgtgagtcaccctgtatgatattgttacgagttccccttagacttatttgttgaacctttagttatcacactacatacttaattttatctctatgtttatgtgtacaggtggtgccatgatattggccgtgaacaagctgccaataaaccacttctaaagactgtatttcaggtaccgaggttaaatctgtctttcagggataccttatgcacatatgatatacatatagtcctgatcatctgatgtatagtaacacttggacatctgagtatgtaggtcatgatgcgtttgtttagtcctcggaagacaacactactatttgttatacgtgataaaaccagggtttgcctctcctttattatattgcattcttgaatatttgttccattcacttaagcaaatcttagacacgtcattgttttcatgtagactccacttgaacatctagaaccagttctaagggaggatattcaaaaggtgctggcattctttctttttctttcatattttcttactagctttagcttgctggcttcctccagttctaatattttcatagatttgatcagatatggaattctgttgccaagccagaggcacacaaagacacccctatcagtgaatttttcaatgtaagctatatatttttgttgtacaaacttttaaaagaatatcatgattttactagaacatcatttgtcaatatgaaggtacaagttactgcattgtccagttttgaagaaaaagaggagcagtttagagaa

SEQ ID NO: 201525 - DNA, 401 bp, Zea Mays
atccttcacgacaatggcgttgagggccccatagttgacatagaattgccaagagtcgttggccttccagaccaggagcatcggtgagaaggcgcatgagctgcggtggatcaggccctaggctagcatggtggtgcactggcactccaactcattcttgtgggtcgccggatagcggtaggggcagacgtccactggttgcaccctcggaccatggtgatgtggtgctcatgagtgtgtggtggagtccctagggctcgatgaagacgaagcaactcggcgagtagggcctccatgtggttgttgcccgtgcaggtctggaaagctgcgttggcgggctagccacgccatgccagttcacatgatggtcctggtgccagaatgacaccgtgatagcgcca

SEQ ID NO: 201526 - DNA, 460 bp, Zea Mays
tactccagtgggttctgatgactttgatttcgataatcttgagccagaggagaaagaatttgaaaatcagaatatctcagagaagggcctatcagatgcttaccaaaatgtcttaaataggcttgcccagctacagaaacttgggaaggttggtaaaggtactgacaggaggaagcgattgaaaggaggactggagctggagccatgcatggacacagtgaataatggttggagaaaggacatgctgcttgaggatgtggtggatattgacgttggctatgatgcacctccaccatcgtttactgctggtttggagttgcagaagcagaggagagcacgtattgaagctgctaagcagcgaattgatgcaactaggaaggctcctgctgctccagctgcaaaagcaaataactcagaagacgttgtaagaaaaaaattgaccatgaagaatcgaggggga

SEQ ID NO: 201527 - DNA, 1296 bp, Zea Mays
attatcattcttagtggcacctgaatctcttcgatcaaccaccttttgtttcactgtttgattctccatactggtattacattctcccagctcagcatggtgaccttttggagatactgcactgctcactttccttgtatagtgagcaataatatctcccttcctccctctgcttcctagtgcagtctcattcgtggtagttttgcataagcttccagaaacttctctctgtctaactgtagctgatctcgtaactcgcttctcaaaccgtgactcctcttcacatgtcccctgctttgcctcacatgattttctacctctccttgtaaaaacaatgtcatgtgccgaaatatcattggtttcgttcacagggctgcccctctcctcctgcttagtgtacccagttcgatcagtgtggttatcagctgcacatcttccattcccagtcaaagaaatctcagtttctgtacaagtgtcctcaatttgagaatgattctcaactttcggatcaccactgtggagtatcactccttcagtatgaaccaaattattctcctgcttactatcatcctgcttaacagattctgatccactggtagggctggttttggttaaatctgtacttgtgttggcaccattagtaattgctgagtctatgacctcatcctgacaaggcccatgtctcactttgttatcttgggcctcatcagcattataactgtttattccagcttgggagtcattctgctctgaatgagttacagcggacacctcatctgacttgactgtcttatcatctgattctgcaatgctaccttgagctaagccaccatcttgagaaaaatctgttgcaggaacaccaggcattcccatattattatcagaacacctagttgattcttccgaaacatcgctcgcatccaagttaactaatccgttggcttccccaccattgcaggcaacttccatcagcacactacttttgcaagcctcagcctccacagtagtgtcacagtgtttcctctccaaactatcagttttgctaacctccacacccgctccacatggtgcctcagcctcagcacgcagcttcatggcgtcggacctcaacacccttcttgtcacattcctgttgtcatccgcggaacccctccggtccttccttttcttcccagtcaaggcaggccctccgccaggatcctcatcacgagaagcattgctttcctccaaggaggcaggagctttcttcaaatcctttgccactcttccttccgttcctggcattggggctccctt

SEQ ID NO: 201528 - DNA, 281 bp, Zea Mays
caaacacatagaggcaagaaaacaaaactttccacatatatgcatgagctagactaaacacaaccctcactagaattagtaaattacaacaatgtaccattacaataatcctattgcacaatctcacatgcccactccatgtcctgaatcctctcgcatgttcactctcctccctcctaaactctgttagtctctaaaatgtaaggttcctccacccactatagcaaacttgggccactagaagacgaaggaatcgtgccacatcgatggaaatttaaaac

SEQ ID NO: 201529 - DNA, 559 bp, Zea Mays
cgacgcgtccaccgccgccgccggggagctcttccagcagctcgccgacatgcaggggaggtgaggtcgatcgccggtcgtacgtcaaaactctacacacactgcacactgtacgtggcatggcaatctgactgagctcgtctcgtgcacgtcgacacatcgatagatgcatgtgtactgcacccggtgaaaatttgaaacgatgaatattcactagaacacaaactgaacagagtggtgagtcctacgtacgtacgtgtaacaactagcaccggtcgatcgatacaatattcttcaacctgacacgtggggtctgcactaccggcgacggacgagggtgagctcgtcatattctcaaatttccaatatttaatatacgtgtgtgcgataatgtatttatttgtaatttcgcgattgtgtaatacttgggggatttgctatgtttcggtcgcctctaaaatacactatatttttagacaacgatctttatcgttaattagttcatgagcatgtaaagctaagattcattttaacgcagggaaaaaaaacaagaacgaat

SEQ ID NO: 201530 - DNA, 345 bp, Zea Mays
gtcttgcttgcacttctcttcttatccctgcttcattcgctttgcatccagcttgcttgaccaaatatgcttcgaagcaccaaactagtgaccagtaaccttaaatccagattatgcaccgtagttggtatggctggagctgattttactctgtttagatgacaggggcaaaaccagatggcattacatttgttggagtcattttggcctgtactcatggaggcttggtggatgaaggcaagctgcttttcaactcgatgagaggggagttcggtcttaagccaagaatcgagcactatggttgcatggttgacctgctggggcgtgttggtctgttaaaagaag

SEQ ID NO: 201531 - DNA, 324 bp, Zea Mays
gaagacaaggacgacacggagctggcgctagaggaatctccaccgtagaccatgcaacccacggtgtctctccacgacatggctggggtgcgcacactggacaccatgcaggtcgcagtattcattcatggcaccagctcaacgctctcatggatacggttccacgcacaacttcatctacgccgacgtcgcggccacggtcgacctcctcttcaccgactaccctgccatccgtgtcgcagttgccaacagcaacaaggtgccctgctccggtcgggccctagatgtcgacatgcacgtgggccccgacgttttccccatcac

SEQ ID NO: 201532 - DNA, 391 bp, Zea Mays
atcggttaccactattgtaactgagttggactccaacttgttggcagtttctgcctatataactatacatcatgcggccttccctggaagagatactaaacttaaccaatctgatggttttctctcaatatggattcataaaaccaatttggtcctgaccctcaaggatgtgggaccctgataaaatttcacaagacatgagttttgagttgattttgctctagatacctcttccctgcccccgtgactgttgtcttcttaattagatgtaggtagtacttgctatgttatgctatcttcaattctgaatatcatggagccatctaacataaccaagttattatgtgcgatcttggtttaatcagaatggcattgattttcatatagcaac

SEQ ID NO: 201533 - DNA, 322 bp, Zea Mays
gccgccgttcgtggaagaaccatctgccgccctgttgatttttacgcgcagtacttatctccctggtcgcgtctcctctctccctcatcctcacgctcggtcatcttcatcctcctgccgtggggctctcacggtcgtctctctcccctgcttccctcatggcaccggcccagctcgcgccctccctgctcctctcctccccagtcgttcctcctccctgtattcctgcatccatggccggatttcttgcagacttggccgcgtccccctcagtccaccctgtacgctcggctccctggtgtgtgccacgcctctgctcttc

SEQ ID NO: 201534 - DNA, 1084 bp, Zea Mays
gggtttgctcgtgctatgtcagctaacactgttgtattacgctccattaaaggtatctatttttcatcttgacgtggtagttgtcatcttaaaaaataatttccttttttctcaaacgcgaaaaataataatttcctcatcttgtagcctgtaattaagtctatatatgctggttggaatacttcatttcatattctctggatcataggaagcctcctgctagccacatgttacctgttggtagatctaccacattctgatactctgattttctaaactaacatgagcaattagcaaatgttaatgataatatgataaaacatttaagctgtactgttatatttgtcatctttcttaaatctgtatacataggtcatttatgatctgaagttctgaactctgtctgcacttccttaaaatttaggactttggagtcgtttttcccggtggttagcctatccctagttgcttaggattaaagggctttgctgttgttgttgttgttgttgttgtttcccagtggacaaagtttatctcaaattactttccgagacacgtagctgtacactgtatttcattatatgaaattgtctcctttgaattggcccttatggcatattatagctcatccagtcatatactatattgacattgcttgatcttgacatttgtgataagctccttttgccgacctttcatttcactaaacttgtttttcctatgcagggacacctttatatatggctccagaactggtgagggaacagccatataaccatacagcagatttatggtcccttggggtcattttgtacgtacatcttcgctttcctactagacctgattacttttgcaatcttctcatactagtacattcttgatgctattgcatcatatttcttgagcagttgtaattttaatctactgctggccttcagcaaatggttcaagttgatgccatctactctgctttgtgtttgataatttatctatcaggctaaatttattgtttggttgaccagatatgaattgtttgttggacagccccccttttatacaaattcggtctatgcacttatccggc

SEQ ID NO: 201535 - DNA, 300 bp, Zea Mays
acgacggcgaatagcgcagggccgagctccggtgagcctacaccggccgattcacgcaacgaccggtgatctacttcggcacagacctaattcaagccctaataagcgtttcccctcaaccaatttcactatcggagctcgaacacgcactgtgcacggtgaccgtatgatcaacggacattctaacacgttcccagcgatctaaggtagcttagctcaattgagttggtgaaggagtatcaggggcacacaagaacactaaaacgaaagggcagagggtatgagcggacctgagacgag

SEQ ID NO: 201536 - DNA, 462 bp, Zea Mays
tcattatcccaaattcaatgacatggatttagttggggcatgatggaatatagtaggattaggaagaataagctcatcctctgaggctttgattgttttttggggttcctacttggttacaactaatgatatgtccatgtttatagccttcaagtctaactgataaccctaacaaactaacaaatttgatctaatctgcccaaggtccactaatccaaaaatgctaacaatgatatttattgtatgtcaacatatcacatattcacatgcatacaataaaaaaaccagacccacttgtatgtggttcatcttatgttcacccccccaccaaaaacaaaaacagatgttactattgctgctgaattatcattttgaactgcaaacttgctggctgttccattagggtttgtgctttgaaaactgttgaaaagaactactttactctttatatttctaaatggc

SEQ ID NO: 201537 - DNA, 385 bp, Zea Mays
atctttttcagggaaatcaatgcttttcattaaatcaacaatgccaccagaagttgttcttctaggtgaaagtcctctcgatgaggacaggttggaaacaggtccaattaatctctcggatgactttgtagtagtctgtgatgcggcattagacacacttgataatgatgcacttggtgaaatgctgggtgatgaaactggcgagagtgtactgttatctttttcagtaagatccatgcttcctgataaggttctagtgccatctgatgcagctgttgttattggtgacacccttcttgatattgccaaggatgagagtttgagatctttacgaacaccgacctttttggacacatcatctgcaccgttacaaggtgactttctt

SEQ ID NO: 201538 - DNA, 361 bp, Zea Mays
atgcccatctccctgtagttgaacaacattatcctcaatttctcaccctcaaaaagatttcgcagctccccttcacccacactaaccccagccggcgaggacaacaattcccgcttaccggtcccgtccacgcgaagacgaccactctccatctcaccacaatgacgcctgttacttcgcaacaattcactcactctccgtttcgccaccgcccttcgccgcctacacccagtactcgcacctggaagatcctcagcacccaccacacgcgacgaagtctccgccgctgccacgtccaacgccgcaaaataatctaagtcctcatctgaagactcctccgtccacacaattgaactcccag

SEQ ID NO: 201539 - DNA, 300 bp, Zea Mays
gcaaaaataaactacgagctagacaaaagaataactcaaaaatctcaaattaacaacctctaaaaggaagtgggggtataaggttctggagtatggccacgtaggtttgcaggtagatcccagcagtccacagcagatgttatttccattccagcaatccaaagctcaggctccactctgctactctgaatgagatcctgaagctatagctttcacctccagatgcgtagtttacactagctcagcttgaactcttttattcccagtctgagtatcaatccgttttctaatcgaagccaa

SEQ ID NO: 201540 - DNA, 294 bp, Zea Mays
ccaccaaagagaagtgctcccggccaatatccgcaagatatagcatattcttttagctcttctttttcagcctttgtcagctcttgaccgactaagttttgaaagttaaaagcttcatcttatgaagtgtcttcggccatttctttctccttctcgggctttggggctgtagtctcttcggtgactacggcagcctcttctgcggccatgtttagtagtattttatctatatcagcaatcacgctttctaaatgaatatcttcggctctggtagctttggcatttgtggcttcc

SEQ ID NO: 201541 - DNA, 494 bp, Zea Mays
gccgacttcggcacctacatggctgcgaagaacagcaagctcgctgcgcagttcgatgccgacgccaacacctcaggcacggacgccggcggtctattcgatggcgtctccatcttcgtggacggcttcacagtcccttctagccaggtgactgccgcgcgccaacggttcatctcatctcaagggttctcatacaccgcttaattatctcaccgcagtatgattactttagatgcaaccgtatgatcatatcgatttgactttttcccccggggttcgttttgtgtttggggtttggtaggagctgaaagagattatgctgaacaatggaggccggtttgtcaactacttttccaggcacacggtaacacacattgtttgcagcaacctgcctgatagcaaaatgaagaatctgaggtacgtaagggaagagggcctctcggttgccattatcacgctttctggttcgaccatggtgatcatgctgctgtttg

SEQ ID NO: 201542 - DNA, 472 bp, Zea Mays
cacacaacgacacaaaatgttctagcagctgttgattttgatttaagatttacctatgttcttgctggctgggaaggttcagctcatgatgccttgattctatcagatgcattggaaagatctgatggcctcattgtgccaccaggtaattccataacatgtttgaatatgcttttaaattacttcacaatcaaactaactagaattctttgaactaggaaaattctatttagttgatgctggttatgctgttagacctggatttctacctccataccgtagcacaagatatcatctaagagaatttggtggaggaaatcatccactcaatccaagagaactcttcaatctaaggcattcttccctccgagtaacaattgagagagctttcggtgccttgaagaatagattcaagattctatacaacaagccttttcatccatatccgacacaagttaagcttgtgttagca

SEQ ID NO: 201543 - DNA, 343 bp, Zea Mays
gcacaactcattgtatctatagtcttattaacagcattcaagttccacttgctgaatataacctagatttgttagttttcttcagggttcagaacctcgacttagttttatgttctgcataagcagaagggcttgcaacttaagaactagtaggtgctttcaagtttggtactccacttatcattaagttttgcataccagcatttgtcattaagaaattactgtgatttgccataaagataagagttggttaaaaggaatatgatggaacattactgttgattattttagtatggaatatggattgtatttttattggaacattcagtgcctggtcttcggt

SEQ ID NO: 201544 - DNA, 318 bp, Zea Mays
ctcgagcggtgcgcgggtttcttggcctggcgggctactaccgcaagtttgtgcccaactacggcacggtcgccgcaccgctcacggccctcctcaagaaagacggcttcacctgggatgacaaggcagcggcggctttcggcgccctcaaggccgccgtcacctcggcaccggtcctcaccatgcctgacttcacaaagaccttcgtggttgagtgtgatgcgtcgtcacacgggtttggcgccgtgctcacccaagagggacatccggttgcattcttcagccgtcccatcgcccctcgtcaccaggcgttggcgg

SEQ ID NO: 201545 - DNA, 842 bp, Zea Mays
gcgtaatcggcggcggcacggcctcaatcgacggccggacgcgaccgggaagggggtggattcggtgcgggtgaatggggaaaacagagggtaaagtgcgcgagaacacacggagccctagaagacgattcgcggaaatagctactgcaacaacgcgaaagcaaatcccagtgcggaggcaataaaaaagaggagtcgtgcttgtggtggtggcgaatcggcccacgcccccatcacgatccagacaaacacacacggcgcaatccacagggggggagaggcggaaaaaaatctctctccaagaaccggtacaagaactgaagcgggattaaccggagacggcgaccacggggatcgggcgggcgggcctcattagcagcggcaaccaaccaactggcaacaatcccgcacgcatcacagaggcagaaactttggaacagtctcggctcgaccagggaggcgtcaagattggatttttgacgatgtgtggggaggccagtccggagattctcgcggacttttcctcctcggattttcgccctgcccgcctgcctgctcacatgctcgcaatcacacgcatcgctcagcttgatgagttgatgtgtgcctgctctctgcgggtgctggtgtgttgttttccctgcgctttttcgttttctccttttcctcctccgcttcattactgctgcaagccgggggacggacggaggaaaaacgcggattaaaagattaggaatttcgggagcaggattggtgagggggcgaaataatctctttctgggagaattgtttttgccgggatcggaatatcggatgctgcgactgcttttggtgtgcatgta

SEQ ID NO: 201546 - DNA, 1287 bp, Zea Mays
ctagaaattaagttaaacgatgaacttgctgatccgggtatggactgtgtttaatttaccaattttaaacatactgagttctaagtcaaattgttggctacgtgtaattctaatcattagctttgtccattattgtcatgttatatactgaaaggaagactttgtcgttccaaaatcaccaaatggtttatcaattagtttcactgttgcagaccatgaagagcaaagcaatgtgtccggagaacggagagttagcttggaagcaaatgccaacgagcctgaggaaaagaacctagctaacgtcatatcaactgatctccacaccaaaactctgcagcatgataatgacagaatagctgaagagactgataaaggtacaaccgaattaatcctgtatccataataaaaactccgcaacattgatgagtgaagataatatgtatgctgaacatctaaatccacctgtgccaactgattattcactattttttttctaaagatcttgcttagtaatcttgcttcaagattttcaattcactaaattaaacttgctaaatctccagatgtttcgtctttggttttccctattgaagagcatgaagaaaaatatgcagtgagccctatagctgttgaaaagagcgtcagtcgggaagccagtgcatgtgaatctgcaggaaaacccctaactgtcatcttttctaacgatctccacaccaaacatctgcaacatgattgtgatgtgctaattaaggagactggtgaaggtaatattgcattaatatttgttccacaacttgttactgatctgcggagatggtgatgaaaacttgtgctgtttgcactgtgtttaatttaccaattttaaacatactgagttctaagtcaagttgttggctacttgtaattctatatatttttaataggctttatgtttgttgtatctgcaacagttaggcatatgtttcattgtcatttgttgtcttttaagtatctgacatttattttttaaatgtattctttccctttctcagatgttttagctcaggagaattgtaatgaccagcctgttccggcccagactgacctagaaatgaagttaaacgatgaacttgctgatccgggtatggactgtgtttaatttaccaattttaaacatactgagttctaagtcaaattgttggctacgtgtaattctaattatttttaataggctttattgttgttctatctgcaacagctaggcatatgtttcattgtcatttgttgtcttttaagtatctgacattt

SEQ ID NO: 201547 - DNA, 1121 bp, Zea Mays
ctttgctatttcattttggatcagtcgaggaaggacgcggagtattgcatggaaaatgccttcagtacatatttggtatttatttagaaattcacatcttggtttcctggcacatgcaaataattatttcctttatattgcttattacttaatcttttggatattgttctgtggtcttgtgctgttaccccatgcttcttatacagaacaataaggagcccaaaacccattttgcatggaacatctttttcgtgtttatcagttcttaacttcttattgaatgctcaattcaagtcttatttaagcaacaatcataacaaacagctacaattctgggccacatcgccacatattcatttcattctagtttcttgttacaacctctgggccatgttgccacatattcatttgggaagggaaagggatgacattttagactggctacaagttctgggccacattgccacatattcatttcattctagtttctggtttctttcggaaacgtgtcctgagtcaagaaaagtcagaatgtacagggtccaccctgatttaaaactaccctcttcaatatcaaatggtttattatgcacattctgatactagctgtacaaatctgaatatcctgaggtatggtgcgtttagaagaatgcacaaataagtgaaatatgtgcccatgacaagatactacacttatgatatgtagatagtagactctttagttttcttgattgaacttcttgtagccttctttcattcaaagtgtaattcaccttttcatatatgcagagaattggatcttctggccagagaaatgctactagatgtggcctttggtgggctgaaatgcttaaaacaagaggacagtatagggaagcatctaatgtgtatttccgtgtttctaatgaggtagatttcctgtttgtcgtggaaaatttttagctgattagatgtattattgattgattgagcatctctgctactcaggaaccttctttgcattctgctgtactgcttgagcaagccgcttgttgctatctattatgcaatccacccatgcttcggaaatacggatttcacctaatcttagctgggaatagctacttcgtgtctgatcaggt

SEQ ID NO: 201548 - DNA, 315 bp, Zea Mays
tctgaaatttttggtatccaagagcctgtaagaaaagtgaagacagatcaccacaaacgaccagtggataaaggtattgtgcatgttgcaacaaaaagatccaagaagcaccatcctcccccatgtatgcaagacattgatagatagatggtagctggagggtgttacctgaaagcaatggttactgagcataattatccttactgcttatgttttcactttgagatgaaaaaaattaactgccactgtctatgtcaatggtttatacttatcatttctaaaatctgattttccaatatgttcattatgtctgag

SEQ ID NO: 201549 - DNA, 590 bp, Zea Mays
agtatttcaggtaccgatgttaaatttctgtcttccaggctacctttatgcacagctgatatacatagtcctgatcatctgatgtgttacttggacatctgagtttgtaggtcatgatgcgtttgtttagtcctcggaagacaacactgctatttgttatacgtgataaaaccagggtttgcctctcttttgttgcattgcattcttgaattaattcatccaaaaatatgaaatatattcagagtacaatattttttccgctttttagctaatctcaggcacatgattgtttttatgtagactccacttgaacatctagaaccagttctaagggaggatatacaaaaggtgatggcatcctttctttcattcattcatctttgtttactagcttgttggcttcctctagttctaatattgtcacagatttgatcagatatggaactctgttgccaagccagaggcacacaaagacacccctatcaatgaattcttcaatgtaagctatatatttttgtcgtacaatctttaaaaataagattatgcttttactagaacgtcatttgtcaatgtgaaggtgcaagttactg

SEQ ID NO: 201550 - DNA, 358 bp, Zea Mays
cgcaagacgatccgctgtccaaattctattttggatggctaaccaactgaagaatttacatttcggtggcgcccataccttccaaatgatccagttcatatttgtaagctctgagccgaggaattgggcaaggtatgctgatttcgccgaatactgtcggtcttctgagagtttccaactaatagagtcgcaaatacccggttgcaaggatactcttcgcaaaattgaccaaagcctacagtactccacaatgtgttgttctgtcacctcagcagaaaacaggttgaggtccctaatccaagtatgattccacaacgcttcactcaaagatccgttctttcttcgggacacattgaaa

SEQ ID NO: 201551 - DNA, 355 bp, Zea Mays
attaaatatgtctacatgcgcttgactttttaacatgtatacaaatggacacacaaaaggcttctctgtttctttgtgtaattctattctgtcgtatataattgtgtctgttgtgaagatcttgtgtgtctgttgctaatgaactacttgagatagttccaatatgcttctttactacttaacatgaagagtaacatatgttgtttggtgaatatagcggactgtagcggtgtccatacttgctatctccttttttgttttctaaaggaacacctctcttgaatgaataattttcttagtatgtaatgtactagtgtatacatttacagactgaccttgtgctttttggttcatg

SEQ ID NO: 201552 - DNA, 1396 bp, Zea Mays
ctcacatcttcatgcaaactatcaaaggccacatccacaaagatatcaacctgaccatgagtcattaaatgttagtatgtgcatcttcgtgcaaactatcaaaggccacatccataaagatatcaacctgaccatgagtcattaaatgttagtatgtgcatgaatgattaaattatagatttataggtcttcctaaagcagatacacatattgctgaatagcatatacattgaaagaataacattctgaatcagtatgtgctcaacagggtatcaaaaagagtaacaagtgctcatatagaatttttccaaacaacatacacatgtaaaacccaaatcacagaattacaaaaatatacacatacaaaaacctgaaacatagcatcatataacacacaggacatacactggggtagccaccaaaacattagcataatctatgtattttataagcttagcctttgaggcattgggggcacgcctgtacatataggcaacaaagtgttaccatggtgccctgtggcgttgggggcacacctagacacctaggcgacacctcaaagaccatgcttataagacagtaagaataccaagggatctattgtattgtcctgatagaacccagataaacaaactcagtttaacagcaatgttaaaagtaaggcatgtatgtaggtgtacaaaattcaactagcataactccaacgcagaaaaacatcctcatgtcaactgcaggattttacagcaagtttggattgacatggaagcttgcagtgattgctatcaatgttatcaaatcgtctaattaaccctagtcgctatggcaccgatcagcctgactaattgtgatttattgtagtacataactgatcaccgtgacattgatcagtccgactaatcgtgattagtaagatgacttgataacattgattgctatgtgattcaggcacaaaatgccacacaaggatagctaaaatgactctggaataaaacatcacgagtaaggttgacaatcaaaattgtgctacatgattatatttcatggagccaagaatcatacaatgagattagtgtagagaagctgttagcaaagatgtagtaaacaaaacttggcagatcaggaccaaaataaaagcaaagcgatatgggctcgacaatcagctttgcttcagaaataagatggatggcaaaattcataatttatgtttcagacgaaattagtatatcacaagaaattgaagagtgatgagtggtcctatgataaacctgcatgttacctttggatgtgcaagcagaatatggacaagttcatgccactgggaagagaagtaacttgttagcagatgaagactagctgctacaagtgacgcatgcacaagcggagaagcgccaacatt

SEQ ID NO: 201553 - DNA, 396 bp, Zea Mays
aatgacgctggaatggcgaggagcagcagcacgacgtagaggatttccggcgacagcacagacagcaagtgactgcaagccacattgcgcaactcagtgcaggcagcagtaccaagggtgggaggcggaagtggagacgaggaaaagcttctgcgcggctgcgtccatgatttataggctagggagggaggtcaagcgacgttccaaagaaagaggaaggggaagcgtcgtgttttatatgcgagggagggggagctgtgcggccgttgatgaatgtcgtcgtgaagagctttgaagaccattaatggaggaggaaatgacgtgaacacaaaatggtcgctgcaactcaacgcagcataatggggaggaggcgagcagctagctgtgcagtggaga

SEQ ID NO: 201554 - DNA, 354 bp, Zea Mays
cttcaaggtttccagacacttctagatggttttgaagctgtgctaattcaaaatattgaactacttggtgtcggcatcctttctgcgacaaactcgtctatagaatcttctgattccttgggcattgatggcactatgctactagagaagaaggcacaagataatgaagaacaaacactaatgaaatccgtaacatactgtgagaacgatggaaatcataagggtcttcgtaatctgcatcctaatagtatcatagagttttgtggcaccctggagaagtttattttgcaccttacttcatatattgaggatagttggaaatggcaccatcagttggcctctaggatctctttg

SEQ ID NO: 201555 - DNA, 318 bp, Zea Mays
ctgcctcccccctctgtatttggttagttggctgtgtttggcaaggatcccctcgattagacctttcctattgttagattagatctttcctttattagggatatccttgcctatatgtactgagccttgggctcctccaattaatcaatcaactattcccagccatactattctttaatggtatcacgagaccgggatctccccaacccctctcacccttccgctgcccctacctgctgaatccgcgccgcggtacggtcgggaccctcgcaccctccgtcgatgaccctgctgagcaggctcgccgcgactccgacg

SEQ ID NO: 201556 - DNA, 588 bp, Zea Mays
aacactagtaaagacaacatctgtttgcagatgaggccttccatgaaaacaacagcctgacaggcgctagttgctctatccttttcccctagttatacttaagtgtacatctgtatttagcagatatcgagaagggagtcaatagaaggccgttatatgaaagtcatcctctatcatcattttcatggacccgaactgacagtatggatatggtatgttttatttgttatcatctttggcgttatttgtaccgggaaaacctttatttctttgcttggtccattcagctcaatgatttaacttagctgatacgcttttcatgatcatgaatttttaagctattcttaagttcacattttgatcatatgacttgattgtcagaatgattttgattgaagagcacttggctctttcctctgaagcagatgcatgaagatcttcttgacactgttttttaatgtatcaaaatacctaacggatttctatacacttatcgtgcagggggattggtcaaagaaatgcaaggaagcattaagcaagtttgagctgctgaaggaagggaagagtaaagaggacattgtttatgaa

SEQ ID NO: 201557 - DNA, 462 bp, Zea Mays
cctgccactagtgtcatcatagttgaccatgtcctgaccaatacccattggtcgtccactactttcttagtaggcggcaccaccaccaccttatcgcatcacctttacacagttgtaccaccagaactgccggttgagcttgctgccagtggccttccctctaaacccaccaccttttccctcgtgatgacctcccacatggaaccataaaccctaacatcttcagatccctcattggatttggggaagatagtgggattgatacctctggcatgatgaatggtggcacttaaattgtcgggtgagcaaaacctttgaatcactcggttgtaaattacttatgttgttctaaaattataagttgttttggaatttctaggtatatagcttttgcttatttgctatgcacctaaatatacaccatgtctagatatatagtaaaactatgaaaaaggggtagac

SEQ ID NO: 201558 - DNA, 280 bp, Zea Mays
ttttgattgctcagctgctggaattattgtgaaagcctttctagaggtatgatacatgtttcaaatgaacatttgtttctcttgtgcttgaagttgaaggtcatatgattttgttcttggactgtgtagtattcatagtgacttgtttatttcagcgcctagactggagttctacctcctcggcatcttcgcagaaggatttcattcttcttgctgcctgtgaagcacatcagacgcttccccagagtgcagaatttcctgctgatgtgtttacggcttg

SEQ ID NO: 201559 - DNA, 333 bp, Zea Mays
cggcagttttgtttggttagccaaaaataatggaagaaagggaaatacaatgtgacatgtgcctatttttgctaaaatgctagtctatacatgctaaacaggccttttccagtgatatcatcatcgctactatgtgcccccaccctttcacagcccatcagatgttctccctactacgcatggatgatagcatttctggctccctacaaccatggctccctgcccaggcaccagacacctctggtggtctgttgttagataactcttgctagtcccaatagtcccttgttatttgtgttttcagtcattgtcaggttattcagttagtttcag

SEQ ID NO: 201560 - DNA, 790 bp, Zea Mays
gagataattgccctgtggtaaccaccaatagctgcagactgagtagtgagtagcaaatgattgcaaatgaagagggaaattaaaggagggcccatccttgctttcctttcagcagcgatgaggaggcgatggccacatacatacctcttgtgcagaaggaacttcctcagttcccagattagttgttcttcactccatgttccttgattgatgtccctgtatttgtctccatcaagctggtagagcatgtttttgaaaaccttgacgacatcaggattatgagacacataaacaaatgccccacagccaaattgccctttaatcttctcatacacaagattagcaagagtagtcttgcctaaccctccaaagccagcaatagacagtacaactggctgcttggatgcctccttgtcgccctccatgagccttctcacaaggtcactgctcttctcttcggcgccaacaagttctgtcgcctttctgtaaagagccgacagccgcaggttgtcgatgcttctgccaacaggcttggaaggaaccaaatcaaccttgtacctgtcacgccgttcactcacatcctttatgcggctcctgatctccttgatgtctatgccgatgctgtgttgaatcctgccccttgtcagcaggtggaggcttctatcaatgaatcccttgaaactatgtggcttgccatcgccaactcgcaccatgaatctgtcgatgctgtcctcgaggtcgtaggacagctctctcacctcccttgtccagagcttgacttggatgtcag

SEQ ID NO: 201561 - DNA, 578 bp, Zea Mays
ggaggctcaagcagttcatccccaaggagcagcccagccccagcggcctcgagggtcggacggtcgatgttggcaatgtcaaggtgcacgtccgagaggccattgctgagggtgggttctcatctgtctatgctgctcgagacctggtaaacccagcgaagcagtacgccctcaagcgcgtgattgtccaggacgaggagtcgctgaacctggtccagaaggagatcacggtgatgcggtcgctcaaggggcaccctaatgtggtcacactggttgcacacgccatactggacatgggacggatgagggaggcactgctgctcatggagttctgcgggaagtcactggtttctgtgttggagggcagaggagcaggttactttgatgaggagaaggtggcgctgatcttccgggatgtttgcaatgctgtctttgcgatgcattgccagacgccacctcttgctcacaggtgagtccactttccagtcaagcagtacacagtgttttttatgcagttgatgcttttgtggttgcttttccatggaactgtttaacagcgttaatctatctatgtttta

SEQ ID NO: 201562 - DNA, 340 bp, Zea Mays
ctctgtcgggtcaagggcaagcgtcggatggtcggtatctggcgggagaagtagggtagcggtcggctggactggtgtcgtgaggttgaagacgacgggatagccatggatcataggatggacgactgggatcggatcgcagtccggatggggctgctggatcatcacgatcgttggtaggaagagcaacggtcgagatcataacgtgtcataccccttcgccatgtttagtcagggccgtcgatctggatctgacggataaaatttaatctagggcaataaaatccccaccgttgaatctcaatcttgcggttctggtcgcataccgattcattcgtgg

SEQ ID NO: 201563 - DNA, 464 bp, Zea Mays
cgatgccactctcacctgcgatggtggggtcgccggatacgaggtgggctcgagttctagggggtctagggtcgcctaagcgggccaaggtcagtgaaggggacctgacaaactcggtggtggggttttggctatgagaagtggactgtgaatgagtgaacaatgaagggggtgctttgagtgggttagaggtgctccggcgagtgattccggttgtggggaggggcgattaagtgcaccaaggccgacgcgggcttcggtggagggtttgggacatctagggccaaaacttgggcacggggcggagctgcatcgaccgaacaccgtggaggcacggtggaccaacatgccatagctccagcgagctctaattcactgcagtgaagtaaaatttatgccaatggagcgcggggtatgattccttaccttgggacaacgcttagggaggcttggcacgacgtctg

SEQ ID NO: 201564 - DNA, 319 bp, Zea Mays
acgatcaagaataaatatctgctaccccgtattgaggttcttcttgagcagttgaggggtgcccaggtgttctccaaaattgatttgaactctagttatcatcagttgaggattcatgaggaggatattgagaagacagccttttgcaccaggtatgggcattacgagttcatagtcatgtcttttggcttaactaatgcccctgctgcttttatggaagcaatgaataggatgtcacatgagttcatggacgattttgtggtcgtgttcctggatgatatccttatttattcgaagaccgaggaagagcatgggtggc

SEQ ID NO: 201565 - DNA, 303 bp, Zea Mays
ctcgtctaaaacactatctcatgaatcgtctgcatttctgtccatttggactattctaaatctctactacttattaagactgcaatagtagtcggccattccgcattctgccattccctgttctgcctttccgattccctcctccccgcgcacagtccattcctatgttgtgtgcctttctgattccctcctcctcacgcacagtccattcctatgttgtgtgcctttccgattccctcctcgtgtgcctctccgattccctcctccccgcgcacagtccattcctatgttgtgtgcctttcc

SEQ ID NO: 201566 - DNA, 648 bp, Zea Mays
ttgtaacaagatgtaggtggcatgtttgggtctctaggagatttgccgtgttgcagtcaaatatccttaattcacctgtgtggttaccagccacaactcgagatgcatctccaagaaatgtcatgcaagtcaatagtgatgcctcatcacggcaaacccgacactgcttgaacctactgtatataaaatgacgatccctacgaggtatctggatcccactaaactgccttcttatctcacggctacccatacgagcagctatgtttgcaggtgcactaaggctgcgactaggctcagggcaaacatgagggtgcaaaagagaaagtggtggcaaagttgtaactggagcaggacactggcggtgttgatgtttcaagtattgtacaaccagtgagtcaagtgtcatacgttccaaatttcctgattgttgatcattcacaccaggaagtgttgtggtgatcaacgttcctggtgtgctttgagaattgtccaagttttcagtagaaacatagttgaagtttgtccggccacaatgaaatgaagtaggagaatctactgctactgacagacctttgcgagtaggagcaggagtttggaatacagagggttggtacgtttgatcagttgttgcgaggcgcttcgttgctg

SEQ ID NO: 201567 - DNA, 433 bp, Zea Mays
ctgctcgcctgctcttcctctgctcttcctcttcctctgcttcctcagttcatctgctgactgctctgctgcttcctcaggccaacagcaccctgccaccttcatcaattaatggctagcccatcttcagtcaacaatgtcaactatgatccaaagacagacaaagcaaggaaggctagctcaaatgatccaggttggaagtatggttattgggcaaatttggcaaatagagatcaagtgacatgcaccctttgtgacaccatagtttccggagggataaaaaggctaaagcagcatctagcaggtggctatggagatacaaagatatgttcaaagaccactactgcaattagaaaggagatgagggattacttggaatccaaaagaaggaaaagagctattttcctagatgataatgagcagcaagaggagg

SEQ ID NO: 201568 - DNA, 301 bp, Zea Mays
atgtcttgtcctttcaccaagagttgatccatctcatccttaatgcatttaacttggttgaggtccctcgtcttcctttctcgaaacctagctatcttattgacatctttctccccttcctttgtacttagtccctcgaccctttgcctcactcacagctcgctttgcacgaccctttgcctcactcacagctcgctttgcagtcttctttgccaccttatatctctctatgttgaccgcgctcctgtcatggaacaagctcctgtaacattctttcttctcctttattgccttttgaaca

SEQ ID NO: 201569 - DNA, 311 bp, Zea Mays
atacaaccatatcacgaaggatatcgagatatcttagcactgtgcaaaaccatcctaaaaaagtttctgattctagccaccttccaaaaagcttgtccacagaaagtgcaatatgtggatcaggagcaagaagtttggagaacagcacagcaaacagaactatgtatggagctggaccactttcatcttctgtagtaacaatgacaaacgacacagagccagagaaagtctggcactacaaggatccttctgggaatgttcagggtccatttactcttttgcaactttcaaattggacaagttacttccca

SEQ ID NO: 201570 - DNA, 960 bp, Zea Mays
agtttgtgagcatggttacacgttagcccagagtttggatccgaacagcgaagggagaggagtattgcagttcaaaaccggtttaatgtcagtgatcagggtatgtccatttcagttacacatcttacatgatttcatactgtaagatgcccttttctgaactattacagtattggagtttttttttgaattttcatattttgttggtgaagaccatagaagcatatcaccatgaacccatccccttctttttgtgaatctttactattatttttataaggccattctagatgcttttacctatgttactggtaacaactatgaatgttttgctgcgtgctttaaaatgacagaaggcaggtgcttatgaacataaggagtatttagcaatatgataatatgttattttagtagattgtacacattccattgtgattggtgcaatttcgtttaatccatgaaggcttgaatccctttatgctgtatcacataatgccttgggggtcacccaggtcacaccactatactacaccatatcaatttgcaccctaaacgacatattattctgaaaatagatcttcatcagaaccttaggtatatttttgaacagttcttgttggttcatgaatttagcaaaaactagcgaagaggggaggtgctgctattgaccgaagtcaggatattgctaaattgcaagaattttacaagctttatagagaaaagcataaagtggatgagttgattgaagatgaaatgaagctgagggaatctgccgtgttcagcggtaaccttggcgagtaagtttttcgcttcagtttaatggacacactgtgcatttactttatgtaaaaaacttacaaaattctacttcattagcttttgtgccatgttgttaagcataatgtaaataaatttgggtcactggatgatgttcccggtctgcaaattttttgaacaggc

SEQ ID NO: 201571 - DNA, 1142 bp, Zea Mays
ggaatctgaagtggaggttcattggtctaatggccccaagtttcattctcatattccgaaaatctctgaagttgaaacaagcctgcgatttgatgaaaatgctacagatggctatgctaaagatgtgaatgaatgctcacctgaggagacagtacaaccctctcgaactagagcgccctcatcccaggagtctctagatgcacggaaggcactcagtaccatatatgacaaagttctggtggttgacaatgtcatgtcagctaggagtgttgttcaactgcttactacgaagtacagaaattatattcatgcatgtgacacagaggtaaggcattaaagccttttacatctacgaaaaatgctttatgtatttatatttatttacatcggtcatggcttgttacctaaatctaatgttgacatattcaattaggtagtatacactcccctcttatcattcattattcagggttcaacatatgactacatacccacccatttttattccagtgtctgcttctttctgcaacttctgttcattatgcatcatttatgcctacatgtttcctttttgttcactatgaaatccatgaaaaacgagagtatcactgttgttatgtattttgaacagcgagtagaatagtagatacacatcatcatcttgttggctcagtggtatgtaatgggtagggatgcaatcgggtacacaacagtgttttttgggtcagctaattagttacgtagcatgctcttttgattcacttctttccctagattaatgaagtgacatgtcactttagtaagttttgggtcggtagaatgaccaaaagtgggtcttgcatccctattactgggcaactgagttatatgttgggaaactttcttcccttttgaatgcatattgactctttggtattataattcaggagaattcaatgttatgcaggtagctaatattaatgttaaacaagagacaccagttggccatggaaaggtcacatgctttagcatttactctggcactaaaggtgctgaggctgattttggaaatggcaagacatgcatttgggtggatgtgctagatggtggaccagatgtactcatggagtttgtcccattttttgaggattcatcaatcagga

SEQ ID NO: 201572 - DNA, 298 bp, Zea Mays
cttttcctatcgaacttcgcctgtgcatggctggaacatctcccacctacctagatccatgacttggaagacctggtcagggtcttggggggaatttccggggcacatacatgtgcccttgaaattcttgggatctctggagttgtcggcagaagcaagacaagagccagcgcgaatacattcgttggttctccaagcagcgcacccagctccccaacatcactgactctgacgtcatctgagcgttcctcactggtacctcctatcgtgacctggtcagcaagctaggtcacaaaac

SEQ ID NO: 201573 - DNA, 412 bp, Zea Mays
gaaattctactgtcttactggtgaatgtcttcccaaaaattccaaatccccaaagcgcatcaccctaatgagaaaaaaaagaataacctccaacttctcttctttgcaaaccgggtatcacaacttaccacatggcctaggtaggacacttggttttgggaaaaggagcacttggacagttttactttccattgttccttgtccaacaatgtaaagacctattgcaaatgacagagatgatcttcccatgtgtgactataagccaatatgtcatcaaagaaaacaagaatgcacttccttaatagagaatatagtgtgtgattcattgcatgctagaatgttccaggtgcaccagtcaatccgaaagccataactcagaattcatcatgacctaaatgggcttgaaatgtcg

SEQ ID NO: 201574 - DNA, 694 bp, Zea Mays
tgttgcagcagttccagttggatccatcttgaagtcctctgtcttctcccatccaacatcctcagcattgttctccacagctccaaggttctccttctcctgacccagctcatcgtcgctgacaccatggttcctgaatgttggggtgttgggtggtctccttgtgaatcccttgcttcttagctgcttaacagcataatctgttcttgttccttggtcctcctcgcagtcgtcataatcagaatcggaataagaatcaacaaaggatgaggcctttgataccctatttagcctcccaacatccttggtggtccctttgttcttccccttgccacggacgtcatcacaggcataatgggtacaggctgaggagactaaatcagtttcgatcttgacctcggagcgtctggtgggagccctagcttcatcagagctagaaatttgaaggggtgaggaggcaccggcgtgagcatccacatcatctgggctatggtcatctaggtcgtcgtccacggtgatggcgcacggcaaaggggtgagctgttgtgtcctggacctcgcggcggtgctgggcttctggacggatagagagtcaaatcgtgtggtgaggtcgtctaggatgtcgagtatgctttcaccgtcgtcctggttgtcccactccgcctcctcttcatccactcgctgagtggcggtg

SEQ ID NO: 201575 - DNA, 809 bp, Zea Mays
aagaaggttacttttggggcggaggtagggaaggccaggagactgaggtctcgggtcatatggtcgccggtcgttgccaagacaagggggaagtctgctcgagccggtactgattctgctgctgaagacggtatttctgcagatgtgggcgctgatgtcccagtgaggcggtccaggaggaattcgttcaatcctgccgaggctgaggaagcaggagaggctgttgctgttgacaggaagcccaagcgcaagaatcaggagaatgacgagggcgttgctgttatcgctcaggctagagttacgagaaggtcaaatttggagtggtctgctactgtattgcctcctgctgttgagaagaagagagggaggcagaatgcagctgagtctgatgtgcagaagtccgctctggtggaagtaacagctaggactacaaggtctcgctcaatcgtacctgttgtggtgccacccactgtggttgagaacaagaggaggaagactggagatccacaaacaactgtagagttgactatgctttcagatgtgcccagaagtgattttcctgccaccaggtctttaaggaacaaaattgtccacgttaacaacagcgtcgtggacgaaactcacactaccaggcagttggaaaacaagatgcgtccgtctactcgtaggcatcaacaggttgcatcttctccggaggataaaggtcaaaaaattcctgctaccagtaagtcccctctactgaggtggtcacggagaaactattctgaggccaatagtgcaaattcagtaaacatcaaattggccaaaga

SEQ ID NO: 201576 - DNA, 389 bp, Zea Mays
gcaggtacagaattcgtcgcctccatcccgagccaccccgctccctcctttactgttgctagggttgggcctcaatcccgacccacgccgccccctcctctccagttaaatcaattcatcttcaagggtatggaacgtcgtactaacagagagatgtttgtgcattgtcgcctacagatttgcgtatcgagttgttcgtcttcggttccaagatcaagtgcatccaaggtactttcatacacaatttcttgcgcaatttactgtccacatggccacaaccaatttatatatgtgctgtcatttgtgcatattacttggagatacgagagctgggatggtcatatgtttattgttacctagggataccattgttcttttgtataagtatg

SEQ ID NO: 201577 - DNA, 528 bp, Zea Mays
tacgtctatgggcttcttatcgtgggcagaccttagctcgaactggtcagttatcctctgtaaacttaataacttatacatttatagtatatttattgacaggctcacgtttgcttttactcaatcctgtttttcaatttgtaaaccttttgtccacatggtgaaaacttgtatttttcagcagttttatttcattattgactcatgaaccacactctgtttactatttggtatggaataatttactccagtagcaaaatttgcgattaatctgtgaatgttgaatgatatacctgtacttttgtatttataatttttactctagttcatcaagtcacgtgtgcttttctgatggcatcacaaaagattaatctgtttgtcctccttgaacttctaagtggaactcattcgctcaatatatttgattataatcagttcacgtcaacaatattttttgttttactctgcagtccgtggtatgatgtactataggaaagcccttatgctgcagagttatttggagaggat

SEQ ID NO: 201578 - DNA, 407 bp, Zea Mays
tgcggacatgccaggaatccctagggaggtcaccgaacactccctgaatacccatcatatggccagaccagtcacccagcggcttcaccgttttgatggagagaagcgcaaggcattggtgaggaggtggcaaggctcctagcgttgtgattcataagggagatacaccacccaatgtgtatcatgaaccctgttcttgtcaagaagaaaacgagagtgggaggatgtgcattgactacacgaggctcaataaggcatgccccaaggaccctttccctctcccacttatcgatcaggtcgtagactcgactgctggtgcgagcttctctccctcttggaggcatactcgggctatcaccaaattgccatgaaggagaccgaccaacacgccactaccttcattaccc

SEQ ID NO: 201579 - DNA, 400 bp, Zea Mays
cgtaggcggcgaagggcggtggcgaagcgtagagtgagtgaattggatggtggtcggcttcgtgtgggcagggctggcaggcggcaattgttgtcctcgccagttggggcgagtataggtgaggaggagttgcggagtctttttgagggtgaggagctgaggataatgctttttaactatagggagatgggaattattccgaaggttgaaccaatgtaaggtgtgatgccctcgctgtacgcgtgtaactatagtttgtatgatgaggctgtgtgccttcgcgcatctggctatgttcatagggcgttgcgcacctggtctagcacgtttgttatgtcgatccggctgcgcctgtaggcttttgcactgatgtaatgcgccttcgattttttgcactctt

SEQ ID NO: 201580 - DNA, 477 bp, Zea Mays
attgcatttgccagtgcaagcaaatttcagagataaggatggcagcacaactacttttctccaatgcttccagttgccactgcccattaggcatttcaaggataaacgttgggaagacacttcttggtgaaagtgcaagttttcagagaaagaagtcgttttctggtggttcctatcgcttttctcgatttgattgctctgcgaactcccgccgagctgggccaaggcgcaccaaggatactttatatgaccttcaccctgagatctccttgctttatggagaagataatggtgcagctaccttatccagcaaagagcagggtattgacactacagctgaaagattggtggacacttctccctcttaccgctataatgagcccaggattaaagtcataggggttggaggtggtggctccaatgctgtgaacaggatgattgaaagctccatgaagggtgtggaattctggattgtga

SEQ ID NO: 201581 - DNA, 836 bp, Zea Mays
ttcagaatttgacggatccaccttcactgaacatggcttgggagaagaaagcaatagctaccagaagttaacatgcccctatgtttataatcccagttatgcaaccatggattccatctttagtaggtggaacagcgacaacagtgggaactacagtgtcgatgttgaggctaggttaaccgtcaaagacgaaaatagacatgatcattcgaaactgggggcttccacagggcggagtaatgtgaggatggaatgccagttgatagggtcatgttttagtgctactcatgctgaagacacaaacgatcctctagggatcagatcatactcctctaaggatgttactgatagttgtagccatactgaaatggttcagtgcagcagcaagtcctttcattttaaatcagggaggaggaacataaaatcaagtaaaacaccaagctatgttgatttgactgcgtctaacagagtgagaggttctaataggcacaagaacaatggaaaagatagttcagcagtgtggcagaaagtagaaaggaatgacaagatggtatctaaagcaggccatccgagcgatacacctgttcatgataagggtgcaaatgaagttggtaagaagggtgtacaggaagatccaacaagaattcgggcaaaacataatccgaataagaaagtgtgcaaacagaagccttcaaatggagcagttgaattggagcctgccaaaggagaagatgcattgaactcatgccatacattttctggacctttctacacgaagcaagcaccctttctacgccagcaaagaaactctttttcgaaacaaggttctcagtcat

SEQ ID NO: 201582 - DNA, 560 bp, Zea Mays
cccgcttccatggcttttgtacatgccaatttcttcacctatcacagtttgttgcccgtccttgtgacgagttactgtctggaggagaccacgacttgtatcaaaagaaagagtgtaattggagttcttcatttccactgttttggcttccagctttgaacaatcatatggttgagggcaagaaaattcctgttcagttgtgtatgttttcactgcagcaggaatagccttttcacaatcctgcccagtaaccacatagtaggtctccaaacctagtggaggaacataagctctccaataaaggcgatgacgaccagtcgaaatattttcatcgctgacaaactgccactcaggggaaagttgacttggcaaacaagatccatttgaattgagaacagaaacatcggggctacttacaacaaccataacaatctcatcccttgtctgttctaaagggttaaaaaagacaactgactgtgccttcccttcaagagggtgaagaaccttatgtaccagctgaacatcatactttgaccgttcctgcacggactcaaaatgtg

SEQ ID NO: 201583 - DNA, 597 bp, Zea Mays
cagaaagatgatatctgcctggctactgctgttggctaggactttgtgcatatgccatcttgctatgttgcatttgatgaccatgacgtctacatgtggggcacttcaaagattcgtgtcccttgtatcgaaggttaggaggacatgcgacatcttgtttgtatcactggtccggtgactacaacatgattgacccttttgtaagtcttttcgttgccttttattttcgaagtctatgctagacccgccagatatcatgtttattatgccgtgaactgtcgattgttggaagtgaccttcatctttgggaggtgggggtgtatgatttgagggggagggtggagttggatcctttcttggtgggatagctggggtggtagtttgggggaaatgagggtaaggttgtgtgttttggtagtgagggggattgctgttggtatgaagtgtgggcgatggtctttgtcggctagtctggaattgatctggccattctttccttggcctctttggtgacggggcaatccctagttgaatgcccgacgtcctctccatggaagacacaatatgaccttcgctcttgtttggatcctctgtcgc

SEQ ID NO: 201584 - DNA, 364 bp, Zea Mays
aaatcatccgaccttggcctcaaatgaggttacggccatttattacaagagacggtagcatattgccaaaactcctcctatgaccacatcagagaacccaaactagccaaaccaaagaacttcagctaccgaaccacagctactacatagttacacgcaacgcagacccctatccaaaattgctgaagaactgtagtagcaccctctccacattacgacatgaagactttattaactcttggtcctcccttctaggctgaagctgggaccagaagtggcaccaatatgttgctctgaaggttacctgcacacatgatttaggagatgaattattgaacaccacatcattcctacttaaccaaat

SEQ ID NO: 201585 - DNA, 488 bp, Zea Mays
cattgcagcattgctggtttgtgtaattacccataaactagatgcctggcactgcactcattcccatgaagatgcctcattcactcagggaaccttacagccttgggatgggatggaatagaggatcaaaatttaccctgcatcctctaaatgttgaagcggaaagtgccttccgggttgacagcttctcctttttgaagattttggttcacaattgttgtcacacactactagaaccattgttggagattgaactaaaaaccgtactcatctgtttgagttttattcactctctattacagaagaattagatgctcgtagcagatgtccactcaggttgagattttgcacattcagcacatatgcttagtgcttaccacgcatcagggtgacatgcgtaaagttgtgtgcttgctatggtgaactacatctagaatttcagggatcattgttttagttgggctcaattgaataccatttaggagaac

SEQ ID NO: 201586 - DNA, 282 bp, Zea Mays
tgaagttattactgtattgaaacagcaaatggatggttctaccaacaagttattaccttatacaaatagcaaagggatggtgctaacaacaaattaaatgcaagaatagggagaccgtcattggtaataataggttcacagaaacatgagatcaaaatgccagtgcataatctcattaagaacaacaaagaccaaacactaactcatcaaggccaacagaaatactttctggaaccacgatgagcatgatccttgagcagaattaaaatgtctgaatctcag

SEQ ID NO: 201587 - DNA, 320 bp, Zea Mays
tgcctcctcctccgtgtgctcctctcctcccaacgctttctgcctgcgcatggctttcggtttcgggcggttcgttgccttgattggctgatgctgctgcagctgggcagggccatgcatggcggccggcaaccgtacgtacgtccggccccggtggcgcgtgacacggccgtccatcccgcgtctgttgttcgttgaaaagctgcgcacagtgagatacctcggcccggcgggcgggagctggggactgtcctgccctgcacatcgtcatttacacacacagacacacaccggtgtagtgaaggagtcgtcggcatacg

SEQ ID NO: 201588 - DNA, 349 bp, Zea Mays
ttcaagtggcttgcctttatcctctgacaggtgtcacaattttatacatattgggcgatctccctcttcattctggtccaccaatacaagggcttcagatcatggtacattttggtgctccctggatggatggagaatttggagagatgggcctcgtccaagattttcctcttgagatctttatttttaggaaccaccaatctgctttcgaaccacaatatacccttttccatcttggcagaaacatttatacttttcggtcttctgatggaggttctacttaatgatttgtactcccttgtcactgagctgggccatgatgatctggtcttgcaaagttggctcgatg

SEQ ID NO: 201589 - DNA, 366 bp, Zea Mays
tagtatggctcatgaacttagtttctcgataatcagtacaactttgaatatctcccttagtcttgtagatcagtaccaatatacttctccactcgtaagacatcttattcgaccggaagatatggttgaacaacttggtcccctttcattgttttcaatgcctctccaacctcagattattggattctacgcataaagcacctattagtgttatcaaaagagtcatccaaccgaaaggtcgtgtccccattctcccaattcaacattttgtcaaaatactctctccatctatgactaatctcattctccttcaccaagtggtgtgccattccatccttaatgcacttaacttggtcaaagtccctt

SEQ ID NO: 201590 - DNA, 360 bp, Zea Mays
gcggatttgctaataacatgttgacgggcccaattcctgatctcagtggctcctccaacctatccatcatgtgagcatttcaattcttttgctgctcatcatcgtcctcttctcctttaattttctcgttaaaatgcatgcatgcagtcatcttgagaacaaccaactgaccggaactgttccttcctactttggcagcttgccaaaactgagcgagctgtaagtataatagtatagtgtacttccttcctttcctctctctctatgtgtatatatattggttgaattaagattccttcaattcaccaatacaacaactgttcaggtaccttgagaacaaccggttgtctggacccattc

SEQ ID NO: 201591 - DNA, 533 bp, Zea Mays
ggagtctttcaggtgcgctactgatggcgggattgggcctgttagcctgttgttggccagggcgaggaagctcagtttggagaagccaagatctgcaggaagttgcccggacaggtcgttgtagttcaacagtagagccttgccatccgcgactccaggaatgatgcctcctcccttatcagggccagttcccaaacgaaatctaaactcgatcattgcagcaacacagtgaatgttggctctagctctcccagtaacttcagaatagtcctgaacttggaggtcagtattgtcgtcgacgctaagatcgtacgagtattcaaggcctgtgagtcggggaatgccgccgttgccgaagttgttggaggcggcatggaagagtgcgacgtcggggagctggtcgacgaagccttgcagcttcggtgcacgcagaccgaagccattgagaactactgccgtcactgtgagctccttagctcggctggtcggtgttgcacagtagaagccgacgtagctcttctcgccgcagatgt

SEQ ID NO: 201592 - DNA, 1036 bp, Zea Mays
cccaagggtgtagcagaagaggcaataaggaatcaccggtcagctcaacctactgttgccagcctaacatcggactttgaccaacaatgggatgaattagagttctatataaaatggaaaggccagtcttacctgcattgtcaatggaagatactatcagagctccaaagtgtaagtacttatctatctacatatagattatgttatctgtatgttagttaggtgtatatgcttaattcattatctttgttctaaatctttcattcatataacctctacatggcaggttagtggattcaagaaggtaataaactacacgaaaagagtttctgaggaacagaggtacaagagggcactatcacgtgaagaggtaaaaccagtagacctttcatttcaaatttaacatgaaagcatgagtgcatttcaccttttggatcttagcatccggagtataaatagtaactctatgattaaacttcaaaatgtaaagaaatagtttgtgcctcttcttgttatggaaggttcctgttttttgcatagtgttatcctgatgatgttcaaaattaagttaagttaggtttatatttgctgctattaattagtgattattgagtgatatttgcctgcatgcgtaggattctttacctggcaacatattgtgattaattcgatacgtttctctcgttatgctaacatattcatataacaggttgaggtacatgacgtgggcaaggagatggagctggatcttattaaacaatatagtcaggttgactgttgatatatactgttcattatcgctttgcatattgtctaacattgaatcttcaggttgaacggatatttgctgatagggtcagcaaagctgatggagatgatctggttcccgaatatttagtaaaatggcaaggacttccttatgcagaatctacctggtaatttttcgtggcatggtatccagttttatgtttatgattattgttttgcacatggatgagcttcgatcacaaacacaatatctctacctctgttgatt

SEQ ID NO: 201593 - DNA, 399 bp, Zea Mays
gcagcgacgctgatggtctaggactcgatcgaatcagccgcgagtcttaattccgagagagaaacctcaaccccgcttcccaatctcccctggcgaggctctgattcccgccccgttgacgtcacgaagcccaacggctaataccggcgcattgaacgacggtgaggaggatgtacagcggccgcggctactttctttcggttcttcgctcggtgttcacgccaacagtggggtatctaggagaataagctcatgcgtgacggtagctgaggagagaacagagtcacggggattcctatttaactcccgaagtccaggccggggaggagagggaggtcttcaacacgctccgctgcgcgcggcggcaatcccgcgcggttctgttgcgctggggaagta

SEQ ID NO: 201594 - DNA, 352 bp, Zea Mays
gtggaatggtgtagagatccccgttgctattgcaccgaaggaggaccgttttggtttggagatccttaacagaaaaaccagaagcgtcaaactcaatagaacagttattgtcgtaagctgtcgaacagataacaaattacgagcaagctgaggagcgacaagaacattattaagatgaaaatagcgatcagctacaggtaagagagatgtgccacagccagatgaagggatggactgcccgttactgaccgtaatggagcacggtggggaaggataacgggaaaggagtatatcgtcgttggaggacatgtgggatgtcgctccgctgtccataacccaagaaggagagtcc

SEQ ID NO: 201595 - DNA, 832 bp, Zea Mays
atatatcaaatactagtaatcgccagcagcacattcctgaatcagtgaatcaggatgccgaaggttagattttttttttaaaaaaactcatctgttctgtttgtgtttttgctgaggtaatgtttatttttttcatgtttaatatacacttttttcatgtttatgacagaagtgttgtacactgggaggcctaacagtagcatgggtcaatctttacgagaccttgagaacgaccatgcagatttccagttgacaccacatgatccccattctgtggttggagaagctaatttgccgcagcataatgtcccaagggacagcgatctgagtcctcttggcttactttggtctgagctggaagggcatccaaaacaacctctctcatcaaatgtacttggtgtaaatgaacgtagaaactccaagcctacaacacccaaggacattctacctgtaaacatgagacaagggccacttagcaggatgaatgaagtttctagtgtgcgtgatgagtggcctgcaaactttggacggctggacaatatgaatggccctaacatttctggcagaatccctcaggttgaagctgagcatcatttgaattttgatgggcacctcctgcttcagcagatcagacgggagcaacagcaacatcaacagcgacaggagcaattgatggcccgtagtaatttagagttttctggtgcatttcccgggcaggtgtttgattctttgcaccaacaccgacagcctatgaatcaacagcttcctgatgtagagcatcttttgagagtccagtttgaacttgagcaacagcagcaacaccaactccaac

SEQ ID NO: 201596 - DNA, 366 bp, Zea Mays
atggcacgcgacgtcgcatccggttgagcaaatccagttttagatgattttgaatgggtcgaccaagtttaggattcgttttcctagttttctgagttcagaaacccaagtgacacatcgtgccaagttcgaggcccattgatgcactttgcttacatatatactcgtttaaagcatgagtttcgtgtattgtgtgtcatacacgaagcacatatatctaattttctctcccaagtttcgtctaacaactagataagataagccttacctcttgcatgagcaaccaaccatacaaccaccacgagtgctttctcctcccccttgttgatgatgtcgtatattaacctcaacaacctaccatctctt

SEQ ID NO: 201597 - DNA, 373 bp, Zea Mays
caggagtagcggcgagtggcccgctggtacgagcctcggacgatggcccagcaggggcactagcgagcggtctgctggcaccagatgtagtcgatggcccagcaggggcaacagtgagctggccacgagcaccggctgctggtgccagtccaacaggtgcaacgtcgagacctgcaagagagcgcgacccaatgggcagcgtcggggtcaccatatcaagtaaaaaatcaagattagattcttgagagctcgcgattgtatgttcggcgaatggaaaggaggtctcgtcgaaggtgacatggcgagaaatgatgacccgattggaggccatgtcgaggcatcgataacctttgtgttcaggagagtaaccaag

SEQ ID NO: 201598 - DNA, 704 bp, Zea Mays
aagggtcatatattaataagagcctcttaactcttggaacagtaagttctcattgccaattacctgtgacaacaacagatttccaggttattaccagcagcattgacttcaactcagcttctgaagaccttgacctcatataattataacttgtatcaaaattgaatctgagcatatgatggaaagtaactggtagaatatgtggagagcttagcctgttatcggatacaagtactcatttgcaacttcatttcttttgagcttcactgtgaagaggagggtggcggtgacctagtatttttttattaattttccactcttaggatctttagctacttctgtttacgtgaacattttttaattcaaaggtcattggaaagctcagtgaagggagggcaacacatataccctatcgtgattctaagttgacccgtctactacagtcatcattgagtggccatggtcatgtctcagtaagtattaacttttacaattgcctttctgggagccattccttttaactcattccattgttctgttggagcattgaagtgaaccactgaaacctcttgaagtaatcagctgatacagttactttttcttatgcagctaatttgcacaattactccagcatcaagtaacatggaagaaacacataatacattgaagtttgcaagcagagcaaaacgtgttgaaatttacgc

SEQ ID NO: 201599 - DNA, 363 bp, Zea Mays
cattgcatacatgaaccaaaatcatgcaagtaaataagtaataaggcggaaaagcaaactctgagctaataatgacggcaccatggtaagttgaattgaaaccaacagaagcaaacgaccttgaatctgcacacatgcacagtgacaaccaaagcagcgaaaggctagaggaggcggcctgggtcgacaagtggggacgtgaggagagcataccgtggatgcgcggcggcaaggcgacaacatttctaggggctagcaggcaggccctggcagtgacgaactggtggagacagggggcacgaccaaccgttgtcgttgccatacaagtcatagaacacagaataggaggagccactgttgccg

SEQ ID NO: 201600 - DNA, 397 bp, Zea Mays
gccctgggtagcctactctggtggcaccgactctacaccatcaatagcctgttcagccctacccggtgcagtcttggacaccacgacctggggcatgcgatcagcggtctcttactaactcgtttagcaatatgactctgacccatccaacggtcactgactaggttgccgacttcagagcctcctaccacaccactcctaacgttggtatactcctctactcatcacatccatccctctcatccttctatcattgtttacaatggttttcttcataacacatgggtgttatagggctcctaacggtcagcgaatgaggagaagcgcgatgtcctttccgctcccgccccttccgcttccgtcccttccgctcccgtcccctgccctcccacctccg

SEQ ID NO: 201601 - DNA, 492 bp, Zea Mays
gaaaacttagtccaacctttaattaacatatggactttgttcaaccctgccaaggatttttctagtatgctgatctctctagatgctgatccaacagagtcatggtaggtgcacatatagcataatattgatatttaaatagttactcatttaatttgttcaagtcagtcagttggatgcgatgaaatcctaccactaaacatattctcatcacgtagggttataacaggtcaccgccacggtgatgttgctttatggaagcacggcatgcaggcaagttttaatgcattctctcagcgttacttccagtacccatcatccacatgtattgatttatgtttggtaaatggttgtcttcagtgatgtcgagtccggttttaagaacacaatcgaatgcgaatcatgtatgcgtaaggatcaaatttacatacacaacgacgtcatcagtgaaagtaccatcacataatactttaaataaatcatacaaatatg

SEQ ID NO: 201602 - DNA, 630 bp, Zea Mays
cgcgagcccttccgcgttccgcctctgttccgccgctcgggacccgggagacgagaagtagtagccccatccccaactggtcctaacccacggtacccaatccttgactcggttctctccatgagcttactgccccatctccatttcttcaatcattactcgcctttccgttcaagggcgttgcttgcctggataaccacggcatcgttctacccgccgggcccgagctaaggtactttgtttctgaacccttcgttggtttcaggatttgtcccaacccaaggttggtaatcccttggtgctggtgttcctctgtgtttgtttcgtctgtagtcatacgtgcaaacaaagagcagcaaaagaagaacaagtggggcgacagggacagggaggaggggaaggcagaggaaatggaagcctctttcttgaggaaagatggcggtgatcaagccagtgcggcgacaatgtccggcgagcacaggaacaagggccttgactgggatttgaacgactggaggtgggacgccaacctgttcctggccacgccggcggccatcgtgccgtccgagtgcagcagcaggaagctgagtcgagctcagggggagatcgacttcggcgtcgtcgttgaca

SEQ ID NO: 201603 - DNA, 300 bp, Zea Mays
aaatttgcggtagtatcccgccaagccgaggaagccgcggagtgcccggacggatgccggtaccagccaatccaggacgacctggatcttccctgcatccatggccacacctttggctgagatgccgtgtcctaggtacgtgatggagcgctcgccgaaggcacacttggtacgcttgacgaagaggcgatgttgttggagcacctcgagtaccgtgtggacgtggtggaggtgatccatccatgtggtgctgtagatgaggatgtcgtcgaagaagactagaacgaagcgacgcaggaa

SEQ ID NO: 201604 - DNA, 437 bp, Zea Mays
tgcggcgggacggcgcccctcaccgccgacggcaagtcgtacaagacggacgcgcaggccaaccacctgctctccgccaccgacgccatccgcgtcgccgccgacgacaaggccgacgtgccctcgccgctgtacgccaccgcgcgggtgtttaaggaggaggccgtctacagcttcccgctcaccgtcccgggctggcacttcatccgcctctacttcttcccgctcaagggcggcgacgtggacctcgcgtcggtgacctttagcgtcgtcaccgacgacaacgtcctgctccacagcttcaccccgggggacaagcccgtcatgaacgagtacctggtgaacgccaccgagaaccacctggcgctcaagttccagccgctcagtggctccgccgccttcgtcaacgccatcgaggtggtgaacgcgcccgacga

SEQ ID NO: 201605 - DNA, 380 bp, Zea Mays
agagaccaacccaaccaatagagtcttgatggattgcatgatctgcctatccccacctaacctcaaacaaacttttgacctacatcaggtagtctatctcatccatacctatcttaaccatattctccagcccaataatatacactaactcataatcaatgagacaagaccgaagaagatgatcaacttcatcaagaaaggatgagcaccaactcaagtcttcaaggatcaagtgaggtcaccaagatgagtcaagatccacaatcttggatggagtcttttcttaccccactccttcttacccaaaactatatatgctttaaagatatcattcatcttgcataataaagtggctatacccatatatacccaggccttcc

SEQ ID NO: 201606 - DNA, 274 bp, Zea Mays
ctttcaggcccccatgattgcaagcaaccaaccgccagcaaatgcctgttggcactgcggagaccctagtcacttcaagaacaactgcccctagttgaaggcatcaggacctgcttactccaactcggtgaatggccccaagaataccccagcacccgtccccaaggcaccctcctccatcagctagcagaacaagacccagtatcagggaagagcacgagtaaaccacgtcgatgctcaggaggctcagcaagctccaggagtagtgctcagt

SEQ ID NO: 201607 - DNA, 335 bp, Zea Mays
cgagcggcggacaccaaatcagacctactccgagcatttcccctaagttaatcgcacggttggtgacctactccgccctgcccacgagaacagcgaaggctaaggacttttgcttgtgttcccgacaatgggtggcggcctaattcaattggacgggttggagagcatcaccagcatacagagacacgagaacaatgcacgaattggatggtgccttaccagaacggactggccacggtggagttgtgttttgcggtggcggagaccaatttgggggaaaaggggaattctccggctatggtgggcaattgaggggaagaacgggtgtgtcggct

SEQ ID NO: 201608 - DNA, 345 bp, Zea Mays
ttttcctgacactggcatatccccgagggaagcagggaagcagcgttgtgctgcgctagaaccacgtggaggctacaccaagcaagtgcaatagaagagagttgcccaaactcccaaagcctaacaaggatcgaacaacgccagcagtgtcgcaagcgctaggtcaatagacatgtcggcatccacttcttgacacaaactgaatcccctccttctcccatgacgacacagcataatcaatcaattaagagcgacaaatccacggtgccatacatccatacccatgtggtcgcgtcctccggaccacctgggagacatgggacgacgaggagtccgaccgttctc

SEQ ID NO: 201609 - DNA, 403 bp, Zea Mays
gtgaggcggagaggatgaccaagtccctgccaagcaaacttgcaaggcagagcgggtgaccaagtccctgtcgagcaacctcacgaaagaggagcgggtgaccaagtcctgtcgagcaaccttgcgagacagaggaggcgaccaagtccctgtcaagcaaccttgcgaggtagagcggacgactaggtccctgccgagcaaccttactagagactagcgtaagggaaggccgacccaatgatacgagcccacgttggcgggacaatacgggtcatcaccacactacatctaggcctcgggtacaacatcgaatggtctctgacagatgtcagatgacacctcggcacgtactgtcttaggcgaacccccatcgactaatagggacagtcaatcccagtctaag

SEQ ID NO: 201610 - DNA, 318 bp, Zea Mays
gacattttgagggcccctgtcatgcttgtcagttaggccggcatactcgtctcccattcaccacttcttctcgggctgagcaggcttttgacctggttcattgtgatctctggacctctcctgtactcagtctttctggttataaatattatttggtgattttggatgacttttcccattttctttggacgtttcctcttcgattgaagtccgacacattcaccaccctcacacacttcttcgcctgggtctccacccagtttcaccgcccggttcgtgccctgcagtgtgacaacggccgcgagttcgacaatcacg

SEQ ID NO: 201611 - DNA, 353 bp, Zea Mays
tggggcagggcagctcagattggggcaaggcagcgcagatgacagcaaagcgatgtcgatgtgtaaggagacgaggacggagatcctcctatggccagcaaatggtgacactctggattcttgcatcagtgctcctcctgcaggttccagaggtcctgggctgggcggcgatgcttctgctatatgagctctatggctcctatgtgagtctagggcagaagtacagggcttcattgctataatgggttggtaattgggctggtgttatgttgtgttaaggtagtactaggctaggccagtgaggcatagcacgtagggtccttggaattttggaacacgaacctcgacccatg

SEQ ID NO: 201612 - DNA, 312 bp, Zea Mays
tgtatggcaatgtgatctctgaatatcaaggggccaaatcaatggtcgagtcgttgagctccaagacagatggggatattgcatatttgagaagctcactggctgagaaggccacaatgctcaaggaaatagaatacagtaaggcacgtattgaacaagaaaatgaggatttgcggtcaaagctcaaggagtatcaggaggcacagattggtggtgcagatgctgttgtatcattgaaaagtctgcgggagaagttccgagccctggagcagacacatagaagttgcaccgagaagctaagaggtaaggaag

SEQ ID NO: 201613 - DNA, 370 bp, Zea Mays
ggagacagtctactgtcagcagccgcctggcttcgtcgatccagcggctcctgaccatgtttgtcttcttcagcgctccctctacggcctgaagcaggcaccgcgagcttggtaccagcggttcgcctcgtacattcgtcaactcgggttcactgcttccgtctccgacgtctcactctttgtgtacaaagagggtggggacatggcctacttgctgttgtacgtcgacgacatcatcctcaccgcctcttcgtcaactcttctccagcgcatcatcgacaggctccactccgagttcgccatgacagatcttggggatctccaccacttcctcaacatctccgtcgagcgcctccccaccgggatcttc

SEQ ID NO: 201614 - DNA, 290 bp, Zea Mays
cttccttacactactgctggtcaattccatccttctatccttatttgctggtcaataaaagtaaaaagtaaatgtaccgacaattagatagcacatacaaagttgacctcatctattagcaaaagaaaaagggcactccacagtataaaggaactaaatgcagaaaagtatccaaaacttaccttattcagatatattgaatggcaagaacaattaaactgcaataatgctattaacttttgtattgtcatgagtcaagaaacaacctatctcaaatacttaggtttacg

SEQ ID NO: 201615 - DNA, 321 bp, Zea Mays
gtttaatctgtgcaacaacaagcttcatggcccgatacctgatgaggttggaaatatgacagcacttcaggaattggtaggatacagtaataatctcactggctcactacctcgttcacttggcaagctgaagaacctgaaaaatattaggttgggtcagaatcttatatcaggcaacattcctgttgagataggtgcatgcctgaacataactgtgtttggtcttgcgcaaaacaagctcgagggtcctttacctaaagagattgggaggttgaccttgatgaccgacttaatcctatgggggaatcagctttctggtgt

SEQ ID NO: 201616 - DNA, 289 bp, Zea Mays
gcatgatcctagaacaagacatatggaggtggtctatcaaattctgagatacctgaagggaacccctggcaaggggttgtggtttagagcgaatcaacacctgaatctggagggttactgtgatgctgattgggcaagcagtagagatgatcggagatccacatctggatattgtgtgtttgtgggaggtaatcttgtttcatggagaagcaagaaacaagctgtagtgtctcggtctactgcagaagccgaatatagagcgatggctttagctctatgtgagatgatg

SEQ ID NO: 201617 - DNA, 379 bp, Zea Mays
ctgtgtttttacatcccactgctgcagaaacttctatcactctagacattctgcaactttttggagatgcttctggcctcattaataatgtgcagaaatcaaatgcatatcctattcaatgctcggaggagattttgatggaggttcagagtttgctgccttgtgagatggcaactttcccctgcaaatatttggggctacccctttccttgcataaactttctcggcagcagtttcagccctttgttgaaagaattgcagatcaactccctaattggaaagctgacttaatgtctagagccggaaggagaattcaggtgcaacatgttctcacaggcatgacagtttatttagcaatggcaattgacatcccccaatg

SEQ ID NO: 201618 - DNA, 557 bp, Zea Mays
cacaacacggtatgcacagtggtggaggcagcaacttctgccttctggcattgatgctgctacagcaagtgctccagtagagtggaagacttccaagcgcaaggtgaaaaagacaccagcggccatggaagctgaagctgagaaggagcgtaagatgaagaaggcccgggtctctcctacttatactgataaaaagcgcaaacttgaagagttgtatgatgctaagttgtcggattggcttccaactgcaaggaatgagattagtgacaccactagtgatatggaatcggaggaggccttattgcctaatgttggaactacaaatgatgatattgtgctactcatgccaaggaagcagacaacgactgcacctgtaagggcattgatggataatgacatgatcctggctctaggagagagaggaaactttatggttgatgagcctccagacatccaaagtgaacctgaagctgttgtccctgcaacgctggatgaggaaatagttaaaattcctgaggttatttctcttgatattccagataagccagaagaaggag

SEQ ID NO: 201619 - DNA, 300 bp, Zea Mays
tatgatgcccatgacagtgtattgcctctcagcataagcttttggtggtggcctttcgttttcaggtgtgtgtttgtagggataaacaagctaagatttcgagaacaaagtggtggaagaagaagatgaagcaaacaacatgtgggaaaagataacaacctacaatcagaaggtggcctcagaggtgtgtggagcaaccaaaggaagtagaggcgaagctaaagatacttgatggtggaacgaggaagtctaaagggctatttaggaaaagaaagaatgttatagacgtttgtaccatca

SEQ ID NO: 201620 - DNA, 312 bp, Zea Mays
gtggcaatttgctacacccagcatatgacatcctcaatgtcggtcgctctggcacccacttgatcggctattggtccaactattcaggcctttctgtggctgctcctgaaattctgtatcagatgtcaccaaatgcgtccacaagtacccatcagctgaacagtgtggtatggcctggtgactccactgatatacctagaggctgggtgttcccgaacgatggccagcctctaagagttggggtcccggttaaaccaagcttcaaggcattggtgtcaggcagcacccctgattctgtgaggggttactgca

SEQ ID NO: 201621 - DNA, 626 bp, Zea Mays
ggatggtagagtgctcagccctgctgagtgctggctcaaactcagactcaagaaacaggcattacttttatcatcttgcaagagaactattgcaaggctgagagcgaggatttcatggctcaaagatggagatgctaatacaaagttattccaccttcacgcccgtcaccgtaaaagaaaaaattttgtggcatgtcttgttgatggagatcaaaacctaaccagccatgaggagaaagctgcctgtgtggaccgtttctacaccaatctattggggaacagtatagacaggatacgggcaattgagttagaggctcttggaatgcccagttttgatctgacagatctggaagcccccatttcagagcaggaagtttgggatgccatcaaatgtctgccctcagataaggcccctggccctgatggattcacaggaaggttctacaaggcttgctggacaattatcaagaatgatattatggcagccatctcggctgtttggggcaggaaatttaacaattttgggcgcctgaatacagcctatatcacattgatccccaaaaaagacggagttgacaatattaaagatttcaggcctatcagtttggtgcacagttttgccaagt

SEQ ID NO: 201622 - DNA, 292 bp, Zea Mays
cacgtttcggtcgacagctgcatgggctggacacgcggcctccacgccaaggcaccacgcacaacctaggctatggctcattgaaaaacattggtcggcgtcgcaccggcaggcggcagcagcaggagacaagcaggcaggggaggtctctgtggataactatgacgctttagatttttacagcgtgaatctcacggcttggctagtagaaacattccggtcacaccctgatacactcctagcaacatcctctcttatcttgaactgctcatccacgcaccagagaaatctc

SEQ ID NO: 201623 - DNA, 315 bp, Zea Mays
gtcgagatggtggcccaggcacaacactatagccgtgccgtgccaggcagtggcactatactaaccgggccgggttgtgcctgggccgtgctttttcgtgtcatgcctgggctggcccatcgtgttagtgccaaatggccatctatagcgtggcccctgccctgccccgctctctgctcgccccctgcccaggattgaatagataatagagtttacgtttgataatttatgtgagttgtgatttagttctagaactactagttttgtatttcttgattgctccaggtattgatgcccttgcagttgcttgtagga

SEQ ID NO: 201624 - DNA, 279 bp, Zea Mays
gcatgaccttgggagcagagggggaggaagctctggcaaacagatgatgggttaagacttgtcggcatgatgattaggctcaaagaaaaagggattacacttacttggggccctagaccttccagtgaccctggaagcgagacgatcgccgttcctactcctgctactgttgttgctgctggtgtccctagggtgatcacccccagatggtggtggtggtggcggaaccggaggactgatgtgcctctgcacgccatgggcttgggagctggcctcctc

SEQ ID NO: 201625 - DNA, 282 bp, Zea Mays
ggcgagagcaattcgggccagctgggcgaggtgcggtgcgggcacaaggcctagctagcccacggggaagggaacaatgggcaatagcgtgaaggggctaggcccacgtgtcagagggagggggagggaaacggcgcttagcggctattgatggggggagggcgaaccggccgccggtgaggttcgcggcggttctccgtcgttgctctggttcccgggcaatggggaggtgtgctagcacaaggagaggtgggtgttcatggggccagactcaatttggcc

SEQ ID NO: 201626 - DNA, 530 bp, Zea Mays
tgcgcagtcaaaagactgttgcatgttgtcctgctgcaactgctgctgtcctgcagcagtcaaaactgcaactgctgctgaccacatgacttattccagcatataaaacccctgatgttatatgccgtaaccaaaaatataaattacaccaaaaaattacaatagaaataaaagtgtgtgcggcaacgacgcgcaaaaattctagttttctacctattgttgatcaagcaatttcctcacttacaaggagacttgagcagtatcatccaaggctatcagaaaaattttgggttcttatttacttctgaagtattgcagttattagataaagtcttttttgataatatagaggctgccctaaaaaaagatggacaacctgatattgatgctaatgaattgtatacggagttgaagtttcttggaaatttcattccaaaagaaaagatggggcctatggaaattctaaaaaatttaaagcgacatgattcttttcctaatgcaagtagtattgcatacagagttctattgac

SEQ ID NO: 201627 - DNA, 332 bp, Zea Mays
cgggtgaggggcggtgacgacgcaacgtgatgcgagcggaccggtgggggtggggtcgatcgggtgccgatggggtggagaatgaagatatcgcgtgcggagagggccggggatgatgacgcacatgcgatgcgggttggggcacgggatgacgatgctgcacgatgcgaacggggtgggagcggcctcccaactttacattgcgacacatgaaactgtgtgtgcgataaaagtgttgcattatagtagtataaatatagatttatatttatattcgcggaacacaaaaaaaaaaaaactcatttgacgtccctgtcgacttgagaaacaag

SEQ ID NO: 201628 - DNA, 372 bp, Zea Mays
aaaaaagaatggtacatagactctttcccatgagctactgtgctggtgataaggcataaccaaatcttctttagaacgaaataatggctagttctgatatctgcatagtatgaaactgtcagagaatcgaacaacggagacttccatgctccgcaagtctgcatcaacctatctcgtacagtcatactaggttacttttgtttccaaaagttcaagtttcggatatctgaaataaataatctggaatatttgctcaacaagatttgataatatggtaatatgcaatacttcagtttggaatgtggcggagaacactacttttttggttggttaatcttgtatatttagtctgtagttgaactatgcttccgg

SEQ ID NO: 201629 - DNA, 301 bp, Zea Mays
ggggttggacgacagcgatccgagcgagagattgacggccggagacattgcacgatgagcgccagggagccgggatgggagcaacactgtgggaccgtggaagccggcatcctggccgaaggccaaatggagaaggatgatgtccgagcgtggagaggagggtgctgagaacttttctcgccgacagtatagcagggaaaatgtcctaagcaccaacttgaggaagatacgtataggcttcagagccaatgtgaagaagagaagacgtacaagactggtctacagaaatattttaggaatt

SEQ ID NO: 201630 - DNA, 404 bp, Zea Mays
gtttttaggcagaaatgagcgcgctttggaacagttgagctcgcaaagtttggactcttgcaggcaagcaacagaggggaggcaagggagatagcatcacgaacgatagtgcatttatccggatcacctaacccacggatgttccacgatagcacattacaacttttacaaactggactcatgactgaacaaacagaacaccaaaggagcacacgaccacaatggcagaggggcacacacaacaccgacctaaggagcacaaagacaggcacgacctgacagcagacttagagagacaacaggttgacattacagaccatagaccgacaacagatcgactacagttgtgacggtagagagccccgccactgacagccaaggggagagaagtgatcattccgcca

SEQ ID NO: 201631 - DNA, 450 bp, Zea Mays
cgctggcttggagggtgggacccagccaccgcctttagcaccatggcgatgacaccacccccgtccgactgggtggtcgactctggtgcttcttaccacaccacctctagcatgtccacgttatcccgctcctcccccatccctcccatccctcctcgatcgtcattgaaaacagttgcactctgttggtcacctcagtaggtgctttagttctccctggaccgttatatctcaacgatgttctcgtagttcctcacattactcacaaccttctttctgttcgtcggttcaccatcgacaattcttgttccattgagtttgacccttttggtttctctgtgaaggatctggccaccaggacccactcgcccgctgtgatagctcggagcccctctacacgcttcgaccttcctccaccacctcgttcactacttgacatcgttgtctcgg

SEQ ID NO: 201632 - DNA, 413 bp, Zea Mays
gtttgtatgtaactggaaatctagagtgcccccaaagcactagaatgtagtgcagctagcaccttggtctgtagtgttgaattactgcccaaccatagtctccctttgtatctgatcagcccatcttgaagacactaaggtgaacatttagccatggcaagtgaagtgagcaatttggacgcttctagatcatcctggtatccagacgcgacttcctgtaaccaagcaggaacaatagaagacaatgcaaataggtggccttcagggtgtggcctgcgagacaatgcgtcattaacattgttctccacccctttcttataaatgataggatattggagccctaaaagcttagtaaaaaccttctgttgccagggagtgtgcagcctgtgtgcatctaaatgagagaggctacg

SEQ ID NO: 201633 - DNA, 991 bp, Zea Mays
gggcgacacaccggccaggaaccagactttctccgacgagaacggcaagacggagggcggcgaggtggcgaagccggaggaccccgacaaaaaagtcgagcagagcgccgagcagacggcgatcgatggcaacactaccacaagcggacaggatcaggacgagaacaacaccgacaagaacaccaacgaaaccggcggccaggctgacaagagggaggaggaggcgtccactgacgacaagagcaccggcggccaggctgacaacactactgtacaagaggcatccaccactgacgataacagcaccggcggccaggctaacaatagcaccaaggagacaccgacagagtcaaaagagaccgttggcggtgacgacggcacggcccagagccagacgagcttcgacgacatgaatggcagtacgaacgactcgcagcccatgaaagaagacgggaaggtcgccgagaatagctccgatgaaactgccagcggcggcaaggtggaaagcacagacgacgacgcgacaaccggcgcggcgtcaaacaacgcaacttccggaggccagaacgtcgcggccgagaccatggcatttgcagccgcggatgatggcgccaacggcaacatcactgaaaacagctacgcaacgaacagcagcgccacgactgaagggaagataccgacggttggagaaggagacgcggcagagaaagccgacctgctgccgagcgggcaggcggagctgctgaacgagacggcgtcggcggtggcggagaacggcgcgttcccgacccaggcggcggaatcgagcgaggagaaggaggcgctcgcaggcaagaacaagaagaagaaccagaagaaaaagaagcagaagagcaaggaccagggcgccgcctctggcgagacggcggaggggaaggagacgtacgcccacacctggaagctctgcaacgcgagcaccggcgcggactacatcccgtgcctggacaacgag

SEQ ID NO: 201634 - DNA, 1112 bp, Zea Mays
ctttgatatatgaatgagatgtttggaacttcctgttggcccatgttataaccatgtcgaattttttgcaggcatttcagaagttaatttatgtgtccaatcttgtctttggagatgcatctgtattcctacttccttggaaacgtctgtttggggtgactgattctcaggtaattaattataaaaatgcttgttaattttttgcatgccttctctcagttttatgctttgatctcacagagttatttgttctgtattttgaagttcagttcgttttttctggcaacgttgctctttgcatagttgttatgctgcttttgatgcagttgatatttcgaagagtttggacaaatgttcatcaagtgttaatgccactactcacagtccaaataagaatgtctttctttacttaccatggtattaagtatcatttgacattatgtttctagattgacattgctatgagggaaaatgccaagaatttatactcggtgcagctcaagtctattggaagaggtaatgctagaacacagttttgtttaggtgttagttcaattataaagtcatagtgtcatattattcataagttttgctttatcaagtaaatcatatagtgtgctgtaaagacagcaatatcaattttgttgttgttatatttattgtttgatatatctcttattgcatctcaagaacattctgaaatcacaaaatgctctcggtttaggtcttgacataggcacactcattgaagtaaggagagcacaacttgcatataaactttctgatgaggtaactcttttctcaactctgttgctgcttatttgttttttcttcatttgggatgaaatctacatcagtacttatagaacaatgtcattttatatccatgctatgatgcatatacactagctgagagtttagacaaaaataaaaggtcaattatcattggtgcttggaaaagataatagagtcaatgtaagcatgtttttgtttttaagtgacattctaaatttcttgcagattgctgctgagatgttccgtgagcacgcgaagcagctagttcaagaaaacatttcatcagcattagacatcttgaagtcacgtattccgta

SEQ ID NO: 201635 - DNA, 440 bp, Zea Mays
aacaaatacaaatgaggctaagcatcatctcagccaaatctgcaataaaatgctaatagaaacaattaagagctaacctgcaccacgctatctagaagcattgtgagcactttgaatagactgaactacctaggcttagtgtggcatcaatagtatcctcattaggcttagatgcggcatcaatagaaccaccctcatcagccttagatgcaacacaacagaaacacccatatatagtacacaaaatgttaatcatagctacaataatgaagttccacattaaccttagcagtccaacaatgcagtcctcatcagcagcaagtagtagcaaatagaagcagcaagcagcagtagcacacatagatgtagaagcaagcagcagcaggaagcagaaggttgcttctctgcctcatgcacgtacacgaccagcagtccagcac

SEQ ID NO: 201636 - DNA, 1160 bp, Zea Mays
ttaccaacttggtatgctggagtgcaagaataagagcaggcccaatcgcttcacagctattgggttctcggtgccgactgtagcagccgcagatctggagggagcagcgaaggcgttcatcagatgttatccagtgagcacccttcaggcccctcatgttcctccaagtctggtggcccgggtgtgagcgctgatccggcgacgtccgcggcggagcagccagcgtgccaggatcccagagatctgatccaatcgtatcccaagttctccataaggtgaaagatatatgtgtatatcctctttgattcaatacctttggagagagattatttttcggtgtttaagttcttgatgctggatctctgtctttctgatgcgtcgattaattattggctgctgctttgagggatcggattgggtatgaatggttgctttcagggttaatccgtgttattgtccgggggtgtttaattagtttaattttctgctgattaatataaaggtggcctttttttccaccccagaatctgaaaataaaaggatgctcctctcattaatctttgtccactgcctactattggttttcttttccatatacgtggtggttctgcgataaacaggcaggcgacatatttttggagatttcagttttgatatgacagcatgttcagttggtccacgttgatgttgttttttctctcttcttttcaacctattgtggagggtttgaatcttatacagtttggcaacactatacatgagtgttcgtcatataggcacgtattaccatatgctaatgggcccatgtttctgtccctatttccagagattatgtttttgcttcaaggagcaaaggcatcaagagaagctggcctttccatccacactcgttgcagctttgcctggagcatggtgtgaaggatccattgcctccatttgagcctcccgatttgatccggtctcagccattaaatatttccacagacattaagcaatctgctgcgtgctcagaacccatcattagtgttggtctggtgaagaccaaagatgccggttcgtcaaacgagtatacaggcgatatcaacttccagtcatgccagccagtagatgagtcacctggaccttcgccatacacatcaccggaggatgggaaatccggt

SEQ ID NO: 201637 - DNA, 316 bp, Zea Mays
ttggattggtcgcaatgtccatatatgagctccaattcggatttgaaattcaaaatcagaaaatggacaaacattggaaaactgagtatcaggccgcggaccgtccgcccatggaccgtggaccgtccgccgtatcaggaactagacagtccggtgaggaatgcagactgtctgaattcatcaggctgcaaaccgtccgccgcccctacgaggaccgtccgcgacaggcagtaaaagtcgggcagaggcagcagacttattatttccactcttgcaactccactctcgctctccactcgccaaaagggtctccttt

SEQ ID NO: 201638 - DNA, 569 bp, Zea Mays
caaaaaacacaatgaatacttttactgggatgtggattttgaaccaaaaacaaatgtgtttcggagcatttttttgtgtcatgcaagtcagcgtgcagaatacaaggattttggggatgtagtcacatttgacacaacacacaagactaacaacaagcatatgttgttggccatgtttgtgggttgcagcaataatttgaaaaatgtgtcctttggccaagcacttcttcgggatgaaacaatagacacattcaaatggctttttgagacttttaaaagttgcatgggtggtcagcagccttttgtgattcttacaggtatgctttggctacaaaaaaatgcttgtcacataattactgttgtgttgttgcaactgtatctttgaagatgattgcaatattttaaactgcttgattgcaaacctattggggtttttttttgctgatttttatttttgacaaacagatgatcatgcttcgatgaaagaagcaataaggattgtgtttaacaagacacaacaccgaaattgccgatggcacataaccagaacatgggattacgaactcgag

SEQ ID NO: 201639 - DNA, 411 bp, Zea Mays
caaacactgtcatgtgcttgtgcaatggctcttagaaagccttaagaagttcgaagaactttagaacctctggcatatgtggatcctcaaaatgggggtgttaaggtggattctcatataatcgtctagcaggatctcaagtaatacgtattcaagcatctcttccatcctatggtagttctcctcttcatctgactaaactctcgatacatttcgatgaggtagttcctcatcgtagtacacccacacctcatagcaaggcataaagccattcttacaaagatctattgacatagtcctcttatcatggaaataaatgttctcacacttgctacaagggtacctaacgttagtaccggtctccaacctaccaaaagcacaaccaagaaattgtcggtcttggcaacccac

SEQ ID NO: 201640 - DNA, 621 bp, Zea Mays
gtccatcctttcagcatcatttggaactaccaaaacttctggatccattggtgagcacccaccaaccgcagacatagggggcggcgaaggaagagggagctccgtagctatggcatcaggtcctctcctccacacctcatctcttgcccgcagctttgaaacattcgtatcgtggaatccaggtgagtgcttcctcttcttgcttgctggcaacgcacctccatccctgcagaccccaagacccccatcctccctcagcactcgtgggcgcccaccagactccgagccgctatcgcttgagacctcgctaggctccttatcgtccttcctttttgaaggtcggctcatcagtggcgcatacggcgagcggtggcggatgtactagttgtccacttcacggcccctgctgccatcacggtggcgatccgcaagcaagaatcccacagaacggaaagcaaagtggagcagaacgccgggatccgcagagcacgtacctgggaaccgcagacgagcagaacagctctcgctagaggacggcgaagatggtcgaaaccctagccgccgctcccttcagcgataggaagggatcacgagacagaggacgcgcgcgccgtggagggt

SEQ ID NO: 201641 - DNA, 515 bp, Zea Mays
tgaataccgttcaccatggtacagtacttggggggggggataaagatcagcccctcgccggcgataaggacgccaccgcggcgtgggatgggtcgccgacgtgtgcggtaaagggttcctggcgacatggccaaaagttactgaggtggcgcaacccggttaaacggcggccaccggacttgcgccgtggctctgccgtgcgggtgagctcgccagcacgattacagccggtgaagctcatccgattccggccggttgactataaattgagggcgagcgttgcttcttcaccgtatcccacatctgagccactaagcgcccgactcaagatcaccggaaaacccacgtagcctccaaatccctcgctcccttgttcttaactccgccacgaagaacatctccgtggccagctttcctcgagtgagtacttacccaattgtttcatgttcttgcttgctattagccccctattgctcccagtaccaaccaatcgaacttaagccgaaacctttcac

SEQ ID NO: 201642 - DNA, 329 bp, Zea Mays
gggtgaataagagcagctttccaaccaggcaatcgatctgcaaccttctcaactagagggagaaggtccctcttggagagctttctaatagacaaaggcaggcccaagtacttgcaaggaaaattcaccaagttacgagatagcgtctcttggattgtcaaaacctcctggtcattgcagcaaatcggagtaaacgagctctttgctaaattagtaacaagtcctgaggcttcaccaaaaaccttcaaaacttgtttgactgtctccaagtcgctcctcaccagatgcataaaaagaaccacatcatcggcgtataaggaaattctctg

SEQ ID NO: 201643 - DNA, 333 bp, Zea Mays
aaaaacacaaaagttatagccaagaggccacacaagaattacaggggataacaagaggagagaaacatagacaaacataaaagccccaaacacacaatcacacatgaagcacaatatcacttaggtagcaacatctggcagcgacagaccattggcaccagccagcttccaaagcataatatcatgtccaaccatggctaaggcagcagaaagatttggactcatcccattgaaaacacaatcattccgatgcttccaaagacaccacgcccccaagatcactatagaattaaggctagcctgagaagatccccccaagggagtggagatgcc

SEQ ID NO: 201644 - DNA, 487 bp, Zea Mays
tcatatgacacctagtgtataaaggtagcctcactaatcaatcaagaatattaagggctttgctcaccaatctggcgtcaattagaacctcaagatacaagtgagaaccctagcaacctgagggtgatcaaaccttattttgcctgtcactattttgtctgcataccacatctccacattgcatgcactagttctatttggttttatttactagtaaaggattaaggatcgaactcctgcaagtgcacacaacattactaaatggaaggggtagaaggcgaaggaggtggatactagggcaacttcgggtaggaatggtgtcaatatcttgatcgacatgagccttaaggatggagtagttgatgttaggaggcaaggtgacgtgattgtcctagtttggttgatagttggagatgtggctctaaatgtgatcaacgcctatgcctctcaggtaggtatcggtgagagcaccaagaggaagttttag

SEQ ID NO: 201645 - DNA, 329 bp, Zea Mays
cctatctcctcaacatattacccaccaaaacacttgcactctctacaccacactttgctctcttcggccacaacccatcctatgagcaccttcgtgtttttggctgcaaatgctaccccaatctttctgccaccactccacataaattatctcctcgctcaaccccttatgtcttccttggctattctccccaccacaaaggctacctatgctttgatcgccaatccaatcgtaccatcatttcctgtcatgtgttttttgatgaaacctcatttcccttttctgaggattccaatccacccacaccagcggcctttgacttcctcgat

SEQ ID NO: 201646 - DNA, 548 bp, Zea Mays
aggcaacagttaaatataaaatcatcacagaccggtagaaaagtctcagaattattaattatcatccacagttccagattcagtgtcataggcatagagcaaagtattaggcatagatcaaagtattacgcataaagcaaggtattaggcatcatagacataagactggtctgctcaaatctttgcaaggtgctgccttagccaaagcacacggtgtttaggctccatcttcacaaagccatcaccttgccttttgttgtccaataggtaggtaaggcaagtcatcaagtcctcatcagtgaaacctggaatactcatgcaaatttgatacagatcagagtggacatctgtggtctggactacaacaggtgcttggacagcttcagccaatttgttcacaactctagtaagtcctgtcataatccccagctcttcatcactgagtctccttttctttccatatgatccataggaactaccagcaccactatgagaagggctggcaccagcagaaccagaagcagtagtaccaacaagacatggttctt

SEQ ID NO: 201647 - DNA, 354 bp, Zea Mays
taccttgctagtgtcatgtgccagtagagaatcttacatatgtcgacaccattgattgttccacctatcgacagatggatgtcatcttctcgtacacacacccattgatttttgtgagctatcaacattgttcttgtaactgtaaaccgctgttggatccaagataggaaattgatgataccctgtcattcaaccatttgatgatgtctgcaaacacaatatctatgttttcctcgggttctcctgaagtcaaagcatggcacatcccagggtacaactttagtgtcttgtccttgctcgtggctattgtatatagtgcctcacttactgtggggtcagttacagcatcatcac

SEQ ID NO: 201648 - DNA, 620 bp, Zea Mays
ccacgcgtccttaagcatctcatcgtgttcagtcattgtcttggccaccgcttctacacgcgtttctccctgcttgtatgaccttatcgttggcggatcacgactatacaccagtttgaatggcgtatcctttagggatatctggaaggcggtgttgtaggtgtactccacccagggaagccaccgcagccattggcgtggtcgatcccctgtgaaacagtgtaggtacatggatatcaccttgttggtggccttgacctggccgtctgcttggaggtggaaggcggtggtcatgtggagcttggcatcggagagggtgtggagctccttctagaacgcggatgtgaacactgggtcgcgctgcggaattccgtgtaggcgaactatctcctcgaagaagaccttggcgactccttctgccgagtaggggtggacgagggggatgaagtggccgtacttggagaagtgtggtccacaaaggtgaggatgacagacttgcctttggcagtccatcgttgaagtccggcgcgatgtcggtccaaaccagttttggaactggaaggagaagcaggaggccgcctgacagcatgtggtcggttttgtagcgctggcatgtgagg

SEQ ID NO: 201649 - DNA, 318 bp, Zea Mays
ccgagctccgcaatcgaccggatcggattcgaatcccctccttcgtcttccttccctgatccccgctgctgatattggttgacaagttctctttccaattagctgagatgagaaaggcagacggtgagatgggttctttccttcaccgcgtgcaaagcaaagctgtgggtgggtgggcggtggcggctgcgtctgtcagcagtcagcaccaggcaccagcagttgagctcttctcttcttcctcagatctccatctgcacgcgcacggcggggaagaggaattgaccttgactgccgactccggttgcttagttttta

SEQ ID NO: 201650 - DNA, 274 bp, Zea Mays
atttgagagtcttttagtctgctgtgtggacttatgtcatttgagagtcttttagtctattgtgtggacttatgtcatttgagagtcttttagtctattgtgtggacttatgtcatttgagagtctgtgttgttactgcttcagttttatgccaaactatttacatgatatgtctgcattgttattgtgctgatgctagtagaattaacaagacttgatgttattcacttattcacttgtttctgtgaagtatatttttctcttataaacttat

SEQ ID NO: 201651 - DNA, 283 bp, Zea Mays
caagggaccagcagagaaggcctccgcgacggttgtggtgcatcacgacgggagtgccggcgcaacgcacggttgtcagagcggagtagacgaagtagtcgaggacgagacgatgatgctggtgacgaggttgtgctggacgaagcgaagaggtaggcgtggcgacacatcgaggttcatagagtcgcggcggcgagaaccacgacacataggaaacgagcctcaatggcgcaagtggagcgcgatggcggtgtttgtcggcgaagaactcgatgacaaatgc

SEQ ID NO: 201652 - DNA, 377 bp, Zea Mays
acgaatttctcatcctgatccgcaacattttattccatgtgataatgtgtagcgccaagtttaaatgacacaatcaataactcccaaacttctaaccaagtcagtcagctgtctatctatggactacgggaatagctcgtccatgacggccggtgcgatccactgaatctggatgtgggtaatctcccagagctcatcgccttcccgcggcaccagcacccccttcgacttcatctccatgatcatccgcttgagcatccgcggcacaagctcctgcatctgcccagaaccgcctttcgtatcgagatcccacttcatgcatgtgtccagtcgccgtatcactccgagccagaaggtccggaaccccggttcctgcg

SEQ ID NO: 201653 - DNA, 290 bp, Zea Mays
tgttgtgcagaggctcccatttccacccttcgtgcaattttccaaatcatgtgaatcccagtgaatccaagttgtgatatgtgttccctagtggccattgagtgtccttgcaggttcctagctccttcgggagggttttcccacctcaaatagccgtttcaccgaaaccctaattcctcgcacgccacgtgctcggtgaaatgcccaaaccagccaaaaatgcttcaattgaacccaaatttttcaggcaccttcacaacacttcctgtaacatacttgtcaaatttcac

SEQ ID NO: 201654 - DNA, 350 bp, Zea Mays
cgacgtcatatggcggccagccttcggtggaggtcttcgccaagcaatactgtctgcactggcagaagagaaaaataggacagaagattgcgcaatttggatcgtgcactttcacgccgaagtccgggaagacttcgatggaggatgttgagctggtcccctgtgcctggaacaagtggggcaactggtgggactactggttttatgtttcggaggctgaagtcgaagatcacccagggctccctgccgccattatgtgttcgcattattatgtggcgtacccgtcgtttgaagtggcggaggatgatgaaaatgagagggcccttcggattgctgcccgctcgagtagt

SEQ ID NO: 201655 - DNA, 277 bp, Zea Mays
ggaaacgcagccccctaatgtagggatattgcctaagtaaatatggaatatatcttctgtcagctaatacccccctcaatctggacaccggtcaagtaagttcaggagagacagaggtaaacttggggctcaggccatacgggctagagcctcttcagctaattcgacgaagaccttgtctcgagaaagcgcatgcctaaaacaaggacgcaggtgatcgaatgtacgtcagcaagcgaaggctaattcgtggagaggactacaccgacaagcagag

SEQ ID NO: 201656 - DNA, 489 bp, Zea Mays
tggtcctgtcctggtataccaatttaacagaatgcattgaaaactaattccacagtagttgggagctagaattaatggatacacatgccattgactctgaacatgaagcagaagcatcagaaccaaggtcattgaacaataggcccagtgtcaggtgcgcttttcaactgaaaaaaaatacgatgaaacttttaccaagcctgatgtagatttatcagtgatcacctatcattcacagtggtaacagagaggtggtggtaggaaggaattcgaacactcctgttcatatcgtaaatacagaagatgacaacagcaagacacatggcattagaggccgaatcagtgctaactctacggttgcagtttctgctaatgttgatgtgtttggacccattcaaagtccttctgttcatatcatgaatatagaagatgcagacatcaatacccatgatattacaggccaagacaatcctgactctagtttgttgc

SEQ ID NO: 201657 - DNA, 356 bp, Zea Mays
gtatccaagcatctcctcacattcagaccctgcatacaacacctacctgttctagaatgatttcagaacatttttcagtaggtactttttacagttatgttatgtactagaatgatttcggagaccatgtagatatccaaaatgaatctttttgttgtgaccgaagggagtaactttttaggttttgtggttactttttcaaaaattaactctttcgttcactataactacaaaatagtaagccaatgtactgcaagaacaatgttcttcttgaatactcaaaagaacaatgtccatcatggattctgctacgtgaccatgtggtccagcttgtttggtacacgaggccatatctt

SEQ ID NO: 201658 - DNA, 410 bp, Zea Mays
caaccctgggtgggagaagcagtcacgactcgcccgagatgaaccccgggtgggagatgcagtcatgactcgcccggcgggagatgcagtcatgactcacccaaggccaagcctgaatgggagatgtagtcataactcgcccgaggccaaccctgtgtggaagacacattcaagacgtgcccgaggccaacctcggacgcgagatccaatcacgacttgctcgaggccaaccccgggtgggagatgcagtcacgactcgcccgaggcccaccccgagcgggagatccagtcacaactcacccatggccaaccccgggcgggagacgcagtcatgattcacccgaggccaacctcgggcaggacacacattcacgacttgcccgaggccaaccccggacaggagacgcagt

SEQ ID NO: 201659 - DNA, 574 bp, Zea Mays
ccggaggttcctacatgagtagggtctgggaagaggtaaaccgaggcaagccttcccacagatgaggggaggctacaaatctcatcaacagacaaaactcatccatcggcgttggtagcgcccagatgccacatccagatctggcactggacgcagcatccaccatccatctgtcctatcttttgatccacagttcatttaatttagtccacaagcaataacatctctacttctaattaatccaagtgcaataacatctctactgcacatggcacctaagcttgtgtcaacttgatgatgacacaatcacctccagggatgctcttcctcttccccttgatctactccttgacccatgaggaagcaggagcagccgaacaggacagggtcagcagcccagcaaccatgacggacaacttcttcatgttaagagtggtggtggcattgatagggggcgtgtatgctgccatttggttcctgccaagtcagatctctagcatctcaaatttggcataaacagcactagattggtgcttgaagagatgaggtgtgaggagagaggagagcacgggag

SEQ ID NO: 201660 - DNA, 294 bp, Zea Mays
ctcctaagagccgaactaagattttgaagattggagatccgcaggccacctaattctttagggaggcacaatttagtccatgccacaagacaatggccaccttttgcatctgtctttccttgccagaggaaacctctccttattttgccatttgccttaatggtccatgaagggaggtcgatggccattaccaaatacaccagcatcagggttaacacatgttgcactaaaatcatgtggccttccttagttagtaggtcaggccttccaacctgacagccgcccagccaagcg

SEQ ID NO: 201661 - DNA, 340 bp, Zea Mays
ctcaaattgcaaccttatgtgcaaagttcaatggttaatcgtccttgccctaaactagactataagtactttgggcaattcaaggtgttgaagaagattgggtcagtggcatatcatttggagctggccgagaattctatggtacatccaatattccatgtttcacagttcaaagctttcataccaaatgcagttcctgggttttcggatctgtctcaagtagagatcaagcctttgtacattatgggtcgtcgtatggtgaaaaaagggagtcatgcagtgattcaaattcacgttgtgtggtctcatttaccagaagatgcagctacttggtgtggca

SEQ ID NO: 201662 - DNA, 443 bp, Zea Mays
caaacatgcataactaagagcagcaagacaaaccgtacaaaaaatagtatgaaagaaatatatgcagaataaacttgaaagagagacaacaaggctccttaccaaaagaagatcctgaactgtttcaaaagcggtgtcgccaaccaggtccaacagttcaccagctatctgcaaagtgggagcaccatatgattgcagaaacaaaaattaaaacagaggcaattttcagtagaacgttaaaaacctcatcgcctgctttatttgataggagcactctgcacaaggtcattgtaagttcatctcctgagagcagggagccaccacttttagttatcaaagcacactgatctttcagccacctcagactcacagaacccctaagagcagttgaaaggtgatcttcttgtacctatattgttcacttcagggtaagttgctgcaat

SEQ ID NO: 201663 - DNA, 496 bp, Zea Mays
gatcaagtatatcaccatccattggcctagaatatcacatggccagcgaagctgtgcacacacgtaggtggtatggctggctcagtcggccatggcgctgcgcgcgcggttcggtgtggcgcgcgatgttccggtgctttctatggctaagactatctccaaccgagtagccaatacaatacgcatacacaaattgtctggccttgtagcactgtagcgcttgggaaatgcttccaacggactatgcaaactatatacgcatctacggcgctggacccctcggcacctaaaactgagtcctctccacccacgactcaaaccctggcaaaccaactgtcgggaggggaggccgaagagagcagcgagttggtggcgcagacgaccacctgcgacgggcgcacacccccaccggcaacggcgcgcgcggtcaccggcaaccgacgcggacgaccacatctgaggtacgtctctctctcaggttcattggcccttccgc

SEQ ID NO: 201664 - DNA, 340 bp, Zea Mays
cccaatcagcagggcggcgacgaagcagagctccaccctgggagctcgctggatttcctccgcccagcgcactggcgtcaaaatccaaacgcgaacgatgctaaacattggggaaagaaaggcgaagtgatggatagtatccttaccggcgatcggagcgatagtagcatctctgcatctgcccacggcgacacaccagcagcccgcggaggcaccgcacggtgggaggccatggcagacccttagatctggcaccgagtcagccatcaagcagccggatccaatcccaacagagttaatgacaagcagtaaacgaaggggaggcgagtggagattcccc

SEQ ID NO: 201665 - DNA, 593 bp, Zea Mays
gctgagatcaagagaaaggctgcagctgaagaagctgagaagaagaaggaagaagaagctgaggataagagaaaggctgaggccgaagaagctgagattaagagaaaggctgaggccgaagaagctgagattaagagaaaggctgaggccgaagaagctgagattaagagaaaggttgaggccgaagaagctgagattaagagaaaggctgcagctgaagaagttgtgaagaagaaggctgatgccgagaagaaggttgaagcggaggagaaaaggatacatgttgcaatccagaaacagctgaaggacaacatcaaagctttgaaaaagccggtgcccgctgccaagttaaagaagatgttccagttacaaatgtcaaaagaatatgctgagcagcgccaacagtacgaggataggttgaacatgcttcgtcaggaggccaaagctgagattgacagtttggagaagagcattgatggccaggcaggacccagctcatcatttgatgatatccagttcccgacggagtctgatgatgatatcaacaatttgacccaaccaatccgactttctcaagacgaagtctcagtagg

SEQ ID NO: 201666 - DNA, 1458 bp, Zea Mays
cgcagccagatccgcgcggtccgaacccgggagcgcgccgccgtgcgtttcggatccgcgtaaggcgcgccgccggatccgccgcgccgacagggagggcgctgccgacgtccagctcggcattggtttggctcgatccggaggcgcggcgactgtgggtgcgtgtctcgaccctgtcctggtccccgattgtctctctttggcgcgatctgggaaatgttctctgtaaagtattttttgggtttatccgctgcatattgttcgatccaccgtatggacatagctccggtcttagaaaatttggattttaggcgcttgaatcgagtactcattttgattgatacgattttgagtttccccccttgtgagtaatattgtttcccgttcgaagctcaatagttgctggttgagctgtttttacttcaagttaccttcatccagtagaagcttgtggagtattaatcccgctttgagtgctcgtggaattgtgctccataacctgttagctattgtccttacatgactgcactgattgatgagactaaagcttttgctatatgttttgtttcaataggtgggagtaatctgtatttgtggagctttgcttggtgctgaaaattgtgcaaacatgagatggcttcagcatatagcgtgctggaagtgggcaccgtgcaactgagcccatccttcttgtagccagattccttattccaatgatgcagtggttggtaggttgcagtagatgactaccggtgatcccttgctcctgtcatcatcgggaagtgcagattcaccttcaaagccagctcggccttcggtaggctcattaggctgcctctgcgcaactgattcattctcttcttcactgtacgaggattgtgaaacggcttctgtcacactcacggatgaaagggaggctcaaccaagacatttacgcgagttgtctgatgtgagcagggtggcagagcgcttccagtctgctgattcacaattcttccatcgtctctcagtggaatgctctcagaaggagaggcagcggaaggtttcttggggtggcgcaatggagaggcagcattctccatcatccctagagattggaatggtatcttcttcacatgagaagccaaatcgctcccagagaatcaggaacaagagctcacagtttgaagatccatccgagcaagagccaagaaaaatatacattaatgatcctaacaagacaaatgatcgatatgaatttacagggaatgagatcaggacaagcaagtacactttgattacgttcttgcctaagaacctcttcatacagtttcatcggttggcatatgtatacttcctggttatagctgctcttaaccagctccctcctttagctgtatttggaagaactgcttctcttttcccactactctttgtgttgtttgtgactgctataaaagatggatatgaagactggcg

SEQ ID NO: 201667 - DNA, 499 bp, Zea Mays
catccatggagaaaaaagaaagactttgatgggaaagttgaaaaccgtgacaagccagaggcatttagtgaggttgaattgaagcagcagttggacagtgtcaaggatgttagaccaggaaagcatcctcaaaacaagaagagaaagcgagatgcaaatgatggacaatgttggaagaaaaggttgtgtttgtgggatttgccttactggacaggtttgaagctgcgacataaccttgatgtgatgcacatcgaaaaaaatatatgtgagtcaattcttggtacattactaggtattcccgggaagtcgaaggatagtattaatgctaggcttgatatggaagacatgggcatacgaaaatctttgcatttgaagcgtgatggagattcatatagcgctcctcctgctccctacacaatggataaaaagcaaaagcttgctttctatgactttctaagaagtgtaaagtttccagatggatatgcttctaacctagcaa

SEQ ID NO: 201668 - DNA, 301 bp, Zea Mays
agggaatccccatccatgcttgggaagtcaagactgtggaacaattgcttagtccttttgctagtgttcatcatgttcatccagacaccttggagctaaaggatgtggttgtttatcgttgttctgcttggtgtttggacacgtccctggtgccagcttcgagagagctttggattgtcgagcctccctttgccgttgatggtgaatcctctgacaggagaacgttgatgtacccaatccgcatcacattctcgtctgccccgtggcgggatggatccgatcctatccctcaggctattgc

SEQ ID NO: 201669 - DNA, 280 bp, Zea Mays
gtcatccacggaccacatcaggtacgatatggactagctctccttccacccttcctccttaccgtacatcgtcgttcgccggtggtctgctccgtgcctctgtcgttgttgtgctcccggcgcgtcttgtggttgtggatcttctcccaggcagctaagtagctaaccctaatcgtaatccctaagtccctaacctaaatcgcactcggcttctcttaatcctccatcgttttggtcaagtcaccatctctgctggccagatctccatcttcatatcttc

SEQ ID NO: 201670 - DNA, 1716 bp, Zea Mays
cccagacacaaccctcccattgtcttcccctcctctcctcacgccgaccactccattcctcatcgccgcctccgcttactaatccccacaaccgcaccgatccatcgctcgccttaggttttctgctcgactacctcctggtgctccaccgttctggctcgattcgcgccgagggcggttgctccgagctcttagccacctgtcgccgctgtagcctgctgctgcgggggtgctctgccgtcggctgccgctggtgtcgaggaatagggttttgggactgccaggcagaggagggtgcattggttggcttgcgcatggggatggtgcccaacgggctcctgcccagtgcgtctgccgggatgacgcgacggctcgaccccgagcgctgggcggtcgcggaggaccgcacggcggagttgatcgcgtgcatccaacccaacgtgtactccgaggggcggaggctggccgtgtaccactacgtgcagcggctcatcatgaactgcctctcctgccaggtagggtacctgtaagtggtccgattgcctccccccctgtagcagtggagattagcatctgtatgaagtagaacgctcttagatggcggcgaggactgctgtgtggatgtataaacaggactgctactttagaactggctagtgtaataatcgatgttttactttctcttatttaaatgtttgtctgaacaaccgtagcttattctggagatagtgctcattgtaaatgttgacttatggttccagaaggcctctggtcacttaacaccaatgctttggatctgatacgtgtttagaagcatgaagttttcatacaatgaggataactggaaaaaagtaatccgtgcattggggaaaagcatgaattgagataatggatagtgtatagttgaactgtattcactctttgtacacattcctgtgacatgagatgtatgaaaatcctgtttaatagttataaatcaatagccatatgcggccgtatgaaaatcctggcttgtctgttgggatgagcatttgctgtgcagcctaggaggcagtgtagtaaatagcaggtcatgcacattggcagggctttcttgaggctaagacccagttatagtgggctaaaacagctaaactgaacgtgagtacaaataacggtttactgctcaaaacagctatagctgtctatacagggcacatatagccggctgtttatttccttgcttcgaggtgcatcaggatatcacttttaccttcatgcgtctttgataatagaaacagacttgtttgtttgtcttatgcatgtcaagagggggggggggatttttcactaccattttggacgttcctgctcttatcttcagcatccagttcactatatatgcctcacagagaattgatctctttctctctgcaggtttttacctttgggtcagtccctctcaagacttacttacccgatggtgacattgatgtcactgcttttagtaatagtgaagaattaaaggagatttgggcaaatcttgtccgggatgcattggagcgtgaagagaaggatgaaaacgctgaatttcatgtaaaagaagtccagtatattcaggcagaggtatttttctgtgatatctcatttagttgatgtataagcatcagagaagctcaatacaaggttacacctctgctaacgtgtacctatgatggagtttaaatcagcatcatg

SEQ ID NO: 201671 - DNA, 343 bp, Zea Mays
ttagtggttcagttcctctaagtaaatcattcgctcaaaaggtgtcatctgaagctagaaaggtgataacccaaagatatatgtgcttatgtttagaacttgatcttcttactcttatataacctaagtatgaactcttatttcagaccggtattatggtttcatggaatggtagatggtttggtcttattgaagcagactaaggggtggaatccgcaggctggtagatggaatagcagatcatccgcatgctggaattgcgaggtgggccatgccatcggataagcaactagtattgtttttgcttcgtcgtgcagctgcttgctaatgctagatctgcgct

SEQ ID NO: 201672 - DNA, 530 bp, Zea Mays
cagaactctcatcacttttatctcttccggactatgagagctttgttagagaaagattggtcaagaacataaatagaaaagggaatattgatgacacttcatccttctctactattgttgaacagttgagcaaccaaactgaatacctttctagttttttaaaagatttgtcaacctacatgaatagcaatattattgtggtgcttcgttctctgcaactagtgagcaacacctttgcccatactctagaagagcatgacatgttgaaggttgaattggggaacaaggatgctcataacagagctcaagaatctgaagtgctttctctacaaaaagatctgagagcaatgtcatcaaaatgtatttattgcgtccaacaaattgaaattgtttttgacgatatggttgatcttggatatgcaatagacttggctacaggcagctcaagcatagggtctgaactagaggtaactgtgtctgatctgaagaatgaggataccagtgattatagtaaggtggctgatactttg

SEQ ID NO: 201673 - DNA, 346 bp, Zea Mays
ccgaaattgaagaccttcggagacaactggccgaagctaaggagaacgcacgctagcacaggctaatcaagaaatcagtgaatattggaaaaataagctagagaaaaatgttgaagaacttcacgtatccaaagaaaggtgctttgagaaatccatggattgcgtgaagaaattaaaaactagcttcgccaaagtgggcgcctactctgctgaagaaaacttcaaacgaggcgaccccgagggagttgttaaatggataagtggagaagccaaggccttcgaggaaattttgagtgatcgtggggatgtttgcgcgttttcccgtgcgcggggaatctcagctatt

SEQ ID NO: 201674 - DNA, 1426 bp, Zea Mays
gtagatataaatgtgttctgttagggggggggggttgtataaatctacgtgaggtggtggtggaagtgtttaagtgttaaattaatagatttttccaattttattgcgcccttctactgttttctgtcaatcttttaaccattaggggtttagtgtagcttatggtttgatctgtttctcacttctattttctattctcaaccttttgttatcagtggagcaagtagacccaacagttgtggagattgtggagagatctttggaattctgtctcttacatctagaaaaatcatcatatgtgtgtgatgactttggcttactggtaagttctgtttgcttggtttcagttagttggggttaccattctgagtttctgaccttcaaagaataatttgatttgctgttgccattttgtttccatctttgttgagccagcattctgcatagatacttggaagtctgctgcattcttttgttcttgatttgttacaattatgtcatatgattgcagaatgaggttgcctgttttgtggaatctgtgttgcttaaaggtaccctcaataaggtatcctcattggaacccagcattataaatgacatcattgagcagtggacatctgtccaagctgaaactgagcgcatgagcccacaagggaaatatttctgctatctaaaaggtacactcctgaggcctttccatgcgaagggaatcaatgcactgtaccttttcacttgatgagttctcacttaccttcaattctttcttaccaggcttcaactgctcgaaaagtgaagatgaccttaaacagtttcatttggccttattaccagaatacttgcagcgagattatgttattttagagaattcccaatcatgcagtgcagtatctccaaatgccatggtgccattagcacagcattttgcggttgctcacttatgttgtatgccacgccttcttacactggttcagaagctttgccagtctcccgctttggaaatggttgaagatgtaaacattggcttgaggttgtctttcgcccaaaggattttgaaattagtctgtggtctcactattgagtttcctcctgatgcctctgatgccatgatgttatcctcagtagcgagatgtgctgatagtcttccagccttgtttagactgaggttcaatttctctaatcatgacagagtcttttctgtagatggtgttggcactatcttgctgcagatactggaagaatttttacaggtagtgcaaaatattagtgtttgcaacagtgatatctgttgtacagttaaagcatgcattctttcatccatgctggaaatcttcagtcctaatatatggagatatgaaaaatcgggtgcttgcttggtgcctcctttatcttattctcctcacgttgttcaatttgtgctgcaactttt

SEQ ID NO: 201675 - DNA, 359 bp, Zea Mays
ccaatatggttgatcctcacagctaaatatgtttttaccaagggcttatgaaacaaagcatagtcaaagaaaaaaacctgtagggagaccttcggggttaatactgctacttcggcaaccgttctctttatgaatgaccttcggcaagaacaagattttctttatgaaacgtgaaaagaagggaacgtgttttttcgccttcgccccaaaaaacggtatgtacgatactttcatgctgcacaaagaaatataatacatggtgaattacataagtttgcaatagtttctcaaaagaaagcatacaaaattctacatatgtttttacatcatctaatcgtcttccttcaggaccctctctg

SEQ ID NO: 201676 - DNA, 518 bp, Zea Mays
caagaagggtcttcaggtttaatctcagtgaatgatgccttctatgttgaagggacacttcctagtggtgtcagtacatctctgccgaagaaaagtctggagggaaatgccttcagcaatcaacataggattactgacactcaggaaggtttgaaaactgctgagatcaaggaaaatgttgatcatgatcttggcactaagctacctgatgattcgaacactctgtttgatgtaccatcctttgagcatcttcaagaaccccctaagccataccaaagcaacaacatggatacaaaagtgggtggccatgctatttatccagaagagttgacattatattatctggatccccaaggaggtgtgcagggtccatttctgggtgctgacataatctcttggtatgaagatggatacttcggtttggagttacctgtacgtctgtctcagttttcagatgatgttccttttcgcccacttgttgaagtcatgccccaccttgtgcaaaagccgcaatcgcg

SEQ ID NO: 201677 - DNA, 342 bp, Zea Mays
agtaatatgttaggcacatgtaaaaatgtcttgattactatggtaaatatgcatatttagtagtaattggatgcagtcgatgtttgtgccgtgataaattttatgaccaaagtgggtatcttgtgcttatgtatggtgaagtaagtcatgatactagttatgcgaggtgtatgtgtagattactagttattgttgaaatgacttgtttcatgcactaatgtaattgtatacttgagtatgacgtagactactcaatatatgtggttatataggtgggttagctctatttaatcataaggtgttagagtgttctgaatgtcaaaagcatgataagtgtagaag

SEQ ID NO: 201678 - DNA, 342 bp, Zea Mays
cgcatgcagaggccgggctgggctgggctgtttgtatccggctgattggttgctcggttggccacatccagaaccgccagatgcattgaccgtcgatgagcacttgattggtaaactgcatgtcacggttcgaatttgtatacgcgggtgcagctcaggattaggtcaccgtgcattcggctgcatcagcgggaaagtgagatgcgcgcgttcgaaccgatgcaggccctcgtgagccaggaggctaggctgccgccaaccaatcacgcgatatgtgttgtgtgcagctgcagctgtttgttgctcgtcgatctccagtcagagaacacaaacaggtacggt

SEQ ID NO: 201679 - DNA, 316 bp, Zea Mays
cagctgctgatatcttcttcttcgctgccgcctgctgccgattaatttattcactcgacggcagcgacttcatcgtctatcataggaagctgagcaaagaagacgtagggtgcagccgtgcaggaggaatagagatagagagcttcaggtatatatagcaggcaggcaggctgtgtggttgatccggtgatctatatcgatccgtcgaggatgtgcaccaggggccactggagaccgtcggaggacgagaagctgaaggagctcgtcgcgctctacggcccgcacaactggaacgccatcgccgagaagcttcaag

SEQ ID NO: 201680 - DNA, 348 bp, Zea Mays
tggaacgtgcgaggtcttaatgggtctgctagacaggatgttgtacgtactttggtggattctgctcgagttgatgtggtttgtcttcaagagactaaaatggtggatatttctcggttccttgtattgcggatgcttggtccagcttttgacaattttgtcttcctaccctctgttggtgctagtggtggcatcttggtggcttggaaaaatagcattggtatttgtgctagtagcagggtggacggtcatagcgtctctgtgaactttcattcaagcaccagccccccttggtggcttacatgtgtgtatggtccgcaagggaatcaagagaagattcagtttctg

SEQ ID NO: 201681 - DNA, 320 bp, Zea Mays
taagaatatacaaattacttcatttccaaaagtcatatggcaaaaagtattgcaaagaatatatcaagcattttaatacaacccattagcacatgggtaaaattccactcggttgcatttccctaaatctacaagctattgcgtacagcatgaaagtgaggttattcacatgcaggatcaagaaacaaattttaccacaagacctgaccaaattcattgcatacgcacaagttaacacataaacactcatatatcaatgcagtttacattgctattctcaaatacttagcattgtacacgaaatctagtttacacattgc

SEQ ID NO: 201682 - DNA, 469 bp, Zea Mays
gttggccctcaagcgcaccaagtgttcctttggcgagacacaggtgggttacttaggccacatcatctcggataagggagttgcaacggaccctgccaagattgaagcagtggagtcatggccaccaccgcgcttcatccaggcactcagaggatttttgggactgactgggtattatcggaaattcatcgctggttatggcactgtagcagcccccttgacagcactgttgaaacgagaggcattcagatggacagaagaagcaaaggaggcttttaatctgctcaaacaggccttaatgtccgcaccattactgcagatgcccgactttgatcgcagtttcatcattgattgtgatgcgtcagggtctggttttggcgccgtgttacaccagggagatggagctattgctttcttcagcagggcagtcgcacctcaacatcagaagttgccagcatatgaacgggaa

SEQ ID NO: 201683 - DNA, 582 bp, Zea Mays
gaaagctggagcctgtcgactgccaatctttagcacatgaattacttgagacaaacaagtgttacttcttagactgtggtgctgaattgtatgtttggatgggtagaattacatccctgatggagagaaagggtgctagtgaagctgctgaggtaacatttgttcagctagttacttatgctatttcattgtattcttagtgctacactattgaaaatgctgatgagtcttgctgagacttgctgatggactcattgattttgtaacatggcgtaggctgtctccttcagtttttacctttaaggctgtcttttggatctatattcctctatcttttagaggcttagttacttgttcaggctaattagaaatatttagagatattgcatattttcagaatgacttctttttgttgactatgttgttgtgatgtttattatttatttgtttaatactttaattgcctatgtagaaattgctctctgattcaaaccgaacaagaacacatataatcaaagtgattgaagggtttgagactgttacgttcaagtcaaaatttaaggagtggccacagacacctga

SEQ ID NO: 201684 - DNA, 402 bp, Zea Mays
gaaaaaattggtacgccatataggaaagggacatggcagaattttcaccttagtcatatcttgtatctttgatctgctcttcatatttacatttatatccatggttgaagttcattataaagtgtacgaggatgaaataatgaccactggccagtgtttgtctgaaatgaattcccaatctttctagttcactgggtggtgctatatctgatgaaacagtctggaaggatgatgattggttagccaagccaaaggttacttgcatgcgtgccttttctgatctgcaacattcacaatctgtactgtgtactccatgcccactagtatttaactacatgaaatcaccggcatttgtcatcatttatctggatgacctttgttctatagagacctgtgagaacc

SEQ ID NO: 201685 - DNA, 760 bp, Zea Mays
ctcaggatgaaaatggtacttttcaatatgatgaggatgatgacaatgatgtttgtgatgggaaggtctttggacatattaaccatgattattgtgacggcgaagatgatgatgatgtgttagggatcaaaggaaaacatagtatatctcacaaagagttcttgaggagtgctttacatgggcatttcagggctctcgtctcacaattgctcgaaggacatggcattgatcctgtggatggctggccagacatagtatcctcattagcttggcaagcagctacctttgtcaggccagacacgagcaaaggtggtagcatggatcccacagactatgtcaaagtcaaatgcgtagcatcaggaaatccaaatgataggtatgcccttcgactacaacttgtactgaagaattacatgaaatttccaccatggtattttggagctaaatgattgtccaactgtttgcagtgctttcattaaaggtgttgtttgttctaagaatgtaaaacacaaacgcatggtgtcaaaacatgagaaccctaggctgcttcttttgggaggagcactagaataccagaaagtcacgaacaaactagcttcaataaacagcattcttgaacaggtcatatcatcattttccagttacatgttcatgcttatttatctcaatatgctcttaatattgattttcaaatgcaatgtgtacaggaaaaggagtatcttaagaatgctgttgcaaagatagaggctcaacgcccaca

SEQ ID NO: 201686 - DNA, 317 bp, Zea Mays
gcttgaatttccaatttcccccaacttcgttctccgccaccgtgaaacgagcctcgccgcggccagcgcaaatcaggtccgatactgccaacctcagtcttgttctaacattctcatgtgcccttgatgctctccaaaccatccaattgaactagactgccatgaatcgacgggaacacattcatcggcccgcaaggtccacggtcactgcggccagagcaaacctagtagccatccttgcaattgatttgggggaaatgctcggggtagtactgatttagtgtctgccgctcggagaacccagccatagccccaat

SEQ ID NO: 201687 - DNA, 497 bp, Zea Mays
ctggctgacatgcaggggctcccaacacggctcattgcagcagaagacttgctcctggatttggagcagcctggcattttcacctcttcgtcagacttatctggcattgcaagttttggtctttcataggaattcacttccccctcttccttatctgcatccacattgctgaccatattgtctgccaattgacggatagagctatggtttgagtggttagaatccaatgacttgcggtggccgtcttggcggacacggtgaacctgcttgcttcttggtgggttcagtcctctgatcctgacagcagaagatttcctatacgatgcagtccttgcgcttggtccccggaaactccgctctgaccccattgtagtaggctcagctcccacatcttcgtcttccccaaccaggtgatggtgtgctgacctgccaagctccggagtcaccccattgctagaagcagtctcccagatcatgtgatcggaaggagacgcgta

SEQ ID NO: 201688 - DNA, 356 bp, Zea Mays
gtcggcgacatcttcccatgtagcatcagtagtggcctgccctttccagcggatgagcacctgctgaatacccttggccaacctgtaccgaacagcctgctccggttctgggatcaccgccccattgtgagtgggtggaagaggaggtggtgtagctggtggggcgccgacgaacttcttgagaaggccgacgtggaagacatcgtgcaacttggcacgcggaggtagcgctaggcgaactgccaccggattgatgagctctgtgacttgatacggcccgacgaagcgcggcttcagcttgcccttgggcgcgtggggaagggagggggctgcccgatgacgcaggcgcagcagca

SEQ ID NO: 201689 - DNA, 283 bp, Zea Mays
atctggcctacattggtatttgaaatactggtgtggcgcacatatctcctgggacaagactgggggtgcccagctggcttcgattccttctcctggatctctgccacgggtgcagggcaagggagtcaagattgagcgtcctgttccgtggaattactatcagaatgtcgtcacttctagttgtgagtcctttcttgccttaaacatttgttttcataatctttgtttgattccaaatctattaatttcttgatttcttcagtgtcatcctccttgtcctttg

SEQ ID NO: 201690 - DNA, 298 bp, Zea Mays
ctcaatccttcagctcagcccacttaacctctcacccgcgcgcgacctgcttgacccacactgacatgcgagccccacatggaccacgtctgaccccacgcgttagtttcttcgcgcgcggacgctctcttctgagcgggcccacgttgtcatccactccccatgccacgcgcgcaccggaaacctttgcgccgcggctctgttacactgcaacgcaggacccacccgtcagctcggtcatcttctccgtaacgaacgccgtcgccgtcgcgagcttcaccgcttctgatgccgcctt

SEQ ID NO: 201691 - DNA, 1157 bp, Zea Mays
gcagcagcttgtttctgttttgagttacctttctctcagattgaagttacctctttcgtcttgggtgcaacggctggtctttagttaccgtgggaagaaagatacgcgttatggtcaaattgatatgtttggagatgctgatgggaatgaactccccaaaggccctggtgtggacagaaatactattgatataatatactcagtaaataatcatgctgctgtttggtggggaatccatgaagctgcccggcactgcattaaccttcggcttcgaactcatctaggtggtcccactcagacatttgcagctctagaacgcatgcttttggatgtaacaaatgtattaatggtggaagctaaggaagctgaaggaaggtatatagggccagctgacatttgcttattgccaatgcgtcttctattggattttgttgaggcattgaaaaaatatgcttacaatgcatatgaaggttcctttgttctatcacccccaccaaaagcaagttccgtgtttttccatgcaaacaaacgagtttgtgaagagtggttttcacgaatttgtgatccaatgttgaatgcaggattagctatgcattgcagtgatgcagtcattcactattgttcactgcggctggtagatctcagaaacctggctgcatcatctctcagaggcaatagtcacatgggtggggctactgaaagtcatgcctttagagagaggttagaagcagatgttatgaaagtcctccggcatgcttccctggcactctgcagatgtcatgaaacagatgccttagttggacttcagaagtgggctgcatcaacattctattcttactttgagcaagataatcaactagttcggggcgtatctgatcgcgacaatcgcttctcctggatatcaggattgatctatcaatcccaggggcagtatgaaaaggctgctgcacattattcacatctactgcagtcggaggaagcccttatctccatgaaatctgatggcattcagtacatcatagagcgtgttattgagtgctacacatccctttcagattggaaatgcttagagagttggcttgctgagttacaagtgctccgtgctgtacacgccggcaaacctttttcaggagctctaacaagtgctggcaacgaac

SEQ ID NO: 201692 - DNA, 311 bp, Zea Mays
accaaagttaatcgcctgcaatatgaaatttcgcaacgcgatacgaccattgattgggatgtaaactcacgctctttcgcttgggactgtgaagccaaagctctagctcgagtagcaaaacttagcacatccctcgaaaacctgcaagcgtgctgcaccaccttgcatgaagaagtgcatgtattgtatgatcggttgcacccggacgtgccaccatatgttgctgcaatgggagccggaccatcgggaacagctaatgaaggacctgatggggagctggacctttttaggccccctccttccatgaacct

SEQ ID NO: 201693 - DNA, 539 bp, Zea Mays
gtgcgatgaaggacatttaattcatcagtcatagcaagctgccactcaggtataccagacgcctctttataagatgatggttcagcaatgactgcaccagcacgggaaaacccataacgttctggagctgcaatagtgccacggtcacgaagatgatacccctgattaaaaacaacatgagagtcatcattgttagtacaagtatcagcaacaggatcgtcatcaggactggccgtgggagtagagcgaggacgacgaatgtaagcctgagtgacaggtggtttggaagagtaagacggagatgatgtggaagttgaaggtggtgtgatgggaataaggacatctggggtagaaacagtacgtggtgatactgatgaagtttcagaaatgggaggaaggctcatgaaggaggtagactctgtggaataaaaagaagaatgagtggaagagttgtaaaagaagggacgattttcattgaagctcacatctcgagaaatacgcatgcgacgagaagatgaatcataacatcgatagccttt

SEQ ID NO: 201694 - DNA, 320 bp, Zea Mays
aaaccgacggtagctcaccttgtaccagttgccttcaatgtagaagttaagataaggatagttgtatggactttcctcatccgccagcttgatccacagagttgagtaaaactgggcaatgacttcatcattccaatcatattggaatgtcattatattcttcatcctcttcctttcacaggccctcaacgcttgtgtcatctctgggtccccaatagcctcacatccttcccagttgatatagcgttgatgtagtatgggttgatgtttcttggggaggatcactgagttgtaaaaatccacatgctggagcgtccaaa

SEQ ID NO: 201695 - DNA, 378 bp, Zea Mays
gtagctgtggtcgggagaggagagtgccgagcagcgagcagattgaagcatgtggccaaatgctgctggaaattaaacataacatcctacatgcttacactaaattgtgccttccaatggcagtaggtgggtttatgtagcggcgaggcgtggattgcggcgaggggatgcatttccttccatggccgagacgtggattggtgaggggattgaggcggggaccatggtgcaggacataggggcagaggggagagggtgtggaaggagagagcaaagcgctgcacgcacggggaagaaaggagagataggggtagacactgacatgtgggtcgtacgcgtcgtggggaggcagaaccacggtgcacagatggtctacat

SEQ ID NO: 201696 - DNA, 337 bp, Zea Mays
ggtttactgcatggtggcacaccccttgcagccacatcttgttgctactggaactaatattggtgtcatattaagcgagtttgatccaagagcacttccagctattgctcctttaccaacaccaacaggcagcaaggaacattctgctgtttacatagttgaaagagaacttaagttactgaatttccaattgtcgaacacagcaaatccatcccttgggaatgctggtgttgcatctgatgcaggaagatcaaggaatgattcattggaacaactgatagtaaaccagagcaagaagcatatcagcactcctgctcctcacgattcctattcggtc

SEQ ID NO: 201697 - DNA, 504 bp, Zea Mays
ggttgtgcttctcgacacagaacttcttctcctgccgtcgggatcggaacaggaccgggacggtccttgacgggaggtgtgcgaggtacaaacaaccaactcgattcattctgttcgcgatggaagagtggaggaaggaggatgcagggcgttgggatagggtgatgaaccggttgaatcgtttgattcagaagttggaagtggtggatgacgtccagcaaacaatcccgattcagtcgaggttagcaacagaggtggcaacagaatggactgtgttgacacgtcaaatgaaggaaaccaaggctagggatatggagatgtggcctgaggaacggggttggttgtatccacggtctggtgaacgaggatgtcagtgtgggcttgctgcatcgggtgttggaggtatgacccctctggtgtttgatgaaatgcctcacaacagcagcgagactgtggttgtcctgttccctgaagattcagattccttggtgttcagtgaagtgg

SEQ ID NO: 201698 - DNA, 669 bp, Zea Mays
gtgttctcaattttttttattctgtttgaaccatcaatatgagattcctttcctgcagtcccagtggcgatgccaccgagattactcaaattatatgaatttgaagagagccgcactaacatatcagtgtgcttggcgaagaagggttgctaggaaggagctgaggaagctcaaactggtacttgaccaactattatagtattcattctgtaaaatttcttctaagtttgttatgggatgcatgctttttaggctgcaagagatacacaggctctaaaggtggccaaagagaaacttgaggaacgtgtggaagagctaacaagtcgcctggaccgcgaaaagaaactaagggtcaatacttggtcttgaacaatatttaaatacttgttatgtgtgcctattcttttaacccagaagtacatcatgttgcatcctgtattggcacatggtgcaactgcagttttcatgcttatagacatagcatctatggatcatacttgtgtgtattcaatttacaggctgatttggagaagtctaaagcagatgaagtttccaaattgaaagaagctcttcatgagatggagcagcgagtagaagaagtgaaagcgatgcaggaacaagaatcagcaaaaaaggctgttgaagaagctctagctcaagaaagagaaa

SEQ ID NO: 201699 - DNA, 288 bp, Zea Mays
atccaacatctcttccattcgatctacatcctggtccccatccgactcaatagtatggtccacctctccatgctcatgccataccagatagttcggcataaagccatgtttgaaaacatgatacgagagctccacctttttcaaccgaaccaagttccgacattttattcacgggcacctcgctaaacgagcatcactagcaaatgcgagtaccatgaattcatctgcaactctcacccatgcatcagagtgcccatgagtgacactgtcgaatccatcgtacatcgc

SEQ ID NO: 201700 - DNA, 543 bp, Zea Mays
atggcctgcctgcaggcgcaattcattcccttgttgccctcatgcaaggggcgaaatgatgatgataagctttgcgaccatccatggattgggacacattttggtgtttggagctgtaggctgtagccggggaaaaaccttgcttggtggagcagtggcgacacacatgcccactttgagagcaaatgcatcctttgaaaagagagagagaggtggtggtgagtgttctctgtccatcttgactcagtgatccagagcttattatgccagttaggctgttactgctctggagactatgcgagtgatgtgacgacgacaatttttagagtactagtgtatactagctagctcttattaacatgcatcacgaggtcttcctatgctagagctggagctgagttgtgttggcagcagcagcaggtgattagtttattactggtaacgtccttgtttggccgaggtgctccatcatttgactggaggctcgtgcatgtgttggcgagattcctcctgccgacgacgagatctttgccctgctgtgca

SEQ ID NO: 201701 - DNA, 1663 bp, Zea Mays
gagccattggtccttagatggaaaggcaatttagtgcactgtaggggatgaaagtaaagttatatcacaagttctgttccccaagaattatatcctgagcaaaattttccgcaaggatgttccacctctgatagtgaatttgaccccctcccccaaaatgcacatggttgtaacagaggtacgctagtaacaattgtagattattaaatggtatctctaaatctttgatttgttccaccaatggctgaatatgtagctggttccacaagcagttatgtttgtttctttttctgcttcatttatgttctcatgcccacttcaattatttcactgttcactttaagctgtgaatgttattgttggcagtctattgattctccccacatttttgttgagtaattcatttactcattctgctactatgtttgtcatattatgcattcgcttgattttgtttgtcactgtttaccaatgctgaacaattacagttcttgtttttctggtgtcgaactttagtacacttttctgttgacttggtataaacaggcccgttttgttggttgacaaacactacgatgtcaaatgttaggtacaagagtcccttggacaagtgtttgctttcctggcacaaatgtatctgttcacatcttctcctcacctttatagactcatttctttgctaaatattccctaaggctttgtaaacaaattgttggctacaccttaggcatggtttctcaaagaggcatggaaatatgtggaaatgaaccaaacatgcaacttatttctgattttcagttaatgttttctagcagtactgatgctaacgtggccccaatctttcatgtacaagttgcattgttttcttgtaaatacagttgatatactaatggtgctgtgtgcaactgatacaaatattcgttttcttacaaatattttgcagacactacatgacatcattcctagaaccaaagaactatgaagaagagaaaggtaccataatttaataacaattagaatgcatactcatcttttatttctttggcatacttttgattaaatttccactatgctatttgtgtcatgcaaggatatgctattccttattcagaatgatttttttggtttctttgcattaccatacccgtgtttgcaagtatttttggtcatcacaaatgcaagttcttaccagtgaaaggtaccagtgcaagtatatttgttttctgcatcagttcctaataacacccaaatttgtactgccataaaatattcacattccctaccttagtgacatcatttgttcagatatattcagaaatgtctttgagggtgctgctactttacatcattttatggtcagatgtaagattaggctccactatgtcctttcttgaaattatttttctttacaaccatctgctgattaaaaataaaaaaatgattacaatttttgtacagatcaatgtgagctgaaataacttccggtaccatttcatatttttttttctttctagtccattattattttcctcatttttttattgtgtcccataaactaaaaatatcagttcatattgttttccttgttgagctttctaacattgcaccatgtatgttatcaaattgtcaattgtagatcactgagtctactagccagagatct

SEQ ID NO: 201702 - DNA, 391 bp, Zea Mays
gttttggccgcccggggtgggtgataacctggaagccgttgatttctagtgaacggtgtagattaaaacatgtggcggatcgttatgggccgttgatcactgcgtagacgggctggattggaagagggataacgattcacgtgagttgatcgtggccgtcaatctgtgatctcacagtcactgtcccgtaccccttcggatctaatctgggccgtcaacacttgatcggacgtccgtccgcgcactgtaccccttcaccgagccataattgcaaaagagaccctggaaaatgtttgaatcaacccgccgtcctactgcatagtattctgagtcgtaggatcttttgcgcgtgggcccctgctgttctcagaaatgatggcccagtccagtg

SEQ ID NO: 201703 - DNA, 487 bp, Zea Mays
cagcaagttgttagaatctaagaaggaagatgtagttaaacttgttacagacaaggaaacgaatgacaacataattttgcaactcaggcaagaacttgaggcaacaaaaaagttgcatgaggcagagactcagcaattagagaccaaagctgccaaagtaaataaggagtttgaacagaggataaaagaaatagaactcatgttagaagattctacaaagaggagaagagaacttgaggaatctactgaatctagaatccaattttggaagcagaaggaaatagtggtaaacaaatttgtgggtttgcaagtaaagaatgctcaggtattggtcaacccactctgtcccctggccttttttttatctctacggtgaatatttgtgaactcaagtgtatagtgctctttttcttcaggaattgaggctctcttctgtttcagttagacttgaaatacaaaattgtcaaaaaagatggtttgaagaatt

SEQ ID NO: 201704 - DNA, 402 bp, Zea Mays
aagaaaacatgcacatattatgttttagctaataagtaagatttagaaaagcttaggataagagaaggttaggcaagaaaaacttctatcccggatggtggatcttgatgcatctagagatctggtttgacttttatccttgacgattaccttccttgacggtgactcttatcctttccttgatgaggttgatcttcttcgtattggtgtcttggttaagatagatctgtatgtaacacgtaggtagagctggtttagtagatggctatgagtttaatgaggttagtcagaatccggtttggtcatttgcttctagacgggtgggataggttatgtaacctatcatgtaggtcaagttgttgggtatggccgagttgatctaagtcaccaatttaggcgtaa

SEQ ID NO: 201705 - DNA, 444 bp, Zea Mays
gctgatgactatggtcatgagtccattgaaattgagcttcggtatgacaaggcccttgtgccacatgcagcttggctccccatgtcaggtagccgaagtagaattcagagtggtagcgaccgaagtcagcactagagatctagtgcaagaatacttggcaaatagaatatttcatatctctagtggctggggaatgcctaagaagaaggatgggggcaaaaagcacgaacttgtttggctcccttaccgatttaaatttgataaacaattgaagaagccatgccaagagtggttagaaatgattgaaacaatgtgcaatgaaattcttggcaactacaccaagaaggaggaccagttaatgactgctgccttcagcacccggccaaaacgaaggctgaatcgagtgatggacgcgttaaatttcgaatacctagactatgaaag

SEQ ID NO: 201706 - DNA, 494 bp, Zea Mays
ggacgacggtggagtccaagaagggtagaagtcgccggctgaaggctctgtggctcccgggccgggtcccggctgatcttgttgggcgttgcttcaactgcttgggctgcgatcaccgggctgcagactgcggcagcgaacctcggtgtttcctctgttctgcgcttggccacaagtcctcatcctgccccaaggcttcggtgtggaggaggctcgggtgtcctagacctgtgaagtcggtctgggagcggctttcaccggcggtacagggaagggtccaacgaccggcagggcgtcgtccggtttggcagcgtattgctccaccagaagccattccggtcgtcccttctgtcccggtgggcaacatgctgggcgtctcggctgcacagggtaatggcggccctgccagctccaggcgcaaacggtggaggaagaagaagcgcaaggagcgtgaagataagccggctttggagatttcggctccacctcctccc

SEQ ID NO: 201707 - DNA, 353 bp, Zea Mays
tttggtaccacctttggttagatcaaaccacaacaagaatctgacgtggtgcacatctcctgaaaatgcaatgatatatgctccagaatcctcaatgtaccaggtcgatgaccgtgagacgaaaccaaactgcttgcaatcaaacagatctcatggatcactgaataatctatcaaattcggtcctggagctgaagaatgctgactcatactccacatccaactattccgccaaggatgccatgtttacgcagtgctcaccgaggcatgatctcagatgcttcaatgccttctcggccaaattcatcaagaaaagttccctgtccgatctagtctccagaggaagcatgagca

SEQ ID NO: 201708 - DNA, 308 bp, Zea Mays
tcatcctgcaaagaataattgacgcacaaagaaatgatgagggaatgaaacacattcatgagaaaatagaggccagtaaagccaactgcttcagaagagataatcaaggtgttgtatggttttacaaccgcatagttgtgcctaaaaatgatgaggtccgccagcaaattctaaatgatgcacatcttagtcgctattctattcatcccggaagcactaagatgtatcattatctaaaacaacattattggtggacaaagatgaagattgaaatcacacgctgttgggagccttcggcttccgaaggt

SEQ ID NO: 201709 - DNA, 279 bp, Zea Mays
gaaatgacgcggccctagctcggacctgggaccgaccaatccccatgaggtccaaggtttctacatagatgatgttcagactgttgcctccatccatgattaccttgctgagtttggtgttattgatgattgggtcgacgatgagcgggtacctcccagggttcgggacgtagtctgagtggtcgtctcggtcaaaggtgatggcgcggctataccagtctagatagactagcgctgctacctcgatggagaagacttctcgccattcctgcttccact

SEQ ID NO: 201710 - DNA, 450 bp, Zea Mays
agaaaaggacccgatagatgaagaccatggcaagcaatattgcaaggtccacccacttcgagtagcccatctcgacctgcaagctggtcctcagtatatagtcaccactaacagtgagcccctttcctaacacaccatcatcgaacactaaacctaggaactcgttcttgtagagcccctgcgtagcgtacttgtggtaggagatgtagtacgtcgggtacttccacaagggtttggggaggtcgtgtggaagcctgaagaaaccagcgttgagcattagcaggccctgtatccctgagccagtaattatgcccagcaggaaatcaggcacaagggcagcgacgatcatcatcagcccttcgaccagcatcgtgcaagcccatagcaccgccgcgaagtagaggaagtggtccaagcgcctctggagcccggtcaagtagtagcatactg

SEQ ID NO: 201711 - DNA, 350 bp, Zea Mays
ccgggatcttaaacgtgcaactgtcctttccaaagaagcaaggacaatgcaatgctgcttcaatttgcgcagcagccacacttcctcagacgacaacaccctgctatcctgggccatctccatcctgtgcagcaccttacgagccagcccagccgagaactgacattgccgaccgctttatgcccccaagattgtgaccttctcgctaatcttttaaacttcatcgacaccctctcaatagggcaagaagcctgaatcggctggtcccaagaaacaacaacctcttccataaaacccgggagcttaggccaaaagctctcgaaatgaaatccacacttccctttaagatc

SEQ ID NO: 201712 - DNA, 297 bp, Zea Mays
ggatgacattatttgcttaaggtgatttgccgagttttcttttgcctgacactagataaaccacatcattatcgagtgtttttctttatctaatgctaaactatatttgtgaagtatttttctttgcctatgtactatgtagcattcaacaagaagactcattggctagtgccgtaaatttagcacaagcaaagctctccggtagtgattaatagttaatacggtcgaggactcgagggtaactgggtaactatcgataagaaccggctgcacaggaacccgctagcggagtagcgg

SEQ ID NO: 201713 - DNA, 290 bp, Zea Mays
ggacgtcaaggctgtgcggggagcttcgaggtaccctggggttgcgtggggttcaatcggagacactgtgaccgtggggggcaccaccgaaggcttcgagactaacgcgaccagtggtgaacctgacagaggacgggaaagaggtggtcctctgggagagaccactgggtcaggctcaaaaagtgtgttaagctcgatggtggtggcagacagtggaaaatggtgaagaaggggaaatcagactcgtcagagacgacgtgccgagagatgagcatgcgatgggcagagag

SEQ ID NO: 201714 - DNA, 373 bp, Zea Mays
gcgagtgcacacgcacgtaggaaccattggttgtgttggtgagctgatcggttctccggggatggcatcgtcgtcggggtacgcggatggcggcaccggaggtctaggcgacggagaccccccggtgccgtcgatgaggaagcaaccctcgcggatcgcgtcagggatgcgtcggctagcatccaaggtgtctgcggcggtgcccgagatgcggggcctcaagcgtacacagtccggtgcccagtcaggcttgcgcgggctgcgtttcctggacaagacgtctgccggcaaggatggctggaagaccgtcgagaagcggttcgacgagatgagcacggacggccggctgcagagagagaacttcgccaagtgc

SEQ ID NO: 201715 - DNA, 358 bp, Zea Mays
ttgctagcggtgaaagtaacagagttccttctcctgctttgtctgccctcattggtctgcaagaactgtccctggccaattttgatcagactcttgaggatatggttccagaggatttgttatcggagccagcagatgatggtgtgatggaggtttgtgctgatgtgcttgatgctgggttgaggtcatcccgtgcctcgtcgaccttggagcgcgatctcgagggtcgggagactgacttggatcgtcccggtcctatggaagtaactgagggcccatcagccttagaggtggctaccgcagagaacttgggccccaaggatggtgttgacacatgcccagcccccgaggatgttgc

SEQ ID NO: 201716 - DNA, 461 bp, Zea Mays
gagtccacaatctgaaaatctgtgattctagcaatcttttcttcttctgtaaaattatctgcggggcctactccccctagtccagcaggtacatcggtcaaactgaccactgactcattctgcgaatgtgaatcatgagctgcagttatggactttgacattaaatcttcaggttgctccattacattatcctcctgtacaacaacagatacttcccctgcctccatcttattgctttcttcctcactttttttggtatcaatattgccatcatgtaatttgacttcaagacgagtaactttgtctactgtatcgcaattctcctgtgggctactaagttcttttgggacattgtattcttgagcaatcttgtcctcaacttcagttatattatcggaactagctagcatggattctgctggttgtgactgagaggcattcccatcagatgtgtcttcctt

SEQ ID NO: 201717 - DNA, 1111 bp, Zea Mays
cgctttcccaggctctcccaccgtcgtagacgtcgccttcgccctccacacgcacacccatccgctcccctcgcgtcgccttctatcttcgagggagagccggagagccttcgccgctctctcactcgctctgttttgtacctcgctctgatctctccccccgcccgtcgctgattccctgcccgtttgtcgccattgccgccggtcgtgccgtgtcaaggtacgtaccctcagcgcccttctctgttacctgattggttcctcctcttgctgggcttgatctgtttccacgggctctactgtactggttagtgcttactcgttctggatgcgtgggtcgccttggccatgtcaggcaggcaatcgtagcatgagaacgcgtagtgttataggaatgtgggcaagtgggcaacctcttgattccacgaatctgggcgaatcaaacttttcttttcaaaggaatccgattcctgaatcttgcgcgccctgtttgaattactggagagatgaaaaaaaaggcgaggccgggatagaaggtgtatatgggatcttgtatggtggacggaatgaaaccccactcatttcatggaacataccttgattgatctttgccttcggggggcgagaagccgagaattgatgtgagcccattgcagtttgtacctgaagctatggctgggattcattcttcagtcgtacatcaacacattcagcttcctgatctcgctcttctcccctgttcgatttgaaggacatggcgacctcgggaaagaaacacctgaattcagtgaccttgctgttcaaactaccgtattacacgcaatggggccagagcttgctgattgccgggtcggaaccagcactcgggtcgtggaatgtcaagcaaggagtatctctcagtccagtccatcaggacagtgagctaatctggtgtgggagcgtgtctgttgttgccggctttacctctgagtacaagtactatgtggtggatgacaagaagaatgtgttgagatgggaggctggggagaaaaggaaactagtcctgccggagggcgtgaaggaaggagacgtaattgaaatccgtgactggtggcaggtactgatcattttt

SEQ ID NO: 201718 - DNA, 619 bp, Zea Mays
ctggacgattgactttggttaaaacagtgctatcagctcagccgatttaccacttgactgtgttcccagaacagaggtggattttcaagcaaattgacaaaatccgtcgcagtttcttgtggaagggagaggaaccagaaaatatttctgggggacactgccttgtcaggtggccgttagtgaagcgccctttgaacctaggtggtttgggaatcgtcgatctggagcgttttgcaagagctttacggcttcgttggctttggtttaaatggaaaaatcaagaaagagcttgggtcggtttggacattccctgtagcaaggttgatcgggatctctttcatgcgtctacagtggtgacagtgggcaatggggttaaagcctctttttggcattcatgttggatcgatggcacgtcggcacgattgatagctcccacgctctttgccaagtcctcacgaaagaatatttcagttataaagccacaacaaataacagatggatcttccacatttctccagttgttggggccaaggaaattagagagttcgtggctctctgggaagctctgcgcgaggtgcaattaaatccagggattgaggacgccatttactggcgctgg

SEQ ID NO: 201719 - DNA, 429 bp, Zea Mays
gtcatgaaggcgtgcaaaagacaattcacaggtggagaacatctttttacagtccaaaagcactccaccgggtacgtgagttcgtgcgcagttgtgcagtttgccaacgcaacaagactcagcaccttcatccagctggtttgctgcaacccttgcccattccttctatggtttgggctgacatatcaatggactttattgagggctttccaaaggttggtggcaagtcagtagtgctgacagttgtagaccgattctcaaagtatggccatttcattgccttgggccacccctacacggcagtctcagtggcgaaggctttcttcgatgatattgtcaaactccatagtctaccatgttccattgtaagtgatcgggacacagttttcactagccagttttggactgaaccgtttcacatggccgggg

SEQ ID NO: 201720 - DNA, 326 bp, Zea Mays
attccgtgatgaacgatcctgatttaaaacgacctaatctattcttccgaaccagatcggaatcggacggctctcggtgtttccaactgagacaagccaaccgccaccgattttggcagtcaacccgatccaacggccagatctcttccccccttaccctctcaccacgccagccagcagccggagccgtcaccagccatggcggcgccaccgttgacatcgcctgactctgaagatcggtgcccaagtgcgaccctaacatggtgtacaggccactacgaatctatttgtaggctcaatttcacctttggaaccccatgtgtagc

SEQ ID NO: 201721 - DNA, 385 bp, Zea Mays
gaagcgttagatatgataagaatcgctaatgaagctgttgacgaagccgtcgacagactgctaaatgaagtcgctgaggaagttctgaagcaagactaaatctttgtatacttgagggtgtaatgcttgtatatagctttcgtcttttgtaaggatcaaacatcatgttttgtaggtatatgaatgtaatatatttctttgtgatgcatggaaccttcatacataccgtttttgagatgttggcgaaaaaacatcttcccttcttttcatgcttcacgaagaaaaagattctccttgtgtcgctgctgacgaagattaactttttgtgggaaaatatatctgccgaaggcatatcttgtgctatagtattttctttcataatccg

SEQ ID NO: 201722 - DNA, 349 bp, Zea Mays
gtttggcgaggtgagcagcaatcctagttgtgtcaaagacatagtgggctcggcccaactcgattgcaagaaatttaaggctttaagaccaatcagcggttgatcacccaactgtagccaaagggatgaaaggaagccgttttagtcccacatcggcagcgaaacagaggccgtagagcaaggcagtgagataaaacagtgagcaggtgcaccgtacttagcatgatccttcaggcagttaaagggatatgatgagtggtaaaaactcggtttttttattccgagaggggtgcctgccccaaataagcctgttacgacaacatggcgctcacattttttaccatctgat

SEQ ID NO: 201723 - DNA, 404 bp, Zea Mays
cttgactccagggatcttccatgtgacatctgatcagacatagtttcttccaaacctgtcaccgaagatggttctgttcgaactattgatggtactttatgccacatgaaactaactaattttcgtgcacgaagaatcgttcgtggtcgtggtactggttctgcacatagaggttcaattgttattgcttactaccttcacctgctacagccttatcatcgtcttgggctcttgactccggggatctcctttcatgtgacatctgatcagacatagtttcttccaaacctgtcaccgaagatggttctgttcgaactattgatggtactttatgccacataacccaccaaggttctctttgcattccccactttactattcctaatatattatttgtacctgag

SEQ ID NO: 201724 - DNA, 387 bp, Zea Mays
gtccgcttcgtcacgcaccctgaacgcctcgccggatattggtgagtggtgccggtacgtggtggcaataagtacaccgtactgtactgtactgtacaccaccaagacgtacgtgctagtagctactagtagttctttgtttctttttggttgcctcgtcaatgtgttgcgtgcgtttaatatataaatgatgatgaatttgttttgtcgtcagggcgggcgacgacgagctgctgccggcggtggacatgttcgtgacgacggcggacccgaagctggagccggcggtggtgacggtgaacacggtgctgtcgctgctggcgctggactaccccgcgggcaagctgtcgtgctacgtctccgacgacggctgctcggcggtgacat

SEQ ID NO: 201725 - DNA, 486 bp, Zea Mays
ctagaacaaggagagaggaggacattgattgctttaagcgcgagatggcggctcggttctgcatgagtgatctcggcatgctctcctactacctcggcatcgtggcgaaacgggacagtgactatctccatgtgccaacgcgcgtatgcagaaaagctgttggagcggagcggcattcttattgcatgccatgtgcatctccaatggaagagaggttgaagctgacgaaggccagcaccacgacaaaggtggacgacatgctctatcggaggatctgcaggaggatcattgggcacagtgaagcagctactgcgctacatcaaggggacgattgaccatagcatggtcttccccaagatcggcgaaattgacccgcaattcaaagtctttaacgacatggacatggtggacgatgttgatgggcggaatagaacctcccttgtgctcgccttccttggcctgtaatgtttgagtaatctggaccgt

SEQ ID NO: 201726 - DNA, 437 bp, Zea Mays
cagcaggggtcggataaggtggaagaggtggctgatcctgccgccgtttcacctgtggctcagagttgcggcctgcctcaccaagaggatgataaggtggacgatctctcagctgttttgcctgcagcgcgcagcagcgccctcccacatgccctgcctcagtcagggccggagagggctaggcaggatggagacggtggggagaacggagaggtgcaattggtgggcggtgcagtcaagctgtcatcggatggtcagcaaggggacagggtggtgcaggtggcagggccaacgttagaagtactggggagctgtaccactgttggtgctagttctatgcagaacggtggcgagggggatggcttgttggtggcagcagagaagggctgtggtggcagcagcgatatggggcaggaggttgctgctaatgatttcac

SEQ ID NO: 201727 - DNA, 879 bp, Zea Mays
ggaaaattaagacgtgtatatgacgagtccctagatgtaaggaactctcccctggaaaacatttggaaagcacaagttatgttattgcattatttttaattgatgaatgttgtcatttttctaggtggcgcaagatcttcaaagaagtgatgttccattgtatcaccttgatgctattgattttggacgacgaatggctgtggagaaggaaatagagaaaacagaaaatgttccacaacctaatgctgtctttgatgagagttgcaattttcttatttatgctacccttttgggtgtaaaggtacgctgcactttctttctttcccatacttccttttatatgaggttggtcttcatatacttaaatatttttagtgtatcttgtattccttttgtttttgtaaacatgtgatgagcaatgtttgtattagagattcttcaatgctctaagaccttgctcaaactttatggttttactggaagattctggcattgagggcatagtagttagtgctgaactccaaagtcaaaacaaatacaaaaatacaaaataactcatgctgtgtcttgattccttgtgtgtcaagactgaagatagggttctttcatgtttctcctcttgattggttgtgtaaatagatgatagacaattccctgctttttgctgactgttttttgggtcatattgttattgaatcttttctgtaagacttattaactttgtcatacatgtgtagattgtgaatttgcacacaaataaggtttcccgtatcctggggaaggtagagaacaatgagaggtttctgagaattgcactataccaaggagacaaaggcaacaagaaggttagaaaaattccttcagtagctgccaatgtca

SEQ ID NO: 201728 - DNA, 425 bp, Zea Mays
ctagcggatgtgtccagtggcggtggcgtcgtgttgggggtggccacatcgatgtgcaggcaggcagggaggaggcggcagcgtcatgtcaggggtggctgcagcctgcagccatggctacgttggccagcaccaaagccatggatggcgaccggaggtgggcgccgatcaggaagtctggatgccaactcagtggctaatgaagaagaagatggtctaggaggataaaatctagggccaacctaactatttgtctaacagatctaaaacggtcctacatcctctccctccctgtcaggcataccaaacgcaaaacatggacatctccatccctcaaccaaaatgcagagatgcaaccatcgcgtcctgaatggatacatcccatccctcctatcccaaaaacaaacacaccccgagtatagtgg

SEQ ID NO: 201729 - DNA, 335 bp, Zea Mays
cgattggtgggctcggggtgatcaatttctcaccggagccacgaagaccgcggcggaccacgcattgtcgtgggcagcgtccctggcgccattaacccaggtatgaaggacctcctccgcctcactttggtctctgatgtgctccgcgacaaactaatttcgggattggggcgtgtgggcggcaatcgcatgggcgccggtgagcctccactgtgggcgcaccatctccgccgctctggtggtcgtgaggtggaaggcctcccatggtcgttagatttagatagacggtggagattagacatgggaatacctattgggaggataaaccagagccg

SEQ ID NO: 201730 - DNA, 332 bp, Zea Mays
tgtgttgtgcaaaggttgctgctgagaacttatttgctactagcccaactgaccctgagaccaggccatcttttcctcacactgcaccgtgttgtggatagttcggacatgccttggatggaatcttccttcaaagcccctggtgatttcggtttatctgtgtaatttctccattctttggcaaaaatcattgtttgcccttatgtactcgtccatcttttgcaacaatatttcaaaggaatggggaggcttcattgcaaaatactgagttgctggtcctggcttgatccccttaaccatggcttcgataatgatgtcatcctggtctgctg

SEQ ID NO: 201731 - DNA, 409 bp, Zea Mays
ccggtacaaaaccagcaccgagatggtgtccacctgggttaagtcgtacgcaaaagcgtcgtgtccagcggttgaggactatggaaatgacagaaaagatggaagaggaggaacgtgacagatggtttaacgaggataggccaatggttatccctaagaaaacatggagggagaaacgattggccagggaggaaaaagatgatgacaacagcagtggttccgataaagaagaaagcactgaagcacaaggggacatggatataaacatggtgtttgttttacctactgagttcagagcaggagagggagatgtggctgagctaacattgggggctgagcgtgctgtgtttgaaaaaacaagtgagcagggatctcatctaaaaccattatatgttcgtggtcacattga

SEQ ID NO: 201732 - DNA, 306 bp, Zea Mays
ctcggcaatggaaacgtgtgctatagctcacgggaggccaaaacagccttaccagtctcaatggtcaaatcatgggtggcggacgggaggcacgaaatcactgttcgacgacaaaaacatgtgtcacgggaggccaaaatagccttacgggtcttcggggactaaaacgtgtactttggtttggacactaaaattctaccatgcctgcaagcttactttggtttggacactaaaaccttttagttttggtgtttaaggttagggtttagggattggattcggggtctaggttaccatgaaaacgtg

SEQ ID NO: 201733 - DNA, 525 bp, Zea Mays
gtgaagatgtctgcatactgggaggtagtaggcacatggagaacgcggacatcaccgagagccacctgatcccgaacaaagtgcaaatcaatctcaatgtgcttggttagctgatgctggacagggtttgaagacatgtagaccgcactgatgttgtcacaatagaccaacgtggcacgacgtaacgggtgacgaagttcggccagaagctgacgaagccaagtggatttagcaacagtgttggcgacggcccggtactcggcttcagcactggagcgggacacagtcatctgtcgtttggaggaccaagaaataaggttatcaccaagaaaaactgcaaagcctgaagtggatcggcgtgtgttaggacatccagcctagtcggcatcagagtatgcaattaactcagcctgagaagaagggcgcaactgaagacccaaatgcagagtgccacgaacataacggagaatgcgcttcaaggcggcaaggtgaggctcgcgaggatcatgcatgtgaagacaaatc

SEQ ID NO: 201734 - DNA, 756 bp, Zea Mays
tggggatggaggcatggacgcagtcgttcgcggttgcacacaaagtcaggttggtgcacatcctcaagaatctccacacctcggaggtgaaaatctactccgacgcgtccaaggagttcataggagtactggatggtgagtctggcggcgaggtgctgcaggagtacgtgcaacagtcaccgcagcttggggagctgctcgaggcatggcggctccaccgggagaacccggggatggcgcacatacttttgctctttgcagctgtcctgggccaccctgatggtaagctgcggcgacatggttcggttaagaagagcttggacggtgtcgctaggatgatactggaggataaggagaagatgggggatgtgtatttggagctgaatagtggtgagttccgacggcagaatgcagcactggatttgcttgctgcaattgtcaggcgtggagggggtctagcgtctgaggtcgctgagagatttgattttaagatacctattttgccgcagctggctgggacaatgaagaagaaggggagcagggatggaaggaatcggcggaagggtgccgactttgggtccacaaggcggtcgtttattgggtttgccatgtcatttttggaggttgggaatccaaggctgcttagatgggtccttcaacagaaggaggtatattcaggggtgcttcgtgggattggaaatgatgatgctgagactgtcatctatgtcctctcaactttgcgagacaatgtcctgg

SEQ ID NO: 201735 - DNA, 361 bp, Zea Mays
gaactgtccttttgttaatcagcttcttaggaatggtctcaaaaagtcggggagcgatatccacaatccgctgcccacccaaccatcgatcactccagaaaagggtagaggctccacttcctatctcagaatacaaggccacttgtagaaactctcgaatttttctcgggatatgaagaggcagggatgaccagggccgacctggctcagttttttgcagccaagcccaacacattttaagagctcaactcagttcagtgatgctgaaaatacccaacccaccaagctcgtgaggtctgcacactctaccccaggccactgcacaatgtccacccatggcatttttacgaccacgccaaag

SEQ ID NO: 201736 - DNA, 279 bp, Zea Mays
ctcggtgctgtcagcaccagatttggtaccaaattatctttgagctttgtgcaattttcactttggacaggtgcataaggacatagcatatgatggatgatgctatgcttagggcgtgtttcgggctgctccactccaagggtgcataaggacatagcatatgatggatgacgccatgcttagggcgtgtttcggactgctccactccaagtaatctagctctaacccaactcctaaccacaacacctcccgattcatcaattccggctccataaaaat

SEQ ID NO: 201737 - DNA, 427 bp, Zea Mays
ctctgatcggtatttagctgggacagaagagattgggcttgcatggacaataccaacggttcaacgtcaagttcatcgttaagcaacctattttcgtacatgggatcattttgtgcagacagtttgggcaagttgaagtcttcaatattccctccactgttagaaaacaattgtgttagcttctttatcagcagcggcataagttgttctggtggcacaacgtagcgtggattggccagtgcgcgggtgagtgagcggtgaatgtcatccgtgaaatatagccagtacttatcaaataaagcacgaacattgccaaccgagcaatggagggcaactgttacaaagagttggcgtagctggtgtgatgaggcagagacgatggcctcatcaaagagaaggctccattcgttatcgctctcaagaaggc

SEQ ID NO: 201738 - DNA, 413 bp, Zea Mays
cagtttccaacctccagctcagcatgatcttcggggtagattgttggaagaggagcatgcaagaaccaagagcttgctacaagaccgggaagatgagaagattaagcatggctgctccatcatgactgatgcttggacagatatgaagagaagaagtattatgaatctgtgcacaaatactagtgagggaactacttttatcaagtcaatggagatgtccaaaaagggcaaggatgctacagccacggtgttgaaccctcgtttttggagaggtgtctccctttgtttgaaggtctttgagcccttggtgaaagttctacgtttggttgatggagatgtgaagccatctatgggttatgtgtacggagaacttctcaaggcaaagagggagatcaaggaggcatttggaaatg

SEQ ID NO: 201739 - DNA, 273 bp, Zea Mays
ggtccttcccccaattaaacagtacccgcggtggaggaaagggcggaggggcttaccggtggcgagattgctccagtgaggtggtcaagggcgtaggggaggtcgtgacggtcacgtcgatgtgcggatcgtctccggcgatggtcagagtaggccggtccacgtgcgcaggcgggggagctcgtcggtggcgagagctccggcctatccagggcggtagagttcaattaaactggtcagtgaggttcactaggtgttagggaaggcgtaggc

SEQ ID NO: 201740 - DNA, 512 bp, Zea Mays
tgttgatcaagtggagaatctcataaagttctgtcctacaaaagaagaaatggaacttctcaaggtgcacaacacgagattgttgctttactggcatggtgaccttattttctaaatttcccttactctgtttttgacagaattacaccggagacaaacaaaatcttgggaaatgtgaacaggtaatgcctacattatgttaaatgcgtaactgcatatagtttttatgctctcattacatgtagggaacaacaactaatggtatgtgtatgtaagatcacatttagcattggatgcactgaagttgcatatagttttaggccaattagatatgactacatggctaggtgtgtttacgagagattattgttctcctggagcagttcttcttagaattgatgaaagtgcctagaatggagtcaaaactgcgagtattctccttcaagatccagtttggttcacaagttgctgatcttagaagaagcttgaatatcatcgactcttcatgtaat

SEQ ID NO: 201741 - DNA, 546 bp, Zea Mays
caggctcaaggaacagaggcatcccttgtgggcccatgcggccgccgctggcgatggtcaaagcggcagggagtgtggagttaagaggttgacggccgcgccggcggtgagggatcacagggcggtactgagcgcactggcccgggcgctagctacgacggagtcggcgtacctggacaagaccagtcactcaatgggatcccacctagagctggcagtgaccggagcttgtctggtcgtggttctgttgagggatgacgacgtgtatgtaatgaaccttggggatagccgtgccattgtggcgcagcgatgggacgacgaagattgcttgattggaagcatgtgggtggaggacattggtgtgggcttggagaccgagacaaggatccctgggtattcggcaattgggctcgaggcattgcagctgtcgactgatcatagcacgagcattgaagaggtaatctttttgcagacatagctgaattgatgcatagtgctaaattgctaatgcatttgtgcatctactgggtttactgaaaagatgag

SEQ ID NO: 201742 - DNA, 314 bp, Zea Mays
gggccgtcgccaggtgaaaactcggagttagcacagtcacagctgccgcatcttccagctgaaaacacatatgtctgttcaaatgcagcgggcaagatatcagcagtgacttcagaagaaggtactcagcctgcgatggcgtcaattgatggtgaggggccattagagattggggcgcagagatcattgcaggagctagaggagacaacaacatccttcaagatggaagctgagccttgttcgccggagatggctcctccagggtttgaagattgtaagtctcaatggttgccactgtcacatcctaatcctct

SEQ ID NO: 201743 - DNA, 417 bp, Zea Mays
caaaatcgtaacagggcaacgtaagggttgggcgtggtgatggccttggatggaaagacgattaagaagataggtggcggtgtgaagaccttcgacccattaccgggcaggaagggatgcctaggacaataagcaacaaatgatgttattggtagtccgaataatacgttcgggcttaccattttgagcggaggtataaggacaggacatccaaagaataatgtcgtgggtgaggaagaaggtccaagtagacgagttgtcaaactcgcgaccgttgtcacactgtatgctcttgatagtgcacccaaactaggtggacacaaagccacaaaggaaaagaagtgtgacagagtggtaaaaatggcagactttagccgaagcagaaaggaccactagtgcgaaaagtcatccaaaatc

SEQ ID NO: 201744 - DNA, 407 bp, Zea Mays
ctacttgcttggtgtgccatccggacgatgatctacggggtgcaaaggccttctcagagcattattctaccactgagagggaaactatcgaggtagccatgcaagatgttgtatggcgtgtgattttatagtactattcgttattcagtggggtagctgacggcctcagcctgaagtacaaccctcgccattcgaccagcagtgctagaggtgtgattgtctcacccattgatgagggcaatcctaggatgaatagcatggtaaacctggttgccgtgcttaacaccgagctagaccacacccttgacgagttgggtaaggctcgggcggagattgcggaactacgtgctgagcgtacgatgcgccaccattaggagggtggctcccccgctcctgtcgggattcaa

SEQ ID NO: 201745 - DNA, 461 bp, Zea Mays
caacattccaaacaataatttcaacattccaaaacaataatttcaacattccaaacaataatttcaacattccaacaacataaatagataacattccaggcttacaacaacatttcaccatagtgacatagtccatagcaagtagtagaagtagcaaagacagtacaatgcatcataaaacatgttcttggaatgaaattacagtcatacatagtttccaaatgcaacaacaaattattgtaatgagcatggctgaatggcattcaacttcatttgacatcttgtgaattttccttcaaatatcttcatttggcattgtggagaatccaaaggagagttcctacaatgatatataattagttatagatatatcatgaagtcatggtaattatcagaaaagaatatgctagttcttacaacgtaccacaagttcttcttgtatatcttcaagacaagtccac

SEQ ID NO: 201746 - DNA, 661 bp, Zea Mays
gtcggcccagggaccccccggtctcgaaacaccgacacagccgctccctagtcctcaccctaaaatgttgatagctcgtcccttcatgttcatgtctcgtctctcccttcatcatccatgtcagtgtcatcatttatctctcgtcatcttgttcgtctttggtgtcatcttcaccgttggtctgttggatgctatagatctcctcttatcctcctctctcgtaccgtcgtctttatcgtggcctctatgacagtcaccttccactgttgtggcctctcttgttgtctttctcgtctccggtgatctatccaccacctgattctgcacatctcctctcggatctcatcctccccatctcttatcctatcgtactaacatactcccatcttccctaaacccttgatctcatcgattactgttagttagggtggtgctcctgtcgtagcggatcatcatctctacctctctagctctaggccccggttgtgcaggtatgtttcaaaaaccaaacccatatatctctacgtcaaaatcctggatccctaatccaatcttgttttatgtttgccattggttgcaaattgtcggttgatgcatgtgtcgtgatggtgttgtatgtgtcattgtggtacaaggctaagaggagaagatgtggttcaac

SEQ ID NO: 201747 - DNA, 347 bp, Zea Mays
ttacattgatgtttatcatatacctaccctttagaatctcctctctcctatctcaatctgagagttgtattttaccttttttcccttggtagtatccttttcctcattgctcttgagttttcaacaccaccctttgctgtgcttctgtttagttttgcctttacctttcccatctctcgaccataccttggtgattacattatgtctgtgatataaaatctccaatctcctatcccaatttgataatgatgctttacatatcttatccttggccacatcctcttctttaccgtgtgtgagcctggacgcaacttcattctttgttgtactcataccactggctctcc

SEQ ID NO: 201748 - DNA, 676 bp, Zea Mays
ggggcctgcccagcttgtttgggagcatgaccgcctttcttctcggcgcgtttgccgcgcttgccgttgctgccggaggaccgctgcaggggcgcctgttcctgcttgggcggaggcctgacggagccggaggcgagaagagcggtggccggcagggaggaatgatgtgtgaaggcgagttcctcaagaagcagatcgttccgtacctcgaggaaggtaggaagaggtcgtccgcgccgaaggtgaaggccgatgttggcgaagcgctcgttcagaccgcggatgacgttaaggacgagggtgcgatcatgaacgggttcgccaaggtcgccgagagcgtcacccatccctttgaacttgcggcagtagtcggtgatggagagatcgtcttggcgaaaattgcggaattccgcgtcgaggaagagtgcccgagtctcgcggttcccgaggaactgagactcaattgcgagccaggcggtacgagcaatagcgtcgtggatgaggacaacatcagcaaggtcagtggtgatggtgccgacaatccacgacttgacgacacagtctatttgaacccagtcaggagaagtaggcgcgaaggtgtcggtgagtacatggtcctccagagtgtacttgccgacgaggaggagggagtcgcgccatctggtgtagagtgtag

SEQ ID NO: 201749 - DNA, 499 bp, Zea Mays
taatgtattttggagctgctgcttctcgtgacattattaggaagtacgagttttactacccaaaagagaaactgaagaagctgaagaaaaagaaatcttctccatctaatgaagataagaagcagtcaaggataagatttgatgtcttattgacgtcttatgagatgatcaacatggactcgtctattctaaaaaatatagaatgggagtgcttggtacttctattttgtttcagcatcatatctctgtccagttgtccatacatagcatgttttaagatttaattaacctgtttccaaaatgtatattgtgtcaggttgtggatgaggggcatcggttgaaaaacaaagattccaagttgtttggtcaacttaaagattataataccaaacatcgtgttctattaacggggaccccagtccaggttacttcttcatatacattgtcatgcggtcatgcctgagtttttttttggaaaaactatacatttaactttacc

SEQ ID NO: 201750 - DNA, 409 bp, Zea Mays
gctgggagagcacagccgcacagaaggtctttgcagcggacgtcccaccagcaccaaaggagtcgccgatacgtggcctacaagccggcgagagtgggccggagtccgcccagcgttgtgccttggagcggccggctgggagagacggcacaacagcagcggacgacgaagaaataggatcaggcgcgcagggagaagatgagaaggccgccgggaaggaaacaacggccgggaaggtggtcgccgagcccggggtgggcgtcgacgagaggctgtggggagggcaaggggcggcgccggcgaaggagggggtggaagacgaggcgtgaggggagggggacgaggcggcccgggcaggagccgaggcggccatcacgcattgtctcaagttagctgtttttgatattgt

SEQ ID NO: 201751 - DNA, 440 bp, Zea Mays
accaaagttaaatgatggttctcgtggccttagcagaatagtaatcttgaagcccagtcctgcaagaggtcatagcagtcttatctcaggtagcgcaacttcatcaccactatcaaatcatattgattggcaagttcaggaaggcagtgataaacatgattgccatttctcgcttagagagcttaaaaggaggctaagaattgccattagcaataatcagaaggatcaccagttaaactccacgagtagtgatattcatgaagctgaggctgattctggcaaactgcttccagtcacaagtatgtcggagacggagagtctggcaagtacagattcttctgacagggctaaggaaccatctattgttgacgagaaaatagtcccggaagatagtgaaagtgggatgagaaatgatgttgctcatggtgtcggagtcagct

SEQ ID NO: 201752 - DNA, 3365 bp, Zea Mays
tcgcctatctcatagtccttccccattccgcctctctagctggcctgtcgaggaccctcgccatcctccccaggcgcaccaccaaacggtccaaacccccagcggcggcgctaggatttgagtctcagcgcgccggcaccgccaccgccaccggcggtgatggcagggcaggagcgtaggacaatcgatctggaggagggatgggcgtttatgcagaagggtatcaccaagctgaagaacatcctcgagggcaagcccgagcctcagttcagctccgaggactacatgatgctctacacgtgcgcctccttctccccttactcctcctcgccgccaccgtctcctgcgcagcggccgcttggtttcacaccgcgatccgcctcgatccggttctgatctaggttttggtcctcttgtcgcaggacgatatacaacatgtgcacgcagaagccgccgcacgactactcgcagcagctctacgacaagtatcgggagtcgttcgaggagtatatcacctccatggtgagcctcctgttcatatctatctttcccatgtgaatgtctgtattagaacttcattgttttgtatttgcggcgttgtattaaggttagatttcctactcagagaggagtaaggcagcttggatgggagtttttttagcttttgttgacggggaacaaatcgtgctctcagagcctggggctcacatgagcacttcaaatctggtacgttctgtgagcaatcaacgttaaggtgggaggggataaatggaaaattgccatcgaatcgaaactgagttgaagggaggtaaatgaaaaattactgatcactgttgtattgctcacaaaggggctgattggtttgctgcgcgctgaaccaggctcgcgagatgcaggaagcgctagtttggttgcttggtccagctaccgagctaggctcccagcatgcaaaagtgcccactctaccaggcgccggggagacgtgagaatctgttgtttcgggcgagccagtctcgagcggtgcaagaacgagctgctttggcaagcatgcagagaagaaaatgctgctgggcccgagacatgcaggcaaccaatcgttctgtgagcaatcaacgttaaggtgggaggggataaatggaaaattgccatcgaatcgaaactgagttgaagggaggtaaatgaaaaattactgatcactgttgtattgctcacaaaggggctgattggtttgctgcgcgctgaaccaggctcgcgagatgcaggaagcgctagtttggttgcttggtccagctaccgagctaggctcccagcatgcaaaagtgcccactctaccaggcgccggggagacgtgagaatctgttgtttcgggcgagccagtctcgagcggtgcaagaacgagctgctttggcaagcatgcagagaagaaaatgctgctgggcccgagacatgcaggcaaccaatcgttgtctccaccaggcctggctgtatagatacggaaaccagtcaaagcgctactgcacctctagagcctgactcctgctttggtgtatatggcgatgtcctcatttccttctgtgtttctgctaaatgatacattgatcactagtcaggttcattcactctgtagatggacattcttttgggaaaaaatgagagttgtttgccatatatgataggtggtgaattcttatagtatatagaattttcctgatctgtttgattgtaatttgtaaatgaattaattaaaactttctaatgctgcaaatattgcagtggcagtgctctcttccccttcatctgtccatctcttgatttttagagggtaattcaatctctttaattttattgtaagcatcttgatttggtgaaacacttgatctagctacttgacgtgccttgtaacaattctgtgtccatttgtttgtacacttgtgcctgctgttctgttggctccagtagattcattagatgtcctgtgatattgctgtgtctattttcattcgctgtttgttggaacttgtagcttctgttatgggcttatcgagggtagacagcaaaccaggattatttcattcactccgtagatacaaatttctttttgggagaatgagggttgtttgtcatagatggtagaacccttttgtaataatatatacaattgtcctgatctgtttgattgtaatttgtgaatggagtaatcagaacttctttcatgctctcttccccttcttttgtgtattttaaatttctgcagcacaattcaatctctttaattttataattgtaagcatcttgattggcgaaacaattgtcccatctacttgacaaacaattttgtgcccattctttgtacattgtagctcatttcttatctttataccctttaaagcatgagtttcgtgcgtcatgcgcgaagggcgtagcgtcgatctgtttattctctccccacgtcttggctaacaactaggccgttaccttccagatgggccgtgagaaaacacctaagcgcaacataacaccaagccacacgcagcgcaacgctcctggataataccacctcgctagctgaaggagtatgagcgaccgagcgagctatagaaagggggcatgtctccttttcaactcatatctttcttggccttttggctaagacaaagtgtagtgtctgcagtttaatatctgctatgtgggccatatgtccactttaattttatttttttattggaagggtccaactttaatcttaaatttgatttttgtggggcgggtccatcacactgggttgccactggacccttgggtgtcatacaattgttgcgctataccatcaaatatgattggtgtaccgtcacacgggcattgtactagtatatcatgtagactgtagagagcacctttttgtgtttttgcaccgcctcctaatggacaggagttggacactaattgatgctatctatggcaggaagataaataatggattgcataattgaatacacatggatgctagtttcaatttgcaggagcttttctgcagcttgctaatttattgtttaatgagcatctttaatttataaaagaaacttatataccctccttgagttacaggtgtttttatgactagagattgaacccacgagttgtatgatgctttcttcattgtatttgtacgttcacttctgagagctttctcactaatttttaatttcatgcaggtactaccttcgctaagggagaaacatgatgagtttatgctgagggagctagtgcaaaggtggtcaaaccataaagtcatggttcgttggctctcgcgtttctttcattaccttgaccggtacttcatatcaaggaggtcacttaccccactt

SEQ ID NO: 201753 - DNA, 274 bp, Zea Mays
catcgtcatcgtcatcgtcctcctcctcccctgactcatccaagtcatcgaggtcggacagctcgatgccccagagataagccctctccccgctgacatccccatggagtcgtccttgcaaacggatgatggggagccaggggacggcagattggtcctctcatcagagagctctgtgtcactgaagtcctccgatggcggagttgcaggttgtttcctcttgtcacccctggtgttcctcctacccttatcgtctttctttcccgccatcgga

SEQ ID NO: 201754 - DNA, 297 bp, Zea Mays
atcaggaagcaaagaagactccaaagaagacagaacaagattgtgacggatttgaagccggtatagtagtaggggtagaaagaaaaaacagaaaggagatggggtcaactaatgacatagaagaagcatcagacgagggacaaggataggaaggacgagcctcatcaaaaatcacatcccgagaagtcctcatccgacgagcaaccggatcccgacaacgataccccttatgctcaacactgtacccaagaaaaacagagtcaacagactgagccgtcagtttggtttgctcacgtg

SEQ ID NO: 201755 - DNA, 460 bp, Zea Mays
atcgaagtctctcattaaaaagacactccgcgcaaagtcgcccacgggcgcagccaaatcaacacaggcgtacgattacggccaacaagccacattaccatacaaattatagttacatacacacggcgagggcatcacatattacatcggctcaaccttcgggatgatacccatctccctgtaattgaacagcattatcctcaattcctcaccctcaaaaagattccaaagatctccctcacctatgctcgccccaatcagcgaggacagcaattctcgtttaccaacccggtctactcggagacggccacgctccatccccatacgacggtgcctaccacttcgcgaaaattcacccacactatgttttcccaccacccttcgccgcctatacccagtactcacactagcaagatccctggcaccctccacacgcggtgaagtctccgctgcagccaca

SEQ ID NO: 201756 - DNA, 408 bp, Zea Mays
caaacttacacgtatagatggctagatgggcacgggcacagcacgacacgtcattgcacgacggtggaggactggatctgtcgaggcgacgtaggacagagctagagggccttacagcaaagacgaagagaaggcagcggagggggacaagccgaggaggcgaggagagcaggtggcaacgcaaatccagtccaccgatgactagatctaggaggcgagtaggtgtagctgaggataggacgaggcggtgacacaaatctagtccatcagtgattggatctcgaaggcgaggaggcgaccgaggcgtcgtagatccagtccactagcgacttgatctcagaggcgttgccaacgaggtgtgagcaagggcgagaagccgaggcgaggtcgacaagacagaggcatcgg

SEQ ID NO: 201757 - DNA, 1767 bp, Zea Mays
tttagaaggtggtaaaaactccccaatatttacagacatcttgaacatggtatgtggttgcgttgataacacatcctctgacaggtatgcatcacattaaccgagataatgccgtgtcacacttttgcacaagtactaacatgagtatggttctatgtactgtagtactgttctccaagtcttgaaagtgcttctcaatgctgttgcttcaaataggtttagaggtaatttttacaagcatattctctactcgtatttttattaggtaagtttagctaatgctgtttttttaaaaatgcatttatgagatatgagcttataaataataacatcatgcattaaccggttaagcttatgcacaacactgcaacatgcctgtattaatttggacaatgttcgttctcattttttttttctgtatctgtaagtgtatgaaaatcatataaggaaataagttgcaagttgtttataaattcttatattttactgtaacaaagccagtggggccaaagtagttctgcatgtagatatatttctatgttaaagtacaatgtaagctgcaaaacacaattcatcttttgtgtttgattctgttttttggaatgcagttcatggagagccattgcttggggtcattagagtatgctataacattgctcttaataggtacctgttatatcactaccttcttgtttgcagtatgttgccttgttgccctttggaccatgtatgataatttattcatttgtattttgttagcaagagccctgtgaaccaggctacctcaaaggctatgttaacccagatgatcagcattgtattcaggagaatggaatctgagcaggtaaagaattccacatatcttatcttgtgcctaggaaaatgattcattgaggttgtttctctaggtattattttactttcttggttccaggtttctgtattgcctgcaagctctgtggttaaagatacaccttcatctatcacaaatgaatctgaaaatggagaaatatctaccgatggccaagatgaggaaaaagttactccgggagatgcattgtctatgaatcggccttctgaagcacctccaacatctgttgaagagcttcagaatcttgctggtggagcagatattaaggtactgaaactggatctcgttgctcttggaactttcaaacgtgtcttaggtattgcattggttccatctaattacaagagatcttttacaggggctggaagctgttctagacaaggctgttgaacttgaagatgggaagaaagtgtcacggtttgttaagcttgtactaaggtttttttgcatctctaaggtgatgcatccgggactcagatgtggcagtagctaattacctttgcccctcccctcttctgtttttccagtggaattgacctggacactgtgaacataatacagcgggatgcactattgctctttcgaactctttgcaaggttggttgctttagtaatgttactttagtcggagctataagaaagtaacaattatatcctaactatgttgtgttatccttttagatgagcatgaaagaagaaagtgatgaagttgctaccaagacaaggctgctatcacttgaactgctccaggttagcttacttctttgaggttgcttatttttatttttttctttgttttgattttattcgtagccattctcttcagggattgctagagggagtcagcaacgcattcacaaaaaatttccacttcattgattcggttaaagcatatc

SEQ ID NO: 201758 - DNA, 459 bp, Zea Mays
ggcctgtagaatcactagtattagaggatgaatcacatgttatcgttgagaaggacttggtttctcagggagaagaggaggacattgaggctcttcttggcaagtaagttacctgaatctgatctaaacagcttcagatatctccttggcagttggcatgccaccttttgtgcttgcagatcctgatcattcagtttatctatcttgtgtgtgccaattgattggatatgctggactcctggactaatacattaacatgctccacgtttcataccatctatctcattgtaacaagaaattgcagtgaaaatcttataattgccattgtgtgcctctaacatttcggcatttgtgcagatgaattctttatgtgcctatggtatacctttccatgacaatttaactggtgcagataactcttttttttccagttatgttatggccattggtgaagcagag

SEQ ID NO: 201759 - DNA, 330 bp, Zea Mays
gtgagttagaaggctctcaagcactcccaagcatggacacgaagtccctagggaacagccagccaaggccggccaccacttctgcttgtagcctaaagggctaactagccattgccccttcactaagcaaaacacgagagcaccggatcgtccgatgcacccccatcggaccaaaggccatggtccaatgccccgagcgcactgacgtgtcattctaacattcaaactagtcattgggtgcgccaacaactaccctggcacaaggttcaacgctcctaagttcaatggccatcggaccaacaaccacaccaatctgatgtgttctaaaga

SEQ ID NO: 201760 - DNA, 1991 bp, Zea Mays
ggcaagtgcagccctctagcctcaggtgagagagcgatcaaatatgtcgtcattatgtttgttctattcactcctttgtaccacacgtgatgttgtatgtacaataattttgtattgcatggtttgaacattcttttgatacaacatcagccgagggttcttcgtcaacattcagcatgtcactatctatgaaggatttggacacggccttccatggagctggacaaaaggagtatcctttttcattggcttccctatactatgtgctttttcagggtctaacatctttatatcatcgagacgcattgcgagaacataggatggctctcttaacctaaacaggtttggatgataatttgtgaactgattccaacagtaaacatgccatgcttaccataaagcacctaatttgtgtgtctgcatgttaatctgagaaacatacacaagttgcatattgtttgtcagttaaactgtcaaataacatttaggggggtgtttggttcctttactcacccttctaaagtctttagtccctagaaatcttatttgaaagacctattttagtcaccccgattggtattttaaagactaaaagtgaataaactttagtcgctaaagtttaagaggtgggaaccaaacaccctctttgtcttctcagtgctctcatgtagtgattgttgtccggactcttgcagcatatcttattttctgtgataggctgctaaagtttgacatgaattcatgacttggtgagatgactctcaccatattaggtatgttcttcttattctgcataacatagtaaaacttttatttaatgtaactgtaaaaatgtctattgtcatgtcgcaaatatttagctttagattaaattaaaagttcagatatcatgcagacttcctatcccacctcctataatataggaaataaaataatttggtagaataatctgaaatagtataaagtaatcatttatttgatactaccactatatgctaattaggatatatatatatataaaataaatcgttgttggaccaagctacgagccacctcgcgagccgcagtgaacaaagaaacaagctagacttgggcttgttttcagcccgagccactccgagctatgtcacgagctaattttccacccctaattgtgctccttaatttagttatagcggtttgatggtatggcgtattgagaattttaagccagttcctgtgccaacatcattacatggaaaattttatatgggtgattcatatatcatcttgaaggtatggatttactgatacacttttcacgaacatcttttatttaggaaaattgttggtgcatcttaattgaagggtaaaatagttggtcctgcttgaagcaaaagcttagaggcgctgagaaatatgtgacaaatgttttctctaattttttatatttctcatcttgtatcatttagtttaacccttaatggtgcatgatacactttactgtctaatgtccataaagttctcatcatgatagtacattctatttatgattgatcttagtattgccttattttttctgcactgaatattgtttcctgcagacaacagctttaaaaaatggttcctttcgccatgacatccattattggcttggtaaagacactagtcaggtagatttttaaaccatttgacattgcatcactttattttgctcttcaggtatgatatacaactattttttgttaactaacaactttctaaaaatgtccattcttttccttggtaggatgaggctggaactgctgcaattttaactgtggagcttgatgctgcgcttggaggacgtgctgtccagtaccgggaatcacaaggcaatgaaactgaaaggtttctctcatattttaggccttgcatcatgccacaatcaggaggggtagtttctgggttcaaccatgtagaagtcaatgatcagaagcatgttacccgattatatgtgtgccgaggaaaac

SEQ ID NO: 201761 - DNA, 420 bp, Zea Mays
agctcatcaaatacaacataacgagaaataataattcggcgcgtggagagatccaggcagcgataccccttgtgagcagaagggtaccctaagaagacacaggcgacagaacggggcacaagcttatgcagaaacgtggcctgtaagttaggataacagagagaaccaaaggcgcgcaagtgctcataggaagcaggggtattgtatagacgggtgtacagaacctcatggcgtatggaggaggaaggtctgcggtcaagcaagtatgtggcagctgcgagggcctcaacccaatacttgggtggcatggacgcatgaaggagcagggtacacacagagttgttgagggtacagagaacacgttcagccttgccattctgtggtgaagtgtggggacaagaaagattaaaaatgatgttg

SEQ ID NO: 201762 - DNA, 447 bp, Zea Mays
gccgtggggagatgggaaggctccagagtgtcgcaggcgaagcttcgcttcagcacgtcgcaggaggactctccggctagcctcacccgaacgcgcctcgaaggtgcttgggcaacatggcctcggctcctcattggcgatccccaatctctcacaatacgctggcagaaaacccaatccccctggtggtcgtgcttaatggtgatggtgtatggaagccacgagccacccaagcatatatatacttagcacagggaatcatatcccgctcggatcggtgattaggtaccatcaacaaacaagccgcgcacagatcttcggggaaaggatggccgcgccgagcgcggaatccacgggagagatccgagtccgctcccaccgtcaaagatctcgcggcattcagttgagatgggggggcgcaaccaagagttccggcggcattggcgg

SEQ ID NO: 201763 - DNA, 354 bp, Zea Mays
cggcgggttcattttcaggatttcagagggctctttagcaaaaaggcaacggcgaagaggtataaatagatttcagccattggatcctagttcaagcgctcagatcagatcttacttaaaacgaaccggatttcttcaggagcccttggatctgtatccaacggtccatagcctatctgcgggttggatggcagggactgatccatccgtcggtccccagatcaatggttctgattcactgcaaccacacgacgccccagcttctaatcccaaacgtccagcagggatccaacggcccaggtaccatctcctacctccagcttggctggtgagaactgggcgcgacgctcggta

SEQ ID NO: 201764 - DNA, 365 bp, Zea Mays
cctggggttcgcattgattgtcagttagcagcgccaacgctgtcattccgcacataacaaatgtacccgcactgcacgctcatgcgtcttgcagtactaattacagtaccaccgatgtactcgcgcttttttctggcgcttaaacggatgaacacgcaggcggcaggtcgtttccactttccagtgcagggaaatgggaagaacctctccattccctactgtttgcgggcaggccactgatgaaagttccgccgcgcctagccttctgcgccggcgcaaatttctgccaatgctcgcccccataacacacaagtgctcgttccgttgctatatatgctccctcccttgacgcgcaggactcgccg

SEQ ID NO: 201765 - DNA, 286 bp, Zea Mays
tagacacagagaacagtccagtggaccgcgggttgattcccaacgtccagaggggctctttaacaaaagtgccagcgcgaaagggtatggcatgatcgtgtccgtccgattagatttgaagggcgcagattagatctaacttaactgaagcggtacacgatactagccaccggatccgagatccacgcccacggtttaatgagaccctatctaatctgagtcgtccagagagcgatcaacggcacaggctgtttccttcaatcctacaccggcgccatcaatctga

SEQ ID NO: 201766 - DNA, 1422 bp, Zea Mays
gtccaagcgctatagaaactataaccaccccttccacccctctatatacatcaagcaaacacaactaaagtgccgatcgttcctgtcattgtcttgaattgcagaagcagcagactcagccgatcgatttacccatctgtgacttctctcgccctgaggtatatgtctgcgctgccgtatcatctgctggagcaaataaagggcacatgagttcttagtacggcttctctccctcccacactatacccgtgcctccaactcgtatttgttaagcggctaatctcagagcttctgttgggagctggggaccatttgtttagattcagtgcggggtttcctcgcctccctccttccatgggagcttggaagctgctggatctctgcaagtgactatgagccagagtgagtgctttttgttgcgattactcatcgtttatttggtgattcttgattgccgtggtcaaggcatcatctttattgcctcctgggagttgacctaggtggggcgatcagagcagtggttcttgtttcttggccttgggtcttttgattccttctgatgctgttcagtggatggttttttcgatataaagagagaattgagaaaagaaaatatcggattcttttgagcccttctatttctgcagtgattgatggaatatggagtttgtcatattctttttgagctcattccagtccgtcgactctggctcgaattcaccgtttagcttttggtacaactgcaacgcatgggatgttgttacaagcttttggaagcatacgtgcgccctctcctacaggattgtcttgccttaagatttcattgaccttatgttgcacctataaagatacaaatcttggcaaggttcatggcttatgttgggcttttgaccctcctgaggccagtacattcgacgaacttgaaaagattaggatttttcttttcataactttattagatatctttatattgagaagggaatgatttcgccaactaatcatatcccatgatgagattcatgttagtattaaaattttattgtggtccgatggggtttaatagaatattaactaacggtgcacctatcggcttattctttggtatgctatctggctgtaggttttgacatcaacgtacttcgtgaagaagcaaggagtcggtggttaaagccttctgaagtgtactatatcttgcagaatcacgagaggttcccgatcacccatgaggcaccaaagaagccgcccagtaaagcacatatatctcttaactagaggaatttatcttactagtataattgtgcttttctttaacaacctatttgattcttttacaggtggttccctattcctttacaatcgtcgtgtcaatcgttatttccggagagatggtcacacatggcggcggaagaaggatggaagaac

SEQ ID NO: 201767 - DNA, 360 bp, Zea Mays
gcgttcttcttttcaatcatttgttataagaatacagcagcctcgtatacttgttgtcctggattttctgcttcctgttgttgagtattttgtgccttctttaggctcgataactggcagagaggaaagcttagacccgaagaatgatcctcttatgagggctgatgatattatacttactgagcatgttttcttgcaaaaagaggattttattcaactatctcctgtaaggcagctaatagttgatggttgtgatattgacgagttcatttatgatggctgtgggggcactgtatccttatgtgaggaatttgataagaaaggacaggtatactctgggattataatcataattggttg

SEQ ID NO: 201768 - DNA, 336 bp, Zea Mays
attgttgtttatttccgccaaaacataactcctcacacttgatctgttcaaaggaaacagtgcttgatttccagacatacaattacagtgtcatgagtttattctcattatcatactagctaattgagtgtgttgattttctgtagcaatttggtatctcttttggggcagccacgcgcaagaaaaaaaggctaaaaatactcttctcccattgtagaccaaatgccaaaattcacacgcacgtagccaacgactttgctgcaaaatgtttctgtttggctgctcatgttgaaaagtaaagtcttggtgccactcagactcaggtgcataatccac

SEQ ID NO: 201769 - DNA, 304 bp, Zea Mays
attttctcctgtgtcattgaggatgtcagaaaaaatcattttgggagcataggcagtttttttcagaagcgacagctcaactgctcaatggattcctcagtttgtatacacaaaacttctgaggcagaagtagtgaaaaatgctaagaggtgtctggagatcgttagtttaatgaagtcttctcatgaagtacgtgaaacaaagaatggatggtggccacctccacatcatgaaagtttggtgaagattgggggtcctgagttagtgctttgggccaatgagtacattcctacttataagctgc

SEQ ID NO: 201770 - DNA, 349 bp, Zea Mays
gtaagtttgagaggcgtcatcttccagacagtcaaatgacggcaggtggcctcggcgtcatgatcgctttacctggagcgttgaaggtaacactcattcctccctatctctacattacgctctatccttctctctcttattacttctccggcaccgtcaagccgtcgtctaaggatttcagcacgccatcgagccaccctcttctgctccgtccagacgttattttgaaatatgctccctttggctgccgatattctccgtttccttcaccgtttcgtagcaatccacgaggcgaattcacttgctccgtccgagcgtccctagctgccaaatgcgatgacgctgctgt

SEQ ID NO: 201771 - DNA, 595 bp, Zea Mays
aattcaccgggaggggattctttggctgaggtttttgggatattgtttgatgaaaacaagaatttgccaactgaaatatctgactcaaacatttggttcagtctcgatcatccaaaggtacaatatgatatgggacttgctgtagaattttactttccatggaaactctgaattttatcctgtcttaaactcttaatgcctctagaatgatttcttgccctagttcaaatcatattttaggttgtgagtaattcgccacagttagccttttcctaaattagtttgttttgttatcttttctagtctttgatgtgttagatgtatatgttgtgtagcatattttccttattgtataagggcctttatgcattgtgcaatgtatgtactgtgggcttgggccgttactgtgaatacaagcaccattctaacatgatgaattttatatatgataaaggctacggttcgtcaatctgctctctcaaaagttgctacatctggcatcttcaataacagaactctaaatcctcaggtaacaacttttgctctttgcaaatgttcacttctatatgcgcactgttgtattgaagctttcctc

SEQ ID NO: 201772 - DNA, 285 bp, Zea Mays
gcctctaacagatccacctgcgggagcaccatgtgcatgtgtgctaccaatcagagttggaattcgtctaagcgttgacctttactcattttttccattggtctctgattttgctgaagaggtagcttcaggggtaaacatggcacagaggcaggtccgtgtaatgggtgcgaacgttgcaggtgatcaacctgacaaaacaatggttcttgttgatctagttccagtgcaagtgaagttcgacaatgctacagcattttcagcatttgaaagcttgtggagcaa

SEQ ID NO: 201773 - DNA, 579 bp, Zea Mays
acgccatggccccgtctcaccaccgcctcagcctcttccttgccgtcgccgccaccattgccgcagcgctgctagcttccgtcgctgcggaaaacggcatgaacgacgttgaggcgctgatgcagctcaagaagtccttcaccaactcctcgtcgctctcgtcgtggctcattaccgataaggacgggaacaggtccccctgcgcgccggactcgcaccactggcacggcgtggtgtgctcccatggagtggtcaccggcctccgcctgaacggcctcaagctcggcggcaccatcgaagtcaactcgctcgccagcttcccgcgcctcaggtccatctccttcgccagtaacaacttctccggcccactccccgccttccaccagatcaaggcgctcaagtcgatgtacctctccaacaaccagttcaccggcagcatccccgacgacttcttcgtcaatctcagccacctcaagaagctctggctcaatgacaaccagctctccggctccattccagcttccatctcacaggccacgtccctcctcgagctccgcctcgatcgcaacgccttcacgg

SEQ ID NO: 201774 - DNA, 436 bp, Zea Mays
ccgcccctgccgctaatcctcgctgcaccaccattgtatgctgcccagcaataggctgcgcaacagccctatacaccatggcaggacgcctgggactaacagtctcttgcaaattccttcaacacgatgtcactacagcagccaccttcgctcacctccgagtgggtagctgactctagtgcgtctaaccacatgacaccttatgctggtaatatctcactttttcgccccccctaattttgctatcccttcatcaattgttgttggaaatgagtctattctgtctgtcacctcagtaggcgacacggtcctccccgaccctttttatgtaaacaatgtccttgttacatttgaaattatcaagaacctgatctttgttcgtcaattcaccattgataacagttgctctatgaaatttaacccttttggtctcttt

SEQ ID NO: 201775 - DNA, 429 bp, Zea Mays
ctaaaccgccaccaatcgccgggaacgcgattgattacccgtggtgcccgctgtcaccgtggacagagcagggtagatcgtcgttcgtgaaattggttgaggggaaaggtacggtaggcatctagtttggtccctgtctctttggagctccagccatggcgttggccggccggaattggctcgccggggtgcggcgagggctgttcctcgtcgtggaccttggtctgcgaaggaatagaagtttaaggacctttctgcaatctgtcagtgacgcaaagaaatagtaaccgagcttgttcccagttagttaaaagcccgagggcccttctgcaagatttccacgcgggcgtgagcgcacttctgctgtggttgggccgtcctggattagattgggcccagtactattcacagatttcccttttctttttc

SEQ ID NO: 201776 - DNA, 301 bp, Zea Mays
cgttcatttctagtccatctgacccgtttttgtgcagcacatcagttgcgtgaggcaactctatcccaacttcttttgccttctgctcgtccacctccatgctatccccgggctcaccagatccatctgcccttctctggcttcccacaacctccttaatgacgtcctcctgcccaaacctagcactgccactctccacgacaaccaggtcaccttcctcttccgaattcggcaagtgatggtcctccctgaccccagcagtacctgattttccagatgcacggttcctgctccctgcctc

SEQ ID NO: 201777 - DNA, 339 bp, Zea Mays
ggaagtttctggtaaagatgcttacggagtaaagacatctaatccactatttcgatcccaatgtgccaaaaagtatagatcaaatgatgttgaagatgatgatttacccatttcagtgaataatgttaacattgcgccaaatgagcatgctgaggtggttcccacaatgtctactgccatgactcgtgaatcaaatttacaagatgttccaagagaaagcacctctgatgatttagctccgaaagtggtttgttgccaacaaaagcttttggaaaacacaggagatgattcctgtaaaactttagaggtggttcaagattcaggcgatatattgtctgc

SEQ ID NO: 201778 - DNA, 447 bp, Zea Mays
ctggtatttttctttgagtaaagaaacgactcggactatggcagcacttccttgaaccgtacgtaaaacggcctctgcaattgcctacttgctcctcgtgaggacaggatgcctccgttgattggacttcagtttgcatgcgaatcatgaatgcgacttgaattatgacagcaggaaccaagaaggacttcagatcggcattaacaggaggacaggagcagatgggtcttttctgcaggataggcgtcaaacccaaacgccaggaagaacagatgtatcccgctgcctcgggagcagcagcaaatatgtagaacacgcgcggatggcggcgatgcggtgaacatcgtcggcgatggtgatatcaacagggactgaaaccctaatttttaatctcctgatgttgatgatgttggcagagttgatggccatggagctagctaatgtcgg

SEQ ID NO: 201779 - DNA, 432 bp, Zea Mays
ttcaaccggtacatggtctggagcgtggagctggcgatgtctacggtctggtccgcgaagccgaccatgatcgccgggtcgacgaagatgtcgggcatggagatcacctcgatgccattgacgtaggcgtaggtctcgttgcccatgggcgttggcgtgaaggtgagggtgaggaaccccgcgggcgtaggcgggaaggagaactcccggatgatgtacgcctggctcagcgcctttgcgtaggtgtacgcgctgaagttgcggagtagcgtgatgccggtggacgtggacacggagaagtggaagccggcggcggagagcccgctgtaggaggacgggtagaagtggaggcgcacccagtggcggtcccgtgggttcacggtgaagttgtacacggcctccacggtgaacacacgcgccgtcatgtagggg

SEQ ID NO: 201780 - DNA, 373 bp, Zea Mays
ctttgtcagtcttgccttaactctgcccatggttatgcttttcatcattatcacatttaaccttatcacctctgtatcttaccttgaagtttatcttataccagcctttacaatatcctcttttccatctcaatctgagcattgtactgtatctacttcttccttggtcgtatcctcctctttgttacctacgagttttaactctatcctttgttgtgttttgtttgtcgtctcctttacccttctcatcactctatcctaccttgtgatgacattatgtctgttatctaaaatctccaacttcccatctcatttcgggagtggtattctacttatcctgccttttggtcgtaacctcgtagttgccacgcgc

SEQ ID NO: 201781 - DNA, 663 bp, Zea Mays
gcaacaagtcctttgccccagaacacaaacatgccttcaatcccgaagaatgcttcatcagtgccacatgcccatccctcaccaccaagtatagctccagaattggcacccactggtagatctcatgctcagggatggaaatccagtaatcccaataacaaaacaaatagattacatgccccatcttatccaccgcctcgtgctcaaggtttgacaatgaacttctatcggcagcctaaatattgtcacttctcaacattgatctaaaagactttgcattacagggcccgaggtctcacgaaccccaagacagactgggactaaaaactatactcaccatgcgcctccaccattccctcaaggtaatctacgctaacatgcgggtttaaagattgcattcatttcacttactaacaactttcacattgttcttttctgtccaggacaccctagctttcctgtacactccccatccccttcaccagcctcatcgaggggtcctgcgaacgcgaagaaaagtactttcagtgccttgtctctttgcttcacttattgttgtcttttcctcttgtcaatagaaatttacagaactgctggattccacaggaaatcatatttctcctactcttccttcaatccctcccctaccagagccaaaagcac

SEQ ID NO: 201782 - DNA, 296 bp, Zea Mays
ttgctgtgcccagccgctccattcttgtttggaccgcgcccctctgctcgtcgcccctccccagcagagatctctccccagcaaggttcctcccatggccatcgtgtgcagccacgagctccagtcctcttcttcctccctgcgtgcggatctcccctgctggcgcgcctaactccagctcgctctccagccgttcctcccatgccatggtcttccctgctccagctcggtatcctctattcctccactgcgagaacgccaggctgcaccagtttgttgggcacctgcgccgaact

SEQ ID NO: 201783 - DNA, 299 bp, Zea Mays
ggttcatctcgagttctgtttgatttctatccttcgttgacgaggttgatctatcatcttccttctccagtcttggtgttcatcatccatgttagggccatgtacttaagacatagttgtaggtagactgaataatttagtaggtagaatagagagcttagtaggtggtatatgctaaatgagattaggcataatctgttttgttgttttgcttctaggttgggctatataggtcatacaacccactatgtagattaggatgttgttcatggccgagttggtctaagtcaccaatttag

SEQ ID NO: 201784 - DNA, 528 bp, Zea Mays
gtttggtggcttggagcaaggttactagaccaaaagaatttggaggattgggcatctcacacctgcagaagatgagttgggcccttaggatgcactggctctggttgcaaaaaactgaactggccagccatggacatcctttgaaatgaatgcacatccttctgttaaggtcttctctgcaacggtttcttctgtggtgggcaacggtaagaacaccatgttttggacagataaatggatagatggctagagtctgtgttagttggctcctcatctggtcaagttggtctcttctagggccaaaaagaggagtgtctacgatgctctcacttcaaggaactgggtgcatgacataagaggagctatcactgtaagtattttgtctgaatttctcaagtttgggacctcactgtagactgggccctgaatccggatcaggaggataagcatatatggctgctctcaagctcaggaatatactctgccaaatcggcatatgacggtttcttccttggagcaacaactttt

SEQ ID NO: 201785 - DNA, 402 bp, Zea Mays
aacaaacacacaggattgctccgcctctcggaatcagatagttcttggccgcctttgttgtgatcgtggccacaaggccccaagggatgcaggtcgcgtcgattgaatgagaagtaggtgagggagatagagcatggttgaggatggcgccgatcatacttcaccgtgcgttgtccttctccatcccgttgcttcatcgccgtgatgtgtcgtcgcccttacaggtcttgatctgatcatcttctacaaccgatgaatccatggatatggagacctggattgtaatgcaaaggaatggatggattggccaattattgatctgaactaaatttttacaggcctcggatgtgtcgaacagacctgaaggcctggcattattgacgagaattgctgaggacactg

SEQ ID NO: 201786 - DNA, 387 bp, Zea Mays
cttcggtaatgtcaataatctgcaatttttgtgtgaaaatgggcggatacataaatttgcaaacagtatctgttggcctgcatttatgcttcaggagtatcatcagcaaaaaattcttaatgctcaggccatcctgaaagctgataaagaaagcactgggccttcaccaacattggaatctttctcaaatcctgtagatattcttgatacatcagaatggaacgagtattctgtaaaattaagcataacactttgctcatttctccttcctcccaaggagatcaaatactgccctgctccaactgatgttacccaaatttcactatccatctcattggcttactgggagcaatgtgcaaggtggattataaaggttctttcaacagt

SEQ ID NO: 201787 - DNA, 1337 bp, Zea Mays
gcaggacctccgccgcctcctcgccgacggcgccgacagcaaggtcaccttcgacgagttcccgtactacctcaggtctagtttcctcctccgctccgccctttcttcagacgtcgtcctcccatgcattctgctttctgcaccaacgcacggaaagaagctgctggctgcagcagcgacgcgcacgtcggttcagagttcccgtcatgcgacgagactctgccagagctgcagctgctgctccctcgtcgcctgcttgctctactttgaatctgtctgttgatgcgtctcccgtcccgtcaccttttcttaccctgtgatgtgatgtgcatgctacatgagatgactagaccagctgcgtgttctctgaaccagatagaaaaattagaagaactcgggctaaataaaaagtagtaggaaagaggtgtgtgtgatttccaggctcatggatcagcaacggaactctgctctggtcgctaccgatgaacaaacgatccttgtttccgatttctgcggtcgtaggataaagtgtcatgctccatttgcatgtcggtattggaggacaccaaatcagccatagtattgaaataaaatgcaaattcaattatgttgtttggaggtcactatattggagtttgaaattagatggtataattccacataatacagatgagtgaccctttgaattaggagagagagaatctagttatattccaattccacggaattgattttctgattccaaatctcaatttcatgtgcaagcaaacgacagaatttcatctatatccaaacggggcattagatttttagaggaaaaaacaagcagatctcgcaggtgcctgcctcgtgcaatcaaatggctgcaacgaaaggtggtgacagaaatcgtcctggtcggttctggatgagaatgcatgttctatggtatcagttcacagatgcttaaaaaactaaattggttgtgtctgatctgaccatgtatcaatgacgggatgcactgcatacagtgagttctgtttgtacgctcatcttcttgtccaattccggttcgcagtgagcaaacgcgtgttgtgctgaccagcgctgcgtacgttcacttgaaacaagcagagatttccaagtacaccaggaatcttgctcccgccagtcgtgcaatcctgctgtcaggtcccgcaggtacattgtcatcttccgcttgtattggcactcctctcagccaatttgtttctgcttcactgaactaagactcaatgtcctgtcttgaagagctctaccaacagatgctagccagagctcttgcccactattttcaagcaaagttgctcttgctagat

SEQ ID NO: 201788 - DNA, 349 bp, Zea Mays
tgggacgacgcgtcgcactcgacgatgaatggcttggtgaagtctggtagcgcgaggactggtgccgaagtgactgctgtcttcagtgccataaatgctgtcgtggcctcctctgtccaggagaagccctccttcttgagcagcgctgtcaggggtgccgctatgacaccgtaatcgtggacgaatttgcggtagtagcctgcaaggcctaaaaagcccctgaccgcccgcgccgaacgaggttgtggccagtcccggacagcttccaccttggcgggatccatggcgacgccggaagcggagatgacgtggcccaggtaagccaccgatgggacagcgaacgcgcact

SEQ ID NO: 201789 - DNA, 312 bp, Zea Mays
tacagttacgcaaggccatcggggatttacctaacctagcattgtgttctgatgcttgcaaagggctaacaaatgcaatgaaggatgtttttccagaagcagagaaaagagagtgtttccggcacctaatgaacaattatgtcaagcaatatgctggatcagaatacatgtaccctgctgctagggcgtacaaggcagaagtatatgacatgtacattgcaaatgtcagaagcaatcctgatattgctgcttggttagataggtttcattccttgttgtggtaccgaagtgcattcaaccctactatcaaat

SEQ ID NO: 201790 - DNA, 330 bp, Zea Mays
gtgacttgcgcactgttccacttcaaactcttggaaaggctagacacctaattgatgttaaggacatcagttggtggacagataatgttcttatgttggtaagaaaagatggtagcattagcatgtacagcatcactgaagacaagatagtttccaatgatgacccggttttatctacaccaatattggagaaggcaaaggctactgaaggacatgcttttgttttgcaatctaggagatatggaacaaacactccagttaataagcggatggatagtgactcggaaccttgtctgctgagtggttctggggagcaccaacaaacagaag

SEQ ID NO: 201791 - DNA, 347 bp, Zea Mays
tgagaggcgcattatacgtcttttggttcaacgtctggtcaaggttcaatgcaatataatagtcgtcaagattctcaacatggcccatgctccttaggtgctcggagtacgggtttccacgaagtatgccaactatctgtctaataacctctttgtctctctgaagctgatctgcacgacacttacggtaccgatgctcaagactgggatcatcatcgtaaaagtaaagctctaggtgtttatgctccgccccaccttccctaccaaatgacttgatattgtggtacatcatgccttgagcccggaacgtgtatataccagaatccctcacattagtagtcatgcta

SEQ ID NO: 201792 - DNA, 300 bp, Zea Mays
gcccacgcacccacgcccctcttcttccctgtggccggctgcccgcccgccgccatggatgggcgtgatcgtgtgcccgtccctcctcgaccacgcgacacgtggggcccgtccggcttcagcacgcgcctacccgccctggtgctcgccgccgttgtacacccttcgcctgcccgcctcctcttcctcgacctccaccatgcatgccctaactgctgctacctcgtccatcacctggcaccgccgtcttggccatcctaggcgtgatgtgatgtcgaagttgtctagcagttttgtcat

SEQ ID NO: 201793 - DNA, 769 bp, Zea Mays
cgcgtgtgcacagtgtgtcagcaatacaaatccgagcaccttcaaccggcgggcttgctccttcctctaccagtgccacagggtgtctggacggacatcgcgatggattttgtggaggccctccctcgcgtccgcggcaagtcggtaatccttaccgtggtggatcggttcagcaagtactgccacttcatccccctggcgcacccatactccgctgaatccgtcgcccaggctttcttcaccgacatcgttcgtctacacggtgttccgcagtccatcgtctctgatcgggacacggtcttcacctccgcattttggcgcgaactcatgcgcctgttgggtacaaagctacacatgacgacggcgttccacccccagtccgacggccagtccgagtcggccaaccgcgtcatcgtcatgtacctgcggtgtttgacgggggatcgaccacgccaatgggtcaggtggctaccttgggctgagtacctcttcaacacggcgttccagtcctccctgcgcgacactccgttccgcgtggtgtacgggcgcgacccaccctcgatcagatcctatgagccgggcgacaccagggtgcaagcagtcgcgaagtccatggaggagagggcggagttcctggccgatgtacgctaccgcctcgagcaggcacaggcgacgcagaagctgcaatacgaccgcgaccaccgctcggtcagctaccaggtcggcgactgggctctacttcgtcttcggcaacgatcggcgtcctcat

SEQ ID NO: 201794 - DNA, 407 bp, Zea Mays
catgtgctctcttgatctgacgcgaggtgcgtgcgtgcgtcgtttctgcagttatcaggaggaaggaggcgagcggcgcttctcgggaaggcgtctacttcgaaatcgaggtgagttctcacttctcaggcacacatttgaatgcactcgcaaaattgtgagttcgttcgcattggtgtagtggctaatccaatttgatttgcgctttagtgttaaatcacaaccgtgcaatagccaatctactaggcgtgtaggtatgagcatacgcctaatgaaggagttcatctgtgcccaggtgaaggtttgcaacgggaagcttctgcacgtagttgcttcacgaaagggtttctacttggcagggaagccacaaaacgtaagccactccctggtggacctgctgcaacagc

SEQ ID NO: 201795 - DNA, 716 bp, Zea Mays
ggttactcgtgttgtcctaccacgagttgtcatgcacgcgagacatcattatggagtaagttctaactaaagatgtggaaaaagttaattgagtcattggcgacagttatttattttcatgctctttacttagaaaaccccttcatataaactaaccaatttgttttcatgctctttacttagaaaatcacttcatataaactaaccggtttttgtcttgtactcttgtgctaggcattttcccaaaacttcactgggttagaattggaagacgggggaggccggggcacctcaggtagataacatgcaccctttatggtcttaatttttatttttctttctttccttttttcatttgctgttatatgtatgcatcatgcaagtttccaaacacattcatttgttttgatgtttgatatactattaggttcacattgggagaagaggctcttaatgaatgagatcatgactgggtcagtggatacgagatctgtggtttcaagaatgactttagcattactggaggacagtggatggtatcaagctaattacagcatggctgaacatttagattggggtcagaatcagggaacagagtttgttatatctccttgcaactcatggaaaggggcataccattgcaatacaactcaattatcaggatgcacatataatagggaggcagaaggttactgccctatagtaaactatagtgg

SEQ ID NO: 201796 - DNA, 336 bp, Zea Mays
atttattaaaggaaactgtaggttgcaagcttgcaaagcagactgtacatttaccctctctaggagcatatggtggaattcttattgcttgtgatgaagactattttgatattgctccaattacttacacttcaatctactcaatatcagttagggttagttacagattggaggacgtggtgtgggacctaacggctgtttatggcccccagcaggagaatgaaaaaaatgatttttctaactgaactgtgtaccatctctaacctgatgagacctaaatggttgattttaggagacttcaacatgataaggagagtgagggaaaaaacaagggag

SEQ ID NO: 201797 - DNA, 407 bp, Zea Mays
caagatatatctgagctactagagagcttgggcatgacgtcagatccagggtgaccaagacgactatgccaaatggtggtggtggtggtagtagctagagcatggggggatgtgctggtggggaaagcggatggtcggagcgtggctagggcatagggtggggcaacacaagaggagggaggtggggcgggaaagcgaagagagtatagggtgccaaagctgtcacatcgagcgagcacgtcacaagtgacaaggtgttgtatggtgtgccccagggattgaactccattgaacaatggttgtcagtagtaaagcggcgaattgagacaaggtgctgaatcatatgaggggcaacaaggacatcgttaaggtaaatggtccccggaagaacaaaattacctactgag

SEQ ID NO: 201798 - DNA, 521 bp, Zea Mays
aagatggagctccacatcagtgcagtgatccctcaacaaattctgagcagtagccaaatcccaagcactccttcgccacctccccgtcgatcgatccctgaggatctccggagcaggtgttttaactgtctggcctcctctcatcgggcggcggattgccgacgttcggtgcgctgcttcaagtgttgggggctcggacatcgtgcagttaagtgcaaggttcgtgctgcgccggtgatcaaagcttcagtatcggtgtgggatcgtcttggccctctgctggttcacaaacctttggacattcctagacgcgccatggagtggcgcagggtctcttcgccgatcccggccatccagaggtccggtgtggctgatcctaccttgggtggcacgaagaaacgccgccatcgtacgcggggtcgaaggcctaagaccgcccccgttgcaccttcggaggattccagtgatgttgcacctccacccggttcctcttccccagagccggtcagggtgcatgcccc

SEQ ID NO: 201799 - DNA, 302 bp, Zea Mays
gggcgatgctgttccagtagtgtccacagtcccccaaaccagtctagcctggggcgaacctgctccactcagctccagcaaccccgcacacatggcattgtgcaggggtggaacgtgaatagccaggtccagcggcccagtaccagagcgcatctcgagcccatcaaaaccattactatgctgcccacttaatccatcagcaaaaacagcaacgatgtcaacttgactgtgcatcttcttcaacatgtcacctccagtaatgtccccagaaaccgatacaagtctagactggggcgatcctg

SEQ ID NO: 201800 - DNA, 509 bp, Zea Mays
cgccctgtctgatcttgatgcacgcctatgcctgatcactgtgatttttgtcgctgggatggcagaagcagctccggagggaggccgaactgcaggcacagcttgagtccacccatgaggacctgaagaaggccaaggatcaactggcattcatcctcggagagagggaccgtcttgtcggggagctcaacgaggccaagagagtcgctgatgagactcacgagaagctccaggatgccctcatggccaagaggtgggccgaggaggccactgagatcgagaagttccgcgcggatgagctggagcaggcaggcatcgatgaggcacagaggcgggaggaggagtggcagagggagattgagtgcgtgcatggccagcacgccgcggacttggagacgttggtcaacacaacggaggagctggagaggctcagacgtgatctttccatggtgaacgacgccaagaaagctgcacttggccatgcagatgatgcaatgaagatcgctgag

SEQ ID NO: 201801 - DNA, 403 bp, Zea Mays
cgcggcgcagccggtggagtgtgcggtgaacgccctcgtgaccgtctgcgtggacagcggtaacgatctccggcagtagaggagaggcggcggggatgtagaggcgcccgtcgaatgtgaccatgccgtccgtcacggcccacgaggcagcgcgtgtgccggcgcgtacctcatcgtggacagccaccaaggcgggatccatggcctgggcatggcgcaagcggctgatgaagtcgaaacggggcgccgagatagccaacagctcaccttcctcggtgtttcggcgagagagcgcgtccgccacgacgttagtcgcacccgacctgtactcaacagagaagtcaaagcccaacagcttcccgacccaatgatgttgtgggatcgtggccaggcgctggtcaag

SEQ ID NO: 201802 - DNA, 391 bp, Zea Mays
gaggagattttttaactgagcatagcaattgcaaggatcacaggcgtgttgtgtttactttttctttgaattgcagacattctttttgttggctgcctgcacttacctgaacacatttgcattgtagtgttttgttattggaatcgtgttatagtttgtgttacgtactgctatgtaacaatgatttgttttttctgttcatggtaccattgacttcagatttgaatctcgtctgtatatgtatgcagtgccattttaatggagtttcatggattttgtcttcattatcttatgtttgtgatgcaaccctgcttcctttgcaggaggcgtactctcatcttcccaaaatctctagcaaggaaacacatccaaagatagcacaagttctgct

SEQ ID NO: 201803 - DNA, 283 bp, Zea Mays
taagggggtagcctgcctccacctgattctgccttcagtcaatctgcatcgtcgatctgtccctgctcaatcctcaccctcgaagcaaaagatagtggccgcgatcgtcgtgcgtcttactgtttcacacgatggccgcgatcctcccccacgagccgccgcgatggccgcgatcctccctctccctccgtatactgatttgatgatgtcgtcactgcctttttcggttgatgcagtttaaccttaatatgttgaacgagtgtcgtcgtggtggtgtgtctgc

SEQ ID NO: 201804 - DNA, 334 bp, Zea Mays
aaagatgctgtaagcaaatttggaggcattcttgattggaaagaggtaatgtctattttcctaataggttctttatattcctcaataccctttttattttcggtgttaacttagaatattaccatggttttcaattccatttattttttatagagacgtaagcatgtccaaattgaacttgacaaagcactagaagatgctcctaagtaccaaaaaagagcggaagttgcagaagttgagaaaaataaagttgtcatggaattgtgtaacactaggagagccattgaagggttgaagctaaatttggagaagacacaaaatgaggcaatacaag

SEQ ID NO: 201805 - DNA, 416 bp, Zea Mays
ttcaacttttagtctataattgtttcaaatatccatagtattttatagtcaaaagtgggtgattaggagagcatgggtatatatatgtatgtccactttattatgtaggatagaagatgtccttagagcatagataggtttagttatgaaagggtagggctaggaaaaactctatccaagattatggatcttgattacttttgaagatctagcttgaatcttatccttccttgatttgatgagctcgatcatcttcgatcttcgttcttgaagttgtcatccgaattagggacatgtagttaggataacttgtaggtaaggatagatggttaacaggttggtggcataagataagtgtattatggcaacatctaggatgggatggatggtcaccatgaatatgctggtaagttatt

SEQ ID NO: 201806 - DNA, 327 bp, Zea Mays
aaagtgatcaagatcacacttgtttgaatagtatggttcaaattcacggaaagtcacatccatgcttacaaataaccttctcctaatagggtcccaacacttgtatcccttttgtgtagatgcataaccaacaaaaacacacttaacggcttgaggatccaatttacccactgaaggtcgatggtcgtgcacaaagaaaacacaaccaaaaactctatgtgggactttaaactctcgttgttccaataggagttcagcaggctatctcatacccagtaccctcgatggcatgctattgatcaggtatgcaactgtcatcactgcctc

SEQ ID NO: 201807 - DNA, 311 bp, Zea Mays
tgcaagtaacacctgtgcaatctcctggttccatgatgcctgcagtccatgcagtattgatatgcagcggctacttccttggtaacgtgcgagtaatgatgagcgtagtgcacgtggcagtatgggcgtgctgcctgcaagtggaatggacaggcacgccgcctacggaatggacaggtcgccacctgctagaggaatggataggtcgccgcctgccaggggaatggactggtctcaaaaaatgcagaggcggcacaccgtctgctagtggaatggataggcggcgtgccttatcctcattaaatgcagag

SEQ ID NO: 201808 - DNA, 628 bp, Zea Mays
atttatagcccgaaatactcaaaactggagaggtccagacatcacaatgaacgagttcaaaaggtgtagatgtattagaaacagaactatcaaaaggcagcctagcgtgtttgcctagctggcaggcatggcaaatgcggcgagctgctttattacactgtatagctgaaagtttatttagggtttgaacggcggctggcgctggatgaccgaggcgagcatgccacaactctggagtaacgacagcaacatggcagcgaggcggcagacgatgtggaatggtgtagagatccccgttgctattgcaccgaaggaggactgttttggtttagagatccttaacagaaaaactagaagcgtcaaactcaatagaacagttattgtcgcgagtaagctgtcgaacagataacaaattacgagcaagctgaggagcgacaagaacattattaagatgaaaatagcgatcagctataggtaagagagatgtgccacggccagatgaagggatggactgcccgttcccgaccgtaacggagcacggtggggaaggtaacgggaaaggagtataccgtcgttggaggacatgtgggatgttgctccgctgtccataacccaagaaggagagtcc

SEQ ID NO: 201809 - DNA, 277 bp, Zea Mays
tgctggtggtagtgctggggctgataaatatatgcgacaactcgttggttgtcagctggctgatttctggccatcctatctatggtggccttggttttcgggcaatccctggtggggtgtgtgcagtcttcaccatgaaacaggtagtaaaaccttcacagctgctgggtccggcctctgcctcttcctttgatgttggtgtcgcggttttgttgtgcggggtactcctgacgacgagctgtgtctctggtgtggtgttcgttggcgacgatgttta

SEQ ID NO: 201810 - DNA, 524 bp, Zea Mays
gtggaagtagtatttgtttcaccccagcctttgtctgaatcgaacaggtcaatctcttcctagtgctcagccatatatcctaatctaggattaacaagttaatcctgcatgttcgataaaaaacatcttcatcttaataaccaatctattgctgttgcattccactatttgtaggaatatagaaaagtctcattaagatacactcttcttctcagggtgctcattatcttcagagatggggttatgagtttgtgggatattaaagctagcaaagcagtatccatatctggtaaaactacgcagcagcaatcacagaaggaggctaaaaatgtaacatcagcatgctgggtttgtgccaagggaagcaaaattgctatcggatacgataatggcgatttatacatttgggccattcctgaggttacaagtacacaaaattcctcatctatgggtggccagaatctacctattcagaggcttaacctaggatacaagctagacaagttgccaatagtctctttgca

SEQ ID NO: 201811 - DNA, 513 bp, Zea Mays
gcgacagatcgcaggacgcgaaggcctccagtgccagccgacggattgctccgctgatgatgaacgacatcggaggatgatgccttcgccgacgccaagcccctgtgacagtggcctggcatgccgcaggcgtagtaggcgtggttggacgcgctgaggttgaaggaattgtcgttgccgagtctggtcatgggcgtgacaggtcacagaacgtgaaggcctccagtgccagccgtcggaggctgacgccatgcctcctcactccaaccagcccgtcccggcccgagcttccgagagatctccccgccaccgaatcgctgaccgccatcctgatccgatggggccatggggacggtgcacgagatctggtgatggagtcgggcgtcaggattggggaggtctgggatggacatccatatcccgcacacccgcgaacgttctaggagtactaggatgcagtgctctgcccttttccacaccgccacgcgaacaaactctcgtgaccatccaaac

SEQ ID NO: 201812 - DNA, 329 bp, Zea Mays
cttgattgttttctccaccttgccattacgcgagtcttaccttaattctatcctttgtcatactttttattggtatcatctttacctttgtcatctttacatatcaccttgttgcttattgtatacctgctctataaaattttcccttttccatctcaaattgagagttgtattttacccattttcccttggatgcatcctattctttgccgcttgaactttcaactccatcgtttaatgtgttttgtttgatattgcatgtacccttgtgaccctaccatgatgcttgtcgttttcctgtcacttaaaacctcccttctcccctctca

SEQ ID NO: 201813 - DNA, 288 bp, Zea Mays
tttctcattccattctgaactgatattatcctaccacttttctctttccattctaacttcagtctctgataaccactgattgtttatcatcttttttatcattcatttttatacgcccaaatcttgttagccatttcttatgagatgggaatatcttttggtttacttgcagcttaattccatgatggatcttggaagcgatgttcaagttcgtgctgctggaggtctcctagcaatattagacaatgagagacttcttgacaccattgagcagatggaaggtggagc

SEQ ID NO: 201814 - DNA, 395 bp, Zea Mays
ttatcgatttcttgccacctttggttggactaggactgcactgcgtgatcagcttgactttccatgcacattttcttacggcctgtcaccaccaatctgtggtcaaatctgcccgtgcaagtcgctttttgttaagagctacaattaagcaatttgcatggacaacttaacactgaaacaaagtgcaggtgtccatatcccgaccagattgatgttattaactctgacatgtcttacatgttgcatgaatccaaacatctcagaagcaagcttaaatgatttttccaaaattttaatggtcaaaggacgactgcacataattttattaggttgcaaaatctgttgtgatgcaaagtaaaggcaactttgatgaagtttacaaaagcatacgctcc

SEQ ID NO: 201815 - DNA, 319 bp, Zea Mays
gccaagccagacaacagaaaaactcccagattcagatatgatatgaataataatacctcatggagtaatgatccgatctcctttccaatgatatctgatctgatgttgtttcagggatttaagcaagaattacttaacaggttctttgccatctttcctcgggaatttgactgctatgcagtacatgtgagatttacaacataaaatattaccccgttacatattttacttaacatcaaaacttaaactttccctctttgaaaatacaaggactttgggcaccaatgcattgtctggatctgttccaaaggagcttggg

SEQ ID NO: 201816 - DNA, 287 bp, Zea Mays
ctcccaatctcacggatttgaaaagacaagacagaaaagcaaggatgggtagcatttttagggtggatgaaacactctcaaatagctaaatgggggttgaatttaaggttatatgtcatgatgcatactcgtctaaacgtccccatagtttttgccatcctaatgtggcaatcacgttctatgtcggtggcatgcctacgcacttcgtcaccaaatactagtcacaacttcctagggttttgttagcgtacgtgcagaaaaatccattacagcccaaaccccatgat

SEQ ID NO: 201817 - DNA, 2187 bp, Zea Mays
gactggtgaaggtaatattgcattaatacttgttccacaacttgttactgatctgcggagatggtgatgaaaacttgtgctgtttgcactgtgttgacattttttaaatgtattctttccctttctcagaagttttagctcaggagaattgtaatgaccagcctgttcctgcccagaccgacctagaaattaagttaaatgatgaacttgctgatccgggtatggaccgtgtttaatttaccaattttaaacataccgagttctaagtcaagttgttggctacttgtaattctaattgtttttaataggctttatatttattctatctgcaaaagctaggcatatgtttcattgtcatttgatgtcttttaagtatctgacatttattttttaaatgtattctttccctttatcagatgttttagctcaggagaattgtaatgaccagcctgttcctgccaacgagcctgaggaaaagaacctagctaacgtcatatcaactgatctccacaccaaaactctgcagcatgataatgacagaatagctgaagagactgataaaggtacaaccgaattaatcctgcccagactgacctagaaattaagttaaacgatgaacttgctgatccgggtatggactgtgtttaatttaccaattttaaacatactgcagagttttggtttatcaattagtttcactgttgcagaccatgaagagcaaagcaatgtgttcggagaacggagagttagcttggaagcaaatgccaacgagcctgaggaaaagaacctagctaacgtcatatcaactgatctccacaccaaaactctgcagcatgataatgacagaatagctgaagagactgataaaggtacaaccgaattaatcctgcccagactgacctagaaattaagttaaacgatgaacttgctgatccgggtatggactgtgtttaatttaccaattttaaacatactgagttctaagtcaaattgttggctacgtgtaattctaatcattagctttgtccattattgtcatgttatatactgaaaggaagactttgtcgttccaaaatcaccaaatggtttatcaattagtttcactgttgcagaccatgaagagcaaagcaatgtgtccggagaacggagagttagcttggaagcaaatgccaacgagcctgaggaaaagaacctagctaacgtcatatcaactgatctccacaccaaaactctgcagcatgataatgacagaatagctgaagagactgataaaggtacaaccgaattaatcctgtatccataataaaaactccgcaacattgatgagtgaagataatatgtatgctgaacatctaaatccacctgtgccaactgattattcactattttttttctaaagatcttgcttagtaatcttgcttcaagattttcaattcactaaattaaacttgctaaatctccagatgtttcgtctttggttttccctattgaagagcatgaagaaaaatatgcagtgagccctatagctgttgaaaagagcgtcagtcgggaagccagtgcatgtgaatctgcaggaaaacccctaactgtcatcttttctaacgatctccacaccaaacatctgcaacatgattgtgatgtgctaattaaggagactggtgaaggtaatattgcattaatatttgttccacaacttgttactgatctgcggagatggtgatgaaaacttgtgctgtttgcactgtgtttaatttaccaattttaaacatactgagttctaagtcaagttgttggctacttgtaattctatatatttttaataggctttatgtttgttgtatctgcaacagttaggcatatgtttcattgtcatttgttgtcttttaagtatctgacatttattttttaaatgtattctttccctttctcagatgttttagctcaggagaattgtaatgaccagcctgttccggcccagactgacctagaaatgaagttaaacgatgaacttgctgatccgggtatggactgtgtttaatttaccaattttaaacatactgagttctaagtcaaattgttggctacgtgtaattctaattatttttaataggctttattgttgttctatctgcaacagctaggcatatgtttcattgtcatttgttgtcttttaagtatctgacattt

SEQ ID NO: 201818 - DNA, 878 bp, Zea Mays
gtctcctgtcgcaaatcgccaatgggtcacaaatggtcaaactcgagaaggatccagatgcagcattcgctctagttattgatggaaaagctctagcatttgctttggaggatgacatgaagcatatgttcttgaacctggcaatcgagtgtgcttctgttatatgttgccgtgtgtcaccgaagcagaaagcactggtaggtttgcctctatccattggattatctgtagtttctcaataaagcgttgttgagtttactcttcactttgtaggtgactcgtctcgtcaaagaaggtataggacaaaccactttagcagtaggtgatggtgcaaatgatgtgggcatgattcaagaagctgatattggagttggtataagtggggtagagggaatgcaggtgagttgttcagattatcatgatctaatccctatctagtgtagtgctactttcatttaacatcaaggattggtgattaggtatgagtaaactttttttgtcctttaccaggcagtgatggctagtgatttttccatttctcaatttcggtttcttgagagacttcttgtcgtccatggacattggtgctacaagagaatcgcccaaatggtgctgctcgaagcacttctactcattctattgcatctgattctgttatgttttaacttcactaaattttctttgttcttttgttaaattgcagatttgctacttcttttacaagaatattgcctttggacttacaatattttactttgaagcattcgctgggttttctgggcaatctgtatacgatgattggtttatgctgcttttcaatgttgttcttacctcgcttcctgttatatcactcggagtttttgagcaagatgtttcgt

SEQ ID NO: 201819 - DNA, 312 bp, Zea Mays
gcgttgagggacggtggagacatcaagcaggaggcttaggaaataacgctcagtggttttcctctccctcggtgacgcacgctcgacctcggcgccgcacgctcgacctcgacgccacacgctcttctatgcgctgaatcaggcgaggttgaggtcgtgcgtgcgtaagtggcggagctggcagagcggttgaggtcgtggtcatgggggaggaggtcgaggtcgtgggcagagtgcggcgcgccgtcgtggagtggagggcaccgcccacatcgaagaagatgacaggcgcggtaggctgggctgcacaat

SEQ ID NO: 201820 - DNA, 531 bp, Zea Mays
ctgccagatatcatgtggcaagaagctccgatgtgggcagcatgcatgccagctactctgccacagtggtcattgcccaccctgcttggagactatattcactgatctcacttgtgcctgtggcagaacttctctcctgccacctctgccttgtggaacaccaacaccatcttgtccacatcagtgctcagtgccccagccttgtggacatcctgcctcacattcatgccattttggggactgtccgccttgtattgtgccggtgatgagagaatgcattggaggacatgtgatgctgaggaatatcccttgcggatcgaaggatatcaggtgcaaccaaccatgtgggaaaaatcgccaatgtggaatccatgcttgcaacaggccttgccaccctcccccttgtgatcagacacctgcaaatggagatgctagctcaagctctggcggcaaagctgcttgtggacaagtatgcggtgccgcgaggagggaatgcaagcatacatgtactgccccatgccacccatcgtc

SEQ ID NO: 201821 - DNA, 333 bp, Zea Mays
agtgtcagtcctttggtgtgtgaagaagtggattcaggtaccatctcatctcaccatttagcgaagtacgaaatttggaccttcggttgtagatttactccacccatgtcctctgacataaaattcggaacttgtcaggctgttcctcttcagtttctgcatgctcttttaacatatctcggtgactctgtggaccatggcagtggatcttctggtctcaaatcaccattagcttcacgcccttcttccttcccagggattggtgttccttctgaagcccttgtgagatggcacatgcgccttgaatattttgcttatgaaaccttgcaggac

SEQ ID NO: 201822 - DNA, 486 bp, Zea Mays
aattgaccaagtgttcgtattttccaagctggaagttttgcattagtgttgcagaagttgtaccaaatgattactcttggtgttacatttcccaaactacaagccatcttacagctatagcagatagattcacttgtggaccataacgatagagcgaatgtatacacgttaatacatatcctatgacccaaacataacactcgggacaaaactacaagttgcagaaatccacactgattagatgcgctctccgcagaacattagtgaattcagttgcacgcatcaaagcgcacggtggtggctctatattcgccttctagtcagaatcacatgcaccagcaaagctttccaccgagtacttgtacttcaattccatcgcagtcgcaacctaacattcatgggaacctctccaggaaactaacccagaccgggtcgtacccctcgagctcacccaatacggaaaagctacagcgaaggcgggcgaca

SEQ ID NO: 201823 - DNA, 341 bp, Zea Mays
gttttttgggtcaaagtaacaatagttttctgtgcatatagtctgaattccttattaccgaagagcaactccaaaaaaactacaaacttaccccaaaacagatattaggaaagaaaactattttttaatcccaacagttccctcatgctcttctgaaaaatttcgcatctctcattcacagcctttcctaccgcatatttttgcgtcaactatcctcccaatccgtcgcgtgtcatgtattgcgctcaactcttgctatcagacaccgtgcatggctcgtgctcgcggatgcgggactgcgcctcccttgaccaagcttgtctgtagccccattgtggtag

SEQ ID NO: 201824 - DNA, 374 bp, Zea Mays
gctttgagcaagaggatgtcactattcatgccagccagattcgccagctgtttggattttccgagtcgtcgactcgccttcacagcctgtgctatggtacttctgatcctcctcgacgtcctcacggcggagtcgctccagccacagctcacgtcacgacccagtttcgaccgcctttcacagatgggtcgcgatgctcgccaacagatttcactccagcggccaagtatctctatcagatcatgagacggacactactgccccggatgggttatagagaggccaccactcacattcagctctggctccttggtgccctgatctcacattcagagtttgatgtggttgatttccttatctgtgagatcgaggac

SEQ ID NO: 201825 - DNA, 405 bp, Zea Mays
ggaccacactttcaagtcaaaattgaagataccatcttccactattccactttcatgtcaaaactcaagatgacggacatgaggcgtcactctgtggatgtcccgctgtcaagaaccttggtgcagctcaagcgattgagatcgctgcgggatccagcgacaaactcaatgggcaagttcgcatctcctgccgaccacatggtgtgggagactgcttctagcaatggggtggctctggagctcggcaggtcggcacataatcaccaggttgaagaagacgaggacgtgggagccgagcctacaatggggtcggagcggagttttcggggaccaaacgcaaggactgcgtcctacaggagatcttctgctgtcaggatcagaggcttgaacccaccaagaaacaag

SEQ ID NO: 201826 - DNA, 1411 bp, Zea Mays
ctcctccactccccgcccccggcgcccctgcacgccgtcccatttctctcgtcccccctcctcctccccttcccctaccatctcagtggcggcggggctagggctctccttctccgttcctccctcaatcctcctcccctcctccctctcgcatccagtcaaactccagccagccaaaaccagcagcctcgaccaggccgccggcaggccgaccgattgatcggtgtggatcgagtcgagggaaggaggcaacgggctacaggaccaagtccagcacccaggcgcaaaaacttcctgagcaggatcatgccttcttgccctcggggaagaagcgccaaaggttcgtttttccccctccgcaccgcaaccctcgccgctcgctcggatatactccactagcagtgccatttctggatgctccttcaatccaaccctactagtccctagatctgccaccgatccaaggcaaggcatggccaccgtgcggcctgcgtgcgtgcctcgctgctgcggttgtcggcaggtttatttagatgccgggcgtttaccccaactgaaaatctagattgagctgtcgtggactgataaactcaggtcagcactgcaggcaggagcagccccagaggacaaaatggctcgtctgttcttactcttcctcgtatctatttattctttctctctctctctctctttctttttatgtcgatccccattgcctcgtcgatccagatacactagggagtgctttccattgctatgaccatatatatatttgacaaaaaaggtctctggggtgagtagctacagagcgaatggaacactgatgtggttttgtttacctgtatctgcatcagcaggggaaggaaggatttgtgccatctgactccagtgcctgcattctagactcccaagctcgaacacaggccagggaagggaagcggtggccatggaacctcacagcctgcggttcgtcaggtgcccgaaatgccaccagctcctcgtcgagtacccctccattcctgtctacaagtgtggcggctgtggcacggttctcagaggtaccaattgtcccccccatctttcatttctatgtttatggaaacaaacaaacaatctgatcggtatatgtggtttgtcaccggcgcagcgaaacatcgggctgcccctgcagcacgagctggttcagaatctggggagcacagcaccggctctccgtgtagcctgaacggctcccctagccagagtagcggatcgatctgctcgggcgaacagagagctggctcctctgttgatcggcctcatgaggccacggctcatggaagcatgtcctccgctgccaacaacatcgactcgtgtgacggcacagtccatgaaagaaccatgtctgcagcagatagtggtgtaacccatg

SEQ ID NO: 201827 - DNA, 346 bp, Zea Mays
tttctggaactggcagtgatatggatagcatacaatcaaatgaaagaaacacgtcaggactagcttcaagttccagcaacaccattgataccgagggtgctgaaactactgaacttcagagacataaagatactgcttgtcctggactcaagagacaagattcatcaaaatccgtacaagataatcaacatcctggacatgagaataagcaaccaaagataattaagaagatactaacaactctaagagaggagagcaaatttagggaaagcaattctcctgttagagctagccgtgtaaagctaaattcacctagcaatagagaacgctcatctgacgactcaaa

SEQ ID NO: 201828 - DNA, 280 bp, Zea Mays
caccagcgcgcccgagcaacgtggtggttgttcacctccgcgttcaagaggccgcaagacatgacgcccctctgcaacgctccgtccgacactgaccttcatctgtggtgactgggcaactaccacgactactctcctttgtaaaagggggtctgctggcctcgccaccatctactccagccacaccaccctatgcgcattggtggccgcgggaccatgaggggctgcactgcacgggattcacttgctgcaagcaacaccaacgttggcctccacgggc

SEQ ID NO: 201829 - DNA, 274 bp, Zea Mays
aaaaaatttgcgcagattatcaatgttccaggaatgctccaagtcctcgccggatggtgttgcgagcctgtatgcgctgggggatgccttcgtcttgacgatgaaagggccctcccacttgggctccagtttgcccctggactctgtccgagctattcggacgagtacgaggtccccttcgctgaattcccttgggatgactgcgtggtcacgccatgcttttgtttgggcttggtacttatttagagcctgtagggcgaagacgcggtcgcca

SEQ ID NO: 201830 - DNA, 345 bp, Zea Mays
cattaatcgccatgtgtatcattaagctctttgcaaggggacagtattagaatggagcaccaactccttttatatgtttctaagctcacaccctcctcaaatagcagattggggtggtatttaattgccccaagcccaaaaacaatcgctaccaaaagttgttgcaatctacatatgcatcagacatatcagtgatagcactagacaccagaccatacctctaacaattcgaccgttgaaaaatgaccattagatgcttttctagggtggcactagatatgtgtggtgtttgaatgggggtcactataatgtcttacatgtattcaacatggcttctaatggctt

SEQ ID NO: 201831 - DNA, 354 bp, Zea Mays
gcggaagtgagataatctcgtgataccatgtaggaaagtatatgccgccaatagtaggttgattatagaggtagaaggggtgtacaatatatagacaaggatcgtctaaggttgatagaaagcactcaatcagtggagatccttgcctagcctctgatcaactaccataaacaccaaggcacatatgcgggcagggctgatcaacacatatggcaagcctgatcatcctaattacatagtcgaacatgttaattgaaacaatggttaacaatatggtacctgaattcagacaagcattctaagttgtagtaaacgttgcattgatacttccctcacaaatagcttatcaaggca

SEQ ID NO: 201832 - DNA, 565 bp, Zea Mays
gtataccatctgcattttcatgttcatgaattgggttttggcttgttcattttcatgttcatgaattgggttttggcttgttgccaaaatcatatgtattcgaaggaacaaaggaggtcactaaggaacggatactggagcaaatgtgcttttttgtagggaagaaaatgactaccacaggcgtgatcgctggtaccagagatggcctttcatctgagagcatttctaggtttcttttgcctgcttttgaatgagagtttgtattgaacttagttaaggaccaattacattaattacaattaaaataggagatatcactgtatttcatatagcatagccttgtgttgaattttaataatttatcataaaattttattgtatgcgtgttagggaagaaatacaaaagaacctttggcatgttccagttgattagcgtgcatctaggtgcactggagttgccttatgttgcagtcagtctccttggggtttgtgttcgtggatctggtgctaggataatggcatttgttggcggtccatctatagagggccctgatcttgtaagtcc

SEQ ID NO: 201833 - DNA, 332 bp, Zea Mays
ggcgaggaagatgatcccgaggcggcgaagaggaaggctccaagtaagaagaggaagctcccgcctctgtttagcccgggtgcacgttaccactggaagctttgcggcgccaatagcggctaccactatatcccctgtgtggatttcgatggggatgggaggcagaggcaccatgaacgcagctgccaaaggtctcctgtgacatgtttggtgtcactccccaaggaatataaacaacctgctccatggcccgagaggaaggacaaggtgaggactttgccataattcgtgtttcaagaaaatgagatgatcataatcaaacatgaataact

SEQ ID NO: 201834 - DNA, 332 bp, Zea Mays
ctggcccgcgggactagcaagcaaatactactagcagtaccagcaggacacaacgtttataccgtcaccagcggtctactcatggtttattaaaaacaatattttatattgttttatagtataaattatattgtttgtaaagtaaagtttaaacgttaggccaactacctggctgcccgcctcttaggcgtaaggatgctctgaccattcttcaagacttcaaccatggctacgcgtacgaggccggctggcggacgtgggagccacgcgtgccgcacatctttttatttacagcacttatttatttacgctcgcacgtgtggttacgtgtg

SEQ ID NO: 201835 - DNA, 500 bp, Zea Mays
cgacagtattccaaatttcagtgctgcagatgctctgaggattacaggggtaggaagaaatgaatttattgatatcatgaataagtgcagatcaaaggtatttatcaactgtaccatgatctttcattaacattattgttggcatgtgtagtcttgctgtgatataggaatggacacacttgggttattatttcctaagggcatgttcgtttactctagaacggttaagtttatttagggctagcttggcaaccctatttttttgacgagatttttattttatcaaggaaaaaatagaaattacatggaaaaatagagttgccaaactaacccttatacctgacctcaatttgatctaaccgaacagggcctgaatggaattaacgagaacatactgaaaatgaccttttccatgttttctcctgttacaaaaataaccccattttcggatatttcagaagataatgtggaaactgaacaaatcaattgcgaaagagttg

SEQ ID NO: 201836 - DNA, 307 bp, Zea Mays
atggcattctggaagagaggacagcgtattctctggaaaggactaggttcgcagcgctgggacatttccatgagacctacagtccggtcactcaaagcagagcccaaacctatgatggaatgtctgctacagcagcttcgcgaagtgtttgagacacctacgggccttcccccagttaggtgttgtgatcactggattcagctcctcccagggacagcaccagtagcagtacggccttacagatatccacagctccagaaagatgaacttgaagcctagtgtaaggccatgctccaacaaggcatca

SEQ ID NO: 201837 - DNA, 391 bp, Zea Mays
attacagagggatccctagaggccccatggcagatacgggaaggcttgatactgcacggccgcaaggtgtttatcccaacatcatccaaactcattccctcaatactggaggccgcacactcagcaggacatggtggagtacaaaagacgctgcatcgattaagagatgatttcttcattcacaaggataggacactggtacaggattgggtcaaatcatgtgcaatctgtcagaggaacaaaacagagtcgctgcatcccgcagggctcctccaaccgctagaagtcccaatacaaatatggacagacatctcaatggatttcattgagggtttaccaaaggtccatggtaagtctgtcatattaacagtggttgatcggttctctaaat

SEQ ID NO: 201838 - DNA, 505 bp, Zea Mays
ctttccaatcctaggggggagttctctaactgtataaaaggagacacaaggtatctaggagatcgtgcgaccagaggatacacctcaacatcctctgtgagaggaggtacccttgttgtttgccctatgtcattattgggccaatggaaggttagtatcttgatttactattgaagcaattgtcattagtaagctttttatttgtctttgtaatcaatggcagaatatttgaatgtcactgctaattttttcaatcttatcctgttattcatgcactgcatcttgaacaaacttaataattagtttagtttctgcaataaacttaatcacacaagaaaattaattacatccatattgtccatcctcacaggatgagttggaggcacattcggcacaaggagctctttctgtgtttgtgcattatgctggtgataaaactagtagcctcatgctgatggctcaacatgatgtcgttttaacaacctatggtgtcctctcagctgca

SEQ ID NO: 201839 - DNA, 311 bp, Zea Mays
tagagtacataagaaaacgtagagcactgttggctgacacattgagtcaggagtccatcgccatggagtccccaacatatacccctgaggttgtacaccctacaacagatgcaattgaacctaatggatctgctcttaccccctgcgactgggttatccctgatatcgccagtaacccgttcctaccagcttcaacacagaccgaggatgccgattcactgcgtatgtctactagaccactaagacgtaaacaacatgtgccacgtggtgaaagacaagctatcttagcccgtcgaaaccggcaatttgaa

SEQ ID NO: 201840 - DNA, 351 bp, Zea Mays
agacgaagaagaggtggcatgcggaagtcgaagggtgtagagggggccagtgctgtcacatcggaggagggggcgccgagttgccaagtccttcacagtaagaccataagagtcaaactcgacagaacaagaattatcagcaggaaaacgacgaatagaaagaagattatgaaccaaaggagcgacaagaacatggggaaggcaaaaagagccgagagggccggcggcacccacagatgtgacatgaagacacaagccattcgccaccatgatggacgaagggagaggagttgggagtggtgtggggtaggtagcaccggtgtccgcgatccactcgggacccatcggcgg

SEQ ID NO: 201841 - DNA, 362 bp, Zea Mays
accctgtctcacttcttcgcttgggtctccactcagttcggtagcaccatccggagcatccagtgtgacaacggccacgagttctataacaatgtgtcccgaaattttttcctctctcgcagagtccacctccgtatgccgtgtccctacacgtctcctcagaatggtagggctgagcgcatgattcgcacagcgaacgatgtcacgcgctccctgctctttcaggcttcccttcctcctcactactgggctgaggccctcaccactgccacctacctactcaaccgtctgccaaccaagacggttgcccaccgcactccttacttcgctctttttggcatccacccctcctatgatcatct

SEQ ID NO: 201842 - DNA, 551 bp, Zea Mays
catctacagctgctgattcagttggctttgaacagtgcacttctgtgaattcagttgaatggactggttgagcttctttaaaaccaggtggagtatcctcccttggaccattaccaaatactggaggtttggatggttcaagtccaaagagcccagcatttgtccagagtttaacagatggtacaacagtagacgtggtagaggcatttgctggaacaccttgagttgcacatctgtcatcgattagttcggtaacaggctcactccacgaactagacacttcactggcaccagcagacatagtagaggtatttgtaggaacatcttgagttgcacatatattatctgatggtttgttaagaggctcactacataacttagacacttcagtcacaccacaatcaccaactccctcatagctctttacagcataatcctgaggcctactttcaggaatgacacatgagtcatcagaggggtcaccaggtgaacttctattagcaggtgccatcttgaaacccacctcatcaactaccatgttggcaatctta

SEQ ID NO: 201843 - DNA, 345 bp, Zea Mays
gcttagtttaggatgctaaccactaacccacaactataatgcagttttttgcaggtacactaactaaacaataggaaagtgcgactagtattcaatgacggagtgagtaggtatgccaccgccataaaacgtgatagccactatatgttggcaagagttgcaaggacgaataggacgagcatgcatcatgtcatacaactttaagttaaaccccctgtgtagctattttagtatgtgtttcatataccctgttcatacatctttagtgaatagagtgtatctattgctcttctctatagatgaatcaacaagaagcgcctacaggagttggagagtttttacgag

SEQ ID NO: 201844 - DNA, 372 bp, Zea Mays
ctgttatgcagacaatctttcgaattgttagtcagtcgaatcagtttttcggacaagtattatgcagacaaactgtcacacggttagcccaaacggttatgcacacaatctgttcttctcagtttcgcacacttattccattcacacaaaagcatcacctgagttcatacaattcagttcagacacatagaattcaccatcagttctgcaggcgtgaagtagcatatatgcagtgtttggtaccagctagcagaagcaggtgtgaagcagcagcatctagctcaagcaacatatatgcagtagtacttggcttcagttgtagcaaccggtgtccatggaagtatggggtagagagatctaacaacctgttcg

SEQ ID NO: 201845 - DNA, 297 bp, Zea Mays
gatgaagtcatattcaattcatgcggcaagcatgcttatgtatcctattatcatctctggttcattcagtcatacaatttctctgaagttacatctctttcttcatgactgtagtgataatgcagaactgtatgatatgtgttacatgtttttcctttattgactcacagatttttcagcatcctttgagtgacaaagttcctaaaacggtgccatcatgtgctgttagccttatagaacctccggttgctagcgtaaagcgcatccgtacagataagagaactggagacacttctg

SEQ ID NO: 201846 - DNA, 508 bp, Zea Mays
ggtgaccttcattatatagcccgtaggctagggttacattagggttacagagtacatgggcctaatgggccaggcgccctatatgggctgtcacagttacattccaacaccctccctcagtctaatcgggagtgtcacgaacacagagactggacctaaaatcagtaaataaccgtacaggtaccctttggtcataatgtcagcgaactgaagagacgatggaacacggaacacccggacctgtcccaaagcaactttctcacatacaaagtggatgtcaatttcaatgtgcttcgtgcgacggtgatggacagggttggcagtcatatagacagcactgacattgtcacagaagacgattgtcgccgaagagatgggtgcatgaagctcctggagcagctgacgaagccaacaagtctcagccacagcgtgcgcaacggcacgatactcagcctccacgctcgaacgagaaaccgtagtctgtcgtttggaggaccatgagactaag

SEQ ID NO: 201847 - DNA, 383 bp, Zea Mays
ctcgccaacctcctccttcggggcctttcccagcctctgcggtcatggagcgtctcgtcggggtgcctgggttcacgcccgtcgtaccctatcgtctatccagtaaccggcatcgcacccggaggaaaacaaaattagtggcgggctcgccgtgcgcagtacctgcaacgcacgagcaccgcgtcttcggcaccgacgtgtgatcaccgtctactcgctcgttgcagggcagacattccacgatctcgtctacggctgcgccggtgtcgtctccatccctctggtccgtgccccgccatggcccaacccaagctacagcgacctccggcaattgctcaccgtcagcacagttccgctccacccgtgactggccctgtgatcgc

SEQ ID NO: 201848 - DNA, 359 bp, Zea Mays
gattatttagtttttgtagattttaggtccattgatattcggcaaagatttagccacaatcccacggtcatatgcatctcaattcttcagttacggtgacaattattttatactgagtgatgtttgaggtatatctgttaactagggatgctgttgtttaagtctcttaaaaataagatctgcttaataatggatcactgtcgtggtgcaagctttctaattgtagtggcagtttgttgaaaaatgacatgtgtgcactgtcaattaaacagaagttcaacttgcatataaatgagtactactgtagaccatagaattgattttttttatgttccacgttgattggttggctgctgatc

SEQ ID NO: 201849 - DNA, 476 bp, Zea Mays
tagacgacgacgatgttgtcgcaatagacgagggtgctccgtgggagcagtgcgtgtagttcctggagaagctggcgcaaccaacatgcctcgaccatgccattggcaactgcgtggtaccttgcctcaacattcgagcgagagatcatgttctgacgcttagatgaccatgagatttggctgcgttgaggaaaaccgcataacccgaggtagagcgacgggtgtcagggcatctagcccagtcgacattagtgtagacgacgagctctgaagtggaggaccgaagcagaagaccatggctctgagtgccctggataaagtgcaagacccgcttgagagccgtcaactggggctcccaaggatcatgcatatgaagacagacccgctgaacgacataagcgttgtcaggtttggtgaaggtcaggtactacagagcgtcagtgaggcttctgaagtgagtagcgtcggtcacctga

SEQ ID NO: 201850 - DNA, 484 bp, Zea Mays
gtcgtgtgaggccatttctttcgggtcaagacaaaaagtctactacaattgactacatgggggaaaatggtgagcttcttatatcaaatccatttaaacaagggaaggacggacacagattgttcaagtttaataaagtgtttagtccatttgcttctcaaggtatgttttctctcgatttaaaaccaactgattatttattatcacatttatagtgttatagtctgattattctctgtaatttcacagctgaggttttttctgacatacaaccactaatccgatcagtcctggatggattcaacgtttgtatttttgcatatggtcagactggttctggcaaaacttacaccatggtactgtaggatcaattataatagaaacattgttatcactacaatagtaatgtcactaattatgatatttttgttgttgttactatttattctttagagtgggcctagcacatcgaagcaagattggg

SEQ ID NO: 201851 - DNA, 504 bp, Zea Mays
cacgtacgtacgcatcttctggctcacgacgatagccgaggaattcgaaggaccgaacgagaagctcctgcgtggtgtcaacgtctaccctaccgtaccagctagccaccacacgcgtagcgcgggaaatgccggcggcggcggccatgacgacgaggcgggtggtgctggaggtgctacggtcggcctcccgcgacgccttccaggtggccttctccttcgcggcgaggccgcccgtgtccaccatgctcaagccggccatcaccaagcccctctaccaccaccaccacgacaacgactaatctggcgcagatctacagcacggccgtcggcatgccttcacagcccggtgggtgtgacgactattgatgacgtactaccacatttcgtcgctcctattctagtaagcaacgcaaaagaaaatgttgtaagattgagcctgagagcttgagtcaccaatgtaaattgtatacgactgactatatatagagcatgctctgtaac

SEQ ID NO: 201852 - DNA, 534 bp, Zea Mays
cgccaaggaagagacgacgagttgctggaataggagttattcaatatgcatgacatgagcagtagggccaccagaaaggccatgaaagcacttcggattatctcggattcggagggggttagtcaagaggctttggagtattatgtgaatctgcttaaacaccctctgtctcaatgccatgtggatgctctctctgccctgtttggctggaatactccagcagacttagtgcccagtagagctccttcccctcccccctattctggtaaccaccgtgtattatgttttaatggatccgtcaaaaatattgttctagaatgtgagagggctgaattcctctgttcgacaagctccgttagagctttagttgattcttctcgggctgaagtggtttgtcttcaggagaccaaaatgcaaattgtccccagaagcactatcctctctatgcttggttcagagttcagtgaatcagtttttcttccatcggctggtgcaagtggaggcatccttgtggcatggaagcaacacctgaga

SEQ ID NO: 201853 - DNA, 352 bp, Zea Mays
cccatagttgccgccgcactagaatctcgagctctacgcgaccgtactcacgtcgagtgtccaattgggttcgcccggtctcgggaagggtggcaactactttccgtggacgaatcgtgctccgacgcctcggaatttctcaccggacttcgttcggcggcgaccgtccgccccacgccgtggccggcccccttcgcgacccaatcaacaggtaatacctatcctaattgattcaccgcttcgtcccgtaggtattcctatcgtcgttgcgcgtgttagggcatcgggtgggggatgggaccctgtaattccgccgccgccgcggtagaccggctgcgtcgccgtgccattt

SEQ ID NO: 201854 - DNA, 492 bp, Zea Mays
agcttttagagacatgagagaaccaaggacaacaatcaaatccattgaaccaaatggatgcactgcttagagatatgttgataaaatgacgtcatgatccttggagaaagagtatgagaatgattagaatgagagatttaggcaagatcaacattcgatatttgagaacgggttacaacagatagccagatacggggcagaatcgatgaaggatccagagatttgtatgataaagtcacaacataattcacaaggaaaaagggtactagatccaggtgaaaagagaggtaggcaaacaggatcagctaggatgatcgacagaaatgttatgaagttttaggggcaaggatttatggaaagaaatatggccttgatagggtttgcgcaactagacaccaacaatatttttttttgacacaacaagtgcacaaggaagtttcagtttggctagcggttaagctatggggggtctacaagttgtgcaggtttaac

SEQ ID NO: 201855 - DNA, 318 bp, Zea Mays
taagaaggttctgtcccaattcttttgatgagtttgcttttgtcccttcgataggaaatttggggggtttcattactgtttggaatagttcgaagttggttggcagtgctatctttcagaacgagtatgctctctcggttgaattttctgctatttcgtcgaatgaatcttggattatcaccaacgtttacgcgccctgttctccgaatgggaagattgaattccttcactggttctccaatattaatatgccctcggaaaagcgctggttgattgttggggactttaatcttacgcgtaggcctgaaaatagaaata

SEQ ID NO: 201856 - DNA, 289 bp, Zea Mays
aagtatgccctcacgagatgccctcgctgggtgggcagcgagtgcgaagtccagcattcgcgttggatctgcgtggctgggatcccgccacatttttgcgtgaagcggaagacgaggttgtgcgtattgtggggcattatgtgcctaggatggaggccctgcggagttgagatatccatggatccaacgttcgcctgaatagggtcttcgagctgaatcgcttgtcgtacggcggctatcccggggatgacgctgtcgaccacctcaggaagaggccagtggccgtgac

SEQ ID NO: 201857 - DNA, 272 bp, Zea Mays
cggtgacagattggacgtctggtagatggctcttggctggtcttcatttcgcttcgtgcttcaatgcttctgttgattagacttgtacttcagtagctatatttggctttcctccgatctccatcgatatctttcttctgtcttgatacattcattgtgtatactgtatggatgtgactacttgggaaaatctattgaaaattcctggacgtcccctccccaatgggtgtaaccaagggacggcttggtacgctgagcgtttagcaaactgc

SEQ ID NO: 201858 - DNA, 289 bp, Zea Mays
ctcggaggtcatgacatagagttccgacccagcacggcggtaaaaactcaggcactggtcgacttcatatcagaatggactgagcaccaggtcccggaaagcccagaggtcactgaaatatggaggatgtacttcgatggctcgttgaggctgcagggagcaggggcagggattctctttatcgctcctggaggtgaacaactcaagtatgcactccagctcttgtttctagcatcaaataatgcagcagagtacgaagcactggtccatgggctaagcatcgttgttt

SEQ ID NO: 201859 - DNA, 687 bp, Zea Mays
ataagcttggatttccgactttcaagaggcattgcacaggtatcatccaattattcagcacaatggcatttgttattgtatctgaaggaactttgcttaaaaaatatttttagtaacatctaaaagcttgctgaggctgtattttgaatgcttgtttaggactgcagaaaacaaacattacaaccaattagctacatttgtttattcaaaatgattttactctcacaaaatatttggtaaggtgctgacaatatatagaaggagatgctattattattatattgatcataattggttgaattacatattttcaggtaaatgaaggaagatatgaccaggcgatatccatttttgatcaggttttgaccttttaccatgattttttctccattatgtatcctgatgcaaagagggaacctgataatttgctattgaccatttagatattgcgggaaactcctacgtatcctgaagcactgattggaaggggcacagcttatgcatttcaaagagaattggattctgctatttctgatttcaccaaggtagacctttagatattgagaacctccagtgtctgttatagtaaaatgtaaaatggcctcctcttttcttgcaggctatacaatctagcccatcggctggggaggcatggaagcgacggggacaagctcgtgctgctttagg

SEQ ID NO: 201860 - DNA, 1188 bp, Zea Mays
ccgagttgcggagttgagcaggatggtcaaggttactcatgcgatgaagaggctgtgaaaaagccagtttgtatggatagccacgatgcccaaggttcagatatctctgctgccactattgcttctgtgggagatggctctaatggtttaagcatgtcacagcctaatgccactgaacctactggttgtcctcttaccaatggggttatagacaaagacatcagctctccactagatgaaataagatctgagaagactgacgatattttgggtactgtatttttttttctggcatttcccctcgaccaccttgtctactgctgatccattagttttaaggcctaattgcttatgcttttgtgcattggtgatcacatgtagctattttagactggaatttggtttataactatgtcacaggagtggatcaattagcaaaatggtgatatgaataaatgtgattgaccatcaaaatacaaaactagatgtctagaggggttatggtagtatatgacatatacacttgtaatacacatttgatgttcatttattttcaggccctttttcaagaaaactgaattgttaaagtattaatagagctgcatgtggtagggtgatgtctgatatataaccaatattcacttttacaaggcatgttttaatctgaaaacatcaggctacgagttttgaccaaaagtcagtccaatatacgcattgcatgttttagtgcacaaaagttggcatttccatgtactaatgtgatgcttattttgtagcaattggctatatattgtaagataacttatgataaaaattctttcgaagacttcgttctaagatacaccctaaagtaatgcagagtgatttgtctaatggaaactcggtcatttgatatgtttactgctgtgcagctaaatgctttgaaaggaaattcagattcactttgtttttgatggtttctaattatttttcctaatttaccctgttttcagccaaacctagctacaagccaattgtggtagacgaaacgagacggaaaacttatgatgcatctgaagaacagcctctgatgaaatctgatccagtttttgatgttttctctgcggaaccaaaagagctcgtgaatgtgggttaatgcatctatgattcaatcaaatactgacctatctgtgattattggtccatttt

SEQ ID NO: 201861 - DNA, 376 bp, Zea Mays
aaacccccctggcaatgatcaacggcctgtggtaagatcatctgatacccaagtgaaagcagaccctagttgcaatcggcccccacctactgtagtaatcatagcctataccaacttgcaattaatcatatattctgaacagggagcacctgagacagaagaggagcctctgagcagggacactgggatgcagcatcctactgcccaggtatgttcatgcaattcgtgtctttttttataatataaatgatccactttcataatacaattatgttaatttggctattctactcaactgcaccaggatcatataacttactcaaggaggagcgataggtccattcaagttgccaacacacagaaggcagaggctgag

SEQ ID NO: 201862 - DNA, 602 bp, Zea Mays
ggagaagggggccggcatccggccggagcctgaagtcgacctcttcatgaaggtagagtagagaaagaaagctagcatccaccacatgaataaaaaagtactagcactctagttgctgcatttagtctgacgatcaaagtgcaccacgcgtgatagtgccatgtccttcgaattcgaagtctacatacgtacgcacatgcatgtatgcactcattagtactaattatcatagaatatacccatcattagtaatttttttttactgttgccaggcgacttcaatggaaggagtggagaacagcctccagacggattacactctcagggtataacagtcctacggctttacaacttatatctcgcgtcgctttgcttttttctttagcttccattttgacgatttggcgttgccgcgggcgcgggtggattgagcgcttttgcttcagactagagtactcacacaagaacaagactctcaggtggtttgaaatatgacaggagagatgctccgtcaccaagtccactgctttgacacacagcaccgattagttcaggctcagcctgagacgggataacttgagtacgtacgtacacgtactagt

SEQ ID NO: 201863 - DNA, 338 bp, Zea Mays
ggagacacaaaaaaaaagagtaacactgaaaacctatataaaataatataatcctaaaacagtttatcggtgacacagttgtctaatacttgttcactatcatgcatatactgagttagtgtcaatatatctgcccctccagcaatctacaaagaattaacatgaacaccaatgcttccaaaaatgtttatgcttccagctgtagaactcagaaaattgtgtagtttgagaataagttcacaagattgtctaatgcttcagggtaaaatttccttgcaaacaagtagcatggtctcttcagtccattccacatgcaaggcctctgcaatagatctttc

SEQ ID NO: 201864 - DNA, 486 bp, Zea Mays
atcaaggaattaagaccttttcttagactcttctccactttcttgatactttggcaccaccaatttgagaaacgagtgcatccatgctgaggcacaatggctaggaggcctaaattgtgtagtatggacgtccatatctgccgagcgaacacgcaggagacaagaatatgctggatggtttcctcggcctgatcacacagagggcaagcaactggatggggcagacctctttttgcaagtcgatcagctgtccaaaccctgtttttgattgccaaccatacaaagaatttgcatcttaagggggcctaggtctcccagacacgtcgccaagggccaaaagggatagagccaacaaagagagcatcataggccgatttgctataataagtaccatgagcagagaggcgctagatgtgttggtctgcgatgtcaggttgcagaactaccccatcaaccaagttccatagctgcagatactccactagg

SEQ ID NO: 201865 - DNA, 353 bp, Zea Mays
cagctcatgattcctttgtgctccaagacgcattgtcacgcccttcgggcttaaaaattcttgaaggtattagtaaagtcataaatatatatatcatattttctcttttaaatgcatagctaattatagtaaaatccaattgtaggtcattactttctagctgatgctggttatgcagcaagacctggtatactacccccgtaccgtggtgttcggtaccatcttaaggagtttcagggtactagacgaccagaaaatccaaaggaattgttcaacctacgtcactcatctcttagaacaacaattgaacgggcatttggcacacttaaaaatagatttaagatactaacaag

SEQ ID NO: 201866 - DNA, 296 bp, Zea Mays
ctatccacggatatacgtccgatatccgatccgacggagccaaatataaatatattttttgacccgtggttcaaacctgtatctgacccaaagtcgggcgggcacggattaggatattaactccctacccgcgggttatccattggatatccaaaatcgacctataatttattcttttggcctaacccatattgcacagtaaagagcaaaccctaactctatgaactctacgtctaatactcacaattctctaccgttggctaccccatctagtcttgctggtttcttgcgttgtg

SEQ ID NO: 201867 - DNA, 312 bp, Zea Mays
ggggcgccgaggctgacttttgaaaacatagctgaagcagaagcaaccgggctggaagatattgatgtgctggaggaagaacgactgaacacagtaattcagtcggccaggtaccagcagaccttgaggcgctaccacgacaaagctgtgcggcaccgatcctttgcaatgggagacttggtcctccgccgaattctaacgggcgagggacgacacaagctgtcaccaccatgggaaggaccgttcatcatagcagaggtcacacggccgggatcatatcgacttactcagatggacgacacagaagtgggg

SEQ ID NO: 201868 - DNA, 928 bp, Zea Mays
gcggcttcaaaaagagcaggaaaccgaagaccactcttgccacgggttgtcatcctgtggtggttgaccactggatcgacagggactgcaccagcaggaataggtggtgcagtggcggtcgtcggagaaggtgctggagcagtagcagtgggcgggcgtcgagagtagacccgtccgcagaaacgatcagcaggagctgtcgttctatggacgtcgggcacggtagtagacccaggcggcagtattgttggtgccgatgcgcctgggagaccagccatccgggcaggagactgggacatcggggcaggcccagctggcgcggcaggtggctgaaatgccacctctgaggagacgaggggcacaaccggcgaaggggccaccggtgggggtggtggtggcatacgagtacctgaaaaagaagacacggacgacagtccaaaaggagctgcaaccgggttagtgtaattgtcaaggaaatcgaaggccgctggtgggggtggatgggaagcctcagaaaagggaaacgaggtttcatcaaaaaccacatgacgggagataatggcgcgattggagtggcgatcaaagcataggtaacctttgtggtggggggaatagccaaggaagacacaaagagttgagcgaggggataatttatgtggagtggtggcagaaaggttggggtagcatttgcagccaaaaacgcgaaggtggtcataggatgggttgtgaccgaagagagcaaaatgcggtgtagaaagtgcgagtgttttggtgggtaggatgttgaggaggtatgttgcagtcccaagagccgcagcccaaaaattggggggaacactggattgaacgaggagggtgcagatgacattgttgatggaacggatgacacgttcagccttaccattttgagctgaagtgtaggggcaag

SEQ ID NO: 201869 - DNA, 1315 bp, Zea Mays
ctggcttccagtatgggcatctactgcactgaaaggatcatcaaagaggtaaatatctgcatcttcatacactgaccttgcaatctgaattcgctgtttctgtccaccactcatgttaattcctctttcaccaatctcagtcaaatcaccatttgcaaacaactcaaaatcttttgtcaatgcacatgcttgtatgatgttttcatatttttccttgtcatgtgtgtttccaaacagaatgttttcccttatgttcccagacaggatccaggcagtttgaggaacatatgctttgcggccactgaccctgacagtcccatctagctttggcatctccccgagtatgcatgataatagactggatttgccagaaccaacgattccacagatagccactttcatccctctctttacctttaactctacatctgttagagttggagaagtcgtctcaagttcccagctgaatattccatgatcaatctccacatcatagtctgtgtcatttcttggtacttgtgtaaccgcatcacatttcaattcttcttcctcaaggtattttgccactctgtcagctgaaacttttccctgagcaaacactgaaagtaagtcaggaagtgtgaaaattggatcttgtagcatgcggaatgtcgcaagagctgacaaaacagttccagctgtcagaggaatccccataagtatacatgagccaaatgttatggaggaaatgaatgcaggtgacccccaaaatatgaacgttgttagagccgacaacctcaccgatctccatagccagttgtactcctcgcctcgtaaactttctagcttctgaaggtacttcatatcccacgcttgaagtttcagtattttcatgcttctaagaacttccgttgttgccttcattctgttgtctttggcaaccatgattttggcttgcaacctcttttgcattctggttagtggaatattgcaagccattattgctaatgtcgctgctaaaccagcccaggccccgacccctaagtttgtatggagcacataaacagctagagaaagttgaatgggtagcatccagatatagtttgtataccatataacatcagttatcctttgtatatccacactcatgtagtttatgatctctccactagtatgcttctgccttgaactgcaggataagcgaaggcccttttgatagatgtgggatatcaaagcagctcgcagccgcatcccaagctgtcgagctccaaaaatccactgcctctgtgctatggtctccacaactttggcacttagaaaaacaacagcgagaata

SEQ ID NO: 201870 - DNA, 586 bp, Zea Mays
gacgggttccaagtggtgtgcgggaagaagaaaaagaaggtgggcgatggtggcgaggaacgcgtcggcagagttgaggctttcggaggttttggctctgtgaggatggtcaccaaggacaaggcggccgcgccgggggtgaaggcgaaggtgcccttccacatccgcaccatcccaaggccccaggatgtgtattgtattgtggtggacaactccagcaagccgttcgagcatatcttgcttgatcgcagcgaggatggcactcgggtcgtgcacccattggttagtgtttctctgcacatttttttgttaatctcacttctcacatcaaagcaatgccactttgttaacatatgattctcatccactgagtcacaaataatccttgggcttactgtttctattttgtgttcgatatgactaatttgtcgttgatgttcgcgttctcgttcaccacactcacgttgaagttgaacgctttgaacacagaatgaacaccgctaattggtgctgcaaaaagcgcagcttttctggttctaccttctcttttattcgatgattacagaattttgagcgtttgtttcgc

SEQ ID NO: 201871 - DNA, 360 bp, Zea Mays
ccacaaccacaaaggcacaaacatagcacaaaagcaactaaagtggaatgcaatgtccacaactgcaagcacacaagtgttactcaatctccctctatcatatctcaataaccatcatccagatcatctataccaccatcattcttgtctttgtcttgctcatcaccatagccagcactattgtttgtttcttcatcatcataataaccaaaattagaggagattgtgaccagatcagcagggaaagggagaaggatgagagcagggacagtggcagcaaagggaggcagtggcgagcgtgagcagcaaagggacagtgagctggagcactggagtggcgagcacgagcgctgagcaggg

SEQ ID NO: 201872 - DNA, 350 bp, Zea Mays
accctctctatatcctctgtgatacttttaatccgattatcaaaagaaattttaatagatggaatatcatcggctgacctggcatcacctatcgtggggagctgttgcagcacggctgacatatacttggcgtttatctccctctcttggacggtcttctggtggcaatctaccctgaagtgcgagaggaaccacttatccgccaccttgagcacctgatctttttgtcgctggacctcctcgtctattttcttcatgtcatcttctaatcttttatgctcagcggccgataaattagtcagccttgtgttgatgcttggagaagcaccgttgagatctttagaatcagc

SEQ ID NO: 201873 - DNA, 353 bp, Zea Mays
agactgaaacacatgaggcatcagaaaatgcatgagggaccaaagttccataaggtcattttgcagtggagttccagtcagaagaatacgtctctttgaattaaagttgagcaaagtctgccaacgttgtgatttccagttctttatcagatgagcctcatcaagaataagatacttccacttctttctcttaaacactttagagtcctgtatgacaagcctatatgttgtgatgcaaacatggaagaaatttggtttcatccagccctgacgcttctgctttctctcctttgcgcttccgaaataagtcagtattttaaaagcaggacaccacttaagaaattcagtctccc

SEQ ID NO: 201874 - DNA, 273 bp, Zea Mays
cacgtacacatggtaatgggagtcggtgcactgatccccattagcttggtaaagctccgccgaacagcctcgcgggttcctctccacgcatatacaggtagcctggttcgaggtcgtttccaagtccacgcaattcagtaatccaccatacatttctatatgttcaattgtactgctattgccactccacatgtaatcaccagcctaaaagctcgtttacaactgatgctgatttgtttgtattgatttctttgcttcaaaaattaatattct

SEQ ID NO: 201875 - DNA, 343 bp, Zea Mays
agcacttaaacaaggtttgaattgggcagagttttaccaacacaggctggccacggtgaacttggtttcacggtgttcttcgactgatttggggggaatatgaaattggagcttgctggtgatcagctgggagcaatactaggtgtgggggtgcgcaatgatgttgcaaagctagttacgggctcaatttataggcagcttcgtcggtggcactcaatttgatcgaacaacgcggcggccggagataagaaaggactctggcacggtgaatacgtgttcaatgtcgtggcagtaattccggtggtcgacgggaagctagagggagtcacggcgatgcggtggc

SEQ ID NO: 201876 - DNA, 414 bp, Zea Mays
cgacgatgctacctcgggctcgggcaacgaattcttcgcagagagcacgtcgtgggcttcactcggcgtatccgaacgcctcgcgtccgccctttgcagtgccgggctctcgaggccttcccttgtccaggtaaggggtccgctcgcttcagctacaacacacgccatatgttcgacgaaatgttggacctcctgtgcacgtcttatgcctgtttaacatgagcagttcagttggtagatgtacattttatattcttttgctcggcgcaggtattgaactgagcgagctctttgagctctgtctattgttggggagtggggactggtcccgtttgcctctcaggatgaaccgatgtctattctaattcccaatgctgttacaatttgtttaatgaagattgtaactccttgcat

SEQ ID NO: 201877 - DNA, 282 bp, Zea Mays
caggggagcttcggcgccgccacatctgcatgcgttcccagcccatgctatctactcaggtagagatcagaagccaccaggaatagcccgtcacttgcctctagtgtgggggcgcccgcattgaatgcgagtaggatatgcatctctccacaccagtggcaggcgatgtgcacaatcctcaaagcacgggtcgcgccaatagctcacgcgttaccgaggcaagaccattgacttgttgcgccgtgcatggcttgccatcatcatgacctctactattcccac

SEQ ID NO: 201878 - DNA, 293 bp, Zea Mays
caagacaatgctggctcaacctcgcgaccattcacatcttctttggtcggtgcaagcggcaattactgatcgtctcacacgcgaaggatgtccaacgtcgccgcctggctactaagtgggtgaaccaatggttgaactgtgagtcctctcgcagtctcgctctttttatctcttcgttcagttgtcagtagtaggcctacgatgaattatacttgtggtgcctgcaatccttagacataaaatgctataacactgatgaaattcaaggtgatctcttcattgagataataaat

SEQ ID NO: 201879 - DNA, 291 bp, Zea Mays
gtcctgaaagtgtgggtgattgctggtttaaaactagccaaacaaccatagaagaataagaagtgctctgcatctcccctggtcttaaattccatcccaacttgaggtgtgtatttgttgtctattgatgcattgttcccttctgttgcagctatttgctcactcataatgaaggcatcaatctgatcctctgttaactcttcatctcctgcatttgttgtttcagcttctgcatcatcaaagtttgcactagcactcgatgttttagtttcttttccatcatcattttgc

SEQ ID NO: 201880 - DNA, 369 bp, Zea Mays
aaacacaccatcagaatctgtgggttgcggaactgcgcatcatctggactgaaatgaacatgcagaaattatctctagtcaggtttacataacatctactccctaacaaatatgacagcaggtcacgactaacctacaagcttactgctagagatgctgcatcaacagaagttggtagcaaagcttctgtcagcaacctagatgggatagtatggtttgggctcaccggatacgtgggctggtctgggccaaaggaaggtgaggaccggctttgtaagggtccgtttggttgcgagacggctaggacagaggcattctctggcgtcctctccaattttaaggaataattggggacaatactggaatagt

SEQ ID NO: 201881 - DNA, 769 bp, Zea Mays
gaaaaactccgcgagcagcacacttgtgatcggctgtatatttttcagagcagtggtagcattcaccgctggcccgtttggcggcaacctcctccggtgagagcctgcgcaaacgtggtctgctggtagccgatgacgagggttttgctgcagttgcacatgccgttggttttgatgtagcatatggcgtccttgatggggccgaggacagatccatacggcgttcataggcgcgtgccaggtgcatggcccgctgcaatgtagtcggagtcagcagttcaacatcagtccgaagcggttcacccaagcctgcggtaaacatctgagcttgctggagctgtgtcatatcctcgcagcgacttagaatggacagaaactgacgttgatagtcttcaacggtgccggtgcgccgaaggtccttgagatcagccataccgttggtccgtagaggtggtccaaaccgcatatgggtgaactcaacgaagcgggaccaagtgaggacaccgcccgtgtcccgctctagagcgtagaaccattctgctaccacaccgtccaaatggagtgatgcctgccacaccttctcatcgggtggagtcctcatgcccctaaagtaagtctcacatttattgatccacgacagggggtcagactcaccatcgtagtggggaaaggagacattgggtcttcgatagccaccatcgtcgacgcggtcacgaagagcagatcctgtgctatgcatgaccccgacaggcgctgcggtacgtgggcc

SEQ ID NO: 201882 - DNA, 624 bp, Zea Mays
agcttgtgcctaagattagcatgaaggtattgacttgctgacttcagttcaccgattatttatgtatcagaaaaaataaaatgttgcagaacgtctgtaaattacttgtacaacattacttagcatgcgagtaggttaatactgtttttggggtattttctcaaggcccatgatggaggtgtagttgcagttgaactttcaagggtgatggggagtgctccacagctcattacaataggggctgataaaactttagccatatgggatactgttactttcaaggtacttatataaatatttgcatgaagttatattatttattatttcaagtagagcttaaagtaacacatttgctgctcaggaaataaggcgcattaagccagtgcctaaacttgcttgtcatagtgttgcatcgtggtgtcatccccgtgcaccaaaccttgatattctaacttgtgtcaaggactcccatatttggtatgtatttctgctctccagagacatattagttgcagatttttctctaatgatgctcattatagcttattgcactgttctatactctattattacagggccatagaacacccaacttattctgctttaacaagaccgctctgcgaa

SEQ ID NO: 201883 - DNA, 392 bp, Zea Mays
aattattttattaattactatactaaatatgagccaagactaattaatctaacaattgttgttcaacgcttaatccacaactaatgatggtacctttggtttgccgattaacacatagggcaacccaacaacatccattctcccatgagcccctcttaacttcaacgccttctttgtcaaattgtatgaaaacttgttgtccttcatcacacaagcatgactgattgtcatgccgctttttctacacccctatatatcccatcagttggaactatgcaaaacacatccaaccaaatcactcccacacacataacatttcctaaatataccaaccgaattgcacctacacataacacatcattaatgctaatagtttagatcattggataacc

SEQ ID NO: 201884 - DNA, 309 bp, Zea Mays
aaggttgtgatgcgcagaagatggtgccgatgtagcctatgattgtcggagtggatgaagtagatgaggacgagagggtgacactggcgacgaggttgtgctggacaaagtcaaagaagtagatgggtgacacattgaggctcctagagtggcagcggcgagagagtcgcaccacacaaggagagttgcgatgttgttggggagttgtgacaacgatgctcgaaggaggcgacgaagagcacaaacaatcaaggtataccatgtgcaagagaggatgtcacacgcaatcagttgatcaagttgagtgtg

SEQ ID NO: 201885 - DNA, 273 bp, Zea Mays
cctcgcttccccagaaattttggtatgaagggagtacgttctgggcacagggattgtttactaaccgtattactacttactattatatgcaaatcctctgctagccctcgctcttcttaaccgtgacgaaaagatgtcagcctgtgccagatctaccaaatgcataatttcttctcaggcttggagaccgaagtagcgagtcactgcagtcacacaaagtcggccaaaccctggcactgcagtctgagtcactgcagttcgagtccctgcgat

SEQ ID NO: 201886 - DNA, 365 bp, Zea Mays
ggaatacccgtcaaaacaactcccaaggttctcagttccgctctgggaatcagagtgggaataacaactaccaagcacagcgctctggacaacaaggtcagaggagcaaccaataccagaaccaacagaggaacaacactcagaccggtcaaaggtctagtggtcaacaacagaatcatcaaggaagtgtcgtggacacaccggccaagaacaacaacacaaccaccctagtccaacctaatggttgtttcaagtgtggtgaacttggccactatgctaacaattgcccaaggcgtaatcaacagacaccccaaaagaacagcaaccaaaggactgaccagaacacacctgctcgtggatctgca

SEQ ID NO: 201887 - DNA, 298 bp, Zea Mays
agtacgaggtcgtagtcctcaccgccctccacggtcagaacaactggtcgctcgtcttcgtcgtcctcgatctgtgtccacccacttcgcctgctggtgtgacaaggtgctcctcacccttaagcgctatgcccttgacgaccacgtccacgtctacgcaacccccctccccaactgctcccatcttggcacctgatggacagtgtggtcctctcgtggatcctcggcacactctacgttgaacttcaggacaacatcagtgagtagggacaccgctcgccaagcctagtttgccctc

SEQ ID NO: 201888 - DNA, 277 bp, Zea Mays
gccgtcgccgtcgccgtcgcctccacttgtcttctccatcccgtcagatttacgagaccccatgcaccgatcccccttttttccacaattccagtgttccactgcactcaatccaagaagacgcgattcagatctgccatttacgcgcacatatgcaaagggctgtcggttaatcactatacaataaaaatcagcgagcgaactggatgtaatgccgtctcgtcttcacggccagagggcagtgcggttgatgagacagcgacggcggcgacggcga

SEQ ID NO: 201889 - DNA, 1168 bp, Zea Mays
atccagcttcgcagtctcatctaaggcagcgtccgtcgcgacttccgcttccgagaacctctgctgcgcagaaagaatcaacgctagcagcctccatcctttcgaaaccgacccgcccgttgcctcgatgaactccttggcgcatctcagggcggcattcatgttcctttgctcggcgtactcaactcccatgtcgaatatgaggtcggcgttgtagcggttaaggccaatcgactctgcaaacgacttgagagtctccgtctgcagcagagatctttggtagtccgacgaaacgaccttggacttgttgcctagacagctccccaagaaatggaggccgacgctcttcagatgaggatccgatgattcggcacaggcgattactcttcttgcgtattcgacgccctcagaagcaagatggcgctccttgctacatatcttagcagctaacaataaggcgaggacgtcatttggattctcaagcttgtttaaggacttcctcaggaaattcagcgccacatctttctggccagctacgtagtagcagagcgctagtgtggcccatctctccgtgcgaggatacactccaggcaaaacctcttcaagctgctttgcaagaaccagtggttcaccacaaagagacagggcataggttaagtgttccatcaccgaaggatcccaatgggtcttgccctggtaccagctcctaagcactaccatcaagagtagaacggcctcttccacgctattcttcggaacaaaacagccttcaacttgctgagccatgcttggagggctccaatctatgttgttgttgtacagtagaaaagacgcgaatctcttttgaaccctagtccgacattcatcatcaagattccatggactaagaagagctcgtcggtatgacgctaatgcttcctggttggagccagcgtgtttccaggcttcaggaagaagttcaacggatttattcacagtttcctgtaacttctgctcgatatcaggagcgccgttctggaaaatactctcaacagaatcgagtacacttttgcactggttagcagcttctgcttgttcaacaggtttttgcattaattagtcatcaaagagttcataatatatataagaaagaaatcgtccaataatgatatgtgtgcagtgatttgta

SEQ ID NO: 201890 - DNA, 351 bp, Zea Mays
gagataccacacgtccatccataaaaatatcatcattcatgtcatcatcagggtttgcttgcggaggcctagatactggaacctacgcaccaaccgatcttaagtatcacacaaaacgaacattgtcagactattccctattacaccctttcaacctgcgccgaagcgtcgaccgtcataggaccctcagcgacacctccttggagcatggtttgctcttcggctcctgcctccgccgaagcatccctctgggtcttcatcattcattgcctacgaagacaacacaacaacagttcaaaacagtgaacacacaacaccacccaccaaacccataacatacctgcgccagcg

SEQ ID NO: 201891 - DNA, 339 bp, Zea Mays
atcctccaatgccatatattacatccagccttcagcaggatgcagcaaacaaacttcattttactgcagggtataccatgaaggttgtttctgctagattcattatgtattatatttatatgttgtattctgttagctcacgtgacacattatatgactgcagattgcccaaaagctttatgagggtatcaatctttcctcagaagaaacaactgggttaataacatacataagaactgatgggtttcatgtaagtagcatcagtcattttgatgacacatataggtttactgtttattgttggtgttgcatatgttccacaacatttgttccctatgc

SEQ ID NO: 201892 - DNA, 406 bp, Zea Mays
gcagcatggaaggtcatgaggacaccttgtatgtggagaacgggatctagttctacctacagaccttgatctggggcaccgtgaacttaatttgtgtttggcaatgcccaggccatgttccagagctgcccgctgctggtgcgccgcccaccgaaaggcaagcacaatgtgttgacggcgtaaggctgcaacaacgccagccgtgagtccaacttctcgttccacatgtgcaccgtagaagcggcaccgggcgtggacctcgacggcgtggagacctaccttggccgcccctataggaacttctctcatgtcaccttcatcaagaagtctctcagtcgcgtggtcagccccaacggctgggtagcgtggaacatgaacaaggtcgtcgaggataccacccggaccg

SEQ ID NO: 201893 - DNA, 497 bp, Zea Mays
ataattacaaatggacacaggggctgggcatgcaacagattttttggtgtggtctgctgaatcaccattaactaagcctgcattttaatcctgtaactcataaaattacaacagcagctcctgcatacatatgtacttagttttatatatgtcagaaataaactcggagcagaattagtcctgatgatacctcgtatatcatggccatagcatatcacaacctttttttcttcttaatatatatgatgtgtagctctcctacgctttcgagaaaaaaacaacctttttgcatgtatgaaaatgtcttatatgcattaacttccatgtctgttcctgttaagcacatgatatccaattttaaatatcttctagttgtttatcacttgttacaataatgtatactctatgccttgtagttgtagtactttacaggggaatagggattggcggattgcaatctgttatgaaccaaacacaattaaaatctgatctgccca

SEQ ID NO: 201894 - DNA, 410 bp, Zea Mays
cccatctctccctctctttcttatctggtatgcgtgagtctttggaaaggaaaaaactctctagccaatccaatccccgccgctcttctcgcctttagatttttcagccgccggtacttatcttctgtgcgcagttcctttgcttctcatccgtcggcattcctctccattatttcctaccgctgccatggcctcaagctgaatgagctcgcccccatgtccgatggcagttgtctctgcccctcctccctgtttttgtgccagccaagttcgtccagccccttgccgctccatctcatcagcaccgtgcagctcgcttccatggccgttccctgctcgttcttcctggcgcgcgtgctcttcccctgcgctcgccgacgctcctccctcgcccatgccgcagcgctcca

SEQ ID NO: 201895 - DNA, 325 bp, Zea Mays
caaggttatgttgaatgttgctttgatttgttaatgcatgactggctaacagaatctgagctttgagtttgccaccagagtacattctagtttgagtccaccataatctcaaagtaacataaataaagggtgtgaggatgtgaaaggccaacatataagttttcctctcctaaatatctatggcatttcattagccaccctaacttgtttggggcttaaaggctttgttgttgttgtattccaggatatgcatagttcctccaagtaaaatcaacacgatgaaagttccaaactatcagtttcaatgtgtttacctgcacattac

SEQ ID NO: 201896 - DNA, 281 bp, Zea Mays
tgttggacgagttgacgtgcatctagggaggtgccctcgtatcaccacttggactggtctctcatgcatttagagttttagggttcaggatttagggagatgccctcgagacttgttgcagggatgtgctcgtgtcatgtagcggcatagacatgcgttgacttgtgccaggctcacgttgcacatggagctctctgtctgtctgctgcatcacagcgtgctcaggaagcgcgcagacctcttcacgagctctacattcctcggacgtagccggctacgag

SEQ ID NO: 201897 - DNA, 348 bp, Zea Mays
gattgctagtagaagtcaaagtgcagcagcatctgagacgggctcttctttgccatgtgaagatggaaatgcaacggctgaaactattggcagcagcacccatcctgtgcacattggtgtgcaaaaccaagacattgaacaagagcaagttcatgagactggaaagagatacaagaggttgacatctgatgtatggaattactttaccaagaaaaaagagataatagaggagaatgggaagaagcgtgagcaaatttggggttattgcaacttcccaaattgtaagcggcgatatagagcagagggccgccaaggtacaactgcatttaagaatcatttgaggtccgc

SEQ ID NO: 201898 - DNA, 391 bp, Zea Mays
caatttgggcgtgaaggtaggcaacaaggtgataatgacggtaatggttccattgctagtacaacaagagatgatgatatggagtattcagcggacaccgagcatgatgaccgatctaataggcatcgacgacaccaacggcgcgatcgtcatatgggtggtcgacctccacgacgtgaggtacgtgaaaatgatgattctctaggaagaattaaattttcaataccaccttttgatggaaaatatgatcctgatgcatatctaacttgggaactatcggtagatcaaaaatttgcatgctatgaattttctgaagttaacaagtttagagctgctactagtgaattcacaaactttgcttctatttggtggcatgagtaccaaactacac

SEQ ID NO: 201899 - DNA, 470 bp, Zea Mays
cacccttgtttctcaatgatccatgagcggtcattttattttgcacatccttggtgatctcgttgttcccttgtaacatccctcggtaatgaactttaacttcaaccattctgttgcaaccttacatatcttacccttgattgttttctccatttcgccatttaatgagtcttgccttaactccatcctttgcccacttttgtttgctattacctttacctttctcatccctcgatcttaccttggtgattacgttatgtctgttgtctaaaatctccaacttcatattccaatttgagagcggtgttttacttaccccacccttggctatatcctcttctttatcgcgtgtaagcttggacgtgactccattctttgttgtactcataccgctggctctttaatgctttcatcttttctctcatacccttgtctgttatcgcctttgacccttggaatattgatgtctt

SEQ ID NO: 201900 - DNA, 372 bp, Zea Mays
cttgcggaggagcagttggtgcccgttgagtttgttgtccggaactgccactagctggtgtacttggagtggtagtatagcgaggacgggaatgacttccagcctgcccttggttagcagcccttcttttctctccaaacatactcctcttgttttctacagcaatagctttgtcaagcagcctttggaaggatgggaatgtgtgcgataccagttgatattgcaagggtccaatcaaaccgtccagaaagagctcctgcttcttctcgtcatcctcaacatccctaggagcatatcgagatagctgaatgaacttgtccctatattcactcacggacatacttccttgcttgagggatagaaactcctttc

SEQ ID NO: 201901 - DNA, 467 bp, Zea Mays
tcttgaaatttttggcacaggaaggagcgatcccaccttcgacgtgatgtggttgatgaactgttcggcaggggcccgcggtggggtggccacagcaaccacccggctcctcctccgagagtaggacaaaggcggatctctgaggcgggaccgtgcccccaagacggccgccatttcaatcccatcatcacccatagggccagcagggacagcagcgccatcggggacgccactggggacgtcatcaaccaccataggggcctcagtagcagcgccaggagcaacatgtaccacatcccccggtgaaggctgctcctcttctggcacatgcacgacgtgcaacaccgacgtcacagcaggtgtcacgtggcacgtggtatgcaccggcgggccaagccgcgagtgcacgggtcccctcgcagaccccctcgatgaccgcccgtcgccggaacatcctccggagccag

SEQ ID NO: 201902 - DNA, 350 bp, Zea Mays
atttcttcgatggcattgtcagagaatatcttttggaaattagaaatgtccagattaggagtgttcaacgctcccacttgggtcaggctttggtgaggttccgatttgtttttgatagggacaacctcgtggctctgggtccgcagcaagctttgggctttactttcactgtgattagacacaatgcggcttggaaccatcgagcgctattttttaatcatgaatgttggttgatgctccttgggttccctctggatttttggtcacatgaacacattcagaatgctattggttcatttggtcgcgtgcttatgtgggacccagatatttctaatgctactaggttgctt

SEQ ID NO: 201903 - DNA, 406 bp, Zea Mays
gcggaagtggatacgggtccttgggacaagccttgttaaggctgatgtagtcgatgcacatccaaagcttcccattcgccttggggacgatgactgggttggccagccataccgggtggtgaacctcttcgatgaagccggcgtctagcagcttccggacctcctttcggatgaagtcctaccactcgatggactgtctgcgaggcctctgactcaccggcctggcgtcagggttgatcttccggtggtgctcgatcacctccctggggatcccaggcatcttcgacggctcccatgcgaacacgacgatatttgcctggaggaaggcgacgagcgcgagttcctatttttcctccagatcacccgcaatgcgagtggtctggggggaatccacgcagagccggat

SEQ ID NO: 201904 - DNA, 324 bp, Zea Mays
gacgtgttctaccacgtcatcggcacgccagttgtccgcaaccctgaaggcctacaaataacccaggacaccgaaggccaccacatcgtcaacctcatcatggccgaagactggagggccccactaactttgtacctgcagggccactaccatccaagcgatcgcaataaggccaaacgactaaagcacagaagctgagacttcgcattggtcgagggtcagctgtacaaaaaggggatcagccagcccatgctgaagtgcataactgaaaccgaaggcatacaaatcctccgtgaagtccacagcggaacttgcggctctcac

SEQ ID NO: 201905 - DNA, 908 bp, Zea Mays
ctctatcatagataatattaaaaagtgggtaatgaaggatcctgaagcatctaatgaatgtgagtggaagtatctaggaaaaaataaacccacagatgctgagatgctgagaacatatgcgattgggttgcttgctatggcattgtgcaggtactattagtgtcctcattgatttatcatctggtgtgataatgttataattttactaccgaatacatcatgatattcatccaattcttgcacgtttcattttttcacctcagtggtgggcaattggtagaggatgtcttgactttgggggtgccagcaaagctcatgcactttctgcgcataagagtccttggtgatgcctcatcttctcaaagagatgctaatcatccacaagacaccaaatatcctcgaggcagagacgataataggggtaaatcacgtctggcccaagatggttctcggttggatggaacaagggttgggtatggaatattgaccaacccaacagcagagaaggacaatgaacctggtgttgtaatgaggcaagcatatggagaaaggtcattggatggcacttttgcctcatcagataattctgacgtccctgaggttgattggaccaatgataactcttatggcacaattgtttgtgacacaaagtcaaaatatggggaaaagacttctgtgacaagggctcttaaagatgaagagatcagcgaaaatggtgaactgttgaagagaaagctgagtcgagccccctctcgacttagagtgaagggaaaagcaggagacaacttgcctgaatgtgaaatgacacctttatcaccaacctctggattgagaatcggaggtcgggcttccagagacaggaatgtggtgagggttgatgacccaaagaaggcaactgatgtgaacaa

SEQ ID NO: 201906 - DNA, 385 bp, Zea Mays
ctgatactcgccctcttgcattaaataatgttcttcatgtccctcaaatatctaaacatcttttatctattcataagttaacccgtgataatgatgttttctttgaatttcgtccctcccattttttcatcaaggatcgtgccactcagaatcttcttctggaaggaaaatgtgaatccggcctctatcccatcaagcctgctgatcttgcgtctgttaaacaagcacatctgagctgttcggcgtgtacttcacaatggcatgctcggtttggtcacccctcagtccaagttgtgcggtccattttaagtctccatcgtctcccatgccgtgaagaaactagtttgtctactgtctgtaatgcatgtcaattagccaaaagtca

SEQ ID NO: 201907 - DNA, 289 bp, Zea Mays
ccatggtacggctcgtcaggcgtggctcgcccttgaaaaccattttattggaaatcgcgagacgcgtgctcttcacctcgacgccaccttccacaactttgtccagggcgatctcactgttggtgagtattgtcggaagatgaaaggctccgctgatgctctctccgacctcgacgcccccgtctccgaccgcattctggtgctcaatgtccttcggggcctgaaccccaagtatgccaatctccggaccatcatcacacgctctgttccctttccgacttttcacaaa

SEQ ID NO: 201908 - DNA, 434 bp, Zea Mays
gtggtgtgcccgccggagttggtcaaaaccgcgacagatggccacaccacccaacccgactagtgcaaaacaacatggaggcgatcgcgagacagaaggtgggcttacctccaaggattgtggcgttcggagccctgcccacggtgtggcgcggaatcacggcggcgcagcggctccggttagcattcaccgttgccctgatggtcgaaccctgccgccgagtccacgaacgacctcaccaaccactcgtgatgcaccctgacccaagaggagattcccaggcacaaggtcaccggtgtcggatacgagtttctctacctatggcggtgcacagtggtcacgaggcatggcccttcctttatacgcatcggggagggcgatttccagccgaggagtccgtggcgggcggcgcgcgtcgtcgcaacagatttccc

SEQ ID NO: 201909 - DNA, 338 bp, Zea Mays
cttgctgcccttgagcgtgagggtcaggtccttgaaggcgatctcgacggacaggcgcgtgctcacgtcgtggtcctgcgccatggagatgacgcccgagaaggtcatgttgtggttctcctgctgcatcgccttctccctctcgatctggccgtacgcgtacttgaagatctggctccgggtgtgcatctccttgcccgtcggcttcttcagcgccttgtcccctacctccaggttgaacccttcgtcgctctccgggttgtcgtcgatggaccgcaccatgtcggcgaggttgctgtgcttcttcccgcccgcgtcatcacctacctttgtggacg

SEQ ID NO: 201910 - DNA, 442 bp, Zea Mays
gtgttggcaggtcaaaccgcactttacatttcgaaaaggatggagtaatattttagccttgattttgacatccttttttgcagagcagtggatcaacattattcaaaattttgctcctgacgtctgatatgtggacagttgccattcaagttttactctatcatcaacaggtgaagattcctgatccagaatacttgtgtaagattattaacatgttacccaataataatcttacataatttggcccaacccaaagatatgttaatttaaactccctagattattttgtggaatcccaacagagtttattcatttgcttgtactctatgaagtggaagttcttgagatgccaaaaaagcagggaagtgcggacacaacagtcaagatgagctacttaaaagtgaggataattcaaaggagcgtggtatcccgagaatatgaa

SEQ ID NO: 201911 - DNA, 508 bp, Zea Mays
cacaatcaagaaactctggaatgcagacccgaagctcagcaaaatccacagtaggccacttattctgatcttccactaatagtcatttccatcctcgttattctagtttgcataaggtgatgttatgacattatgtttgcatacagacaacatgtaaaacatgctattatgttcatcctgtgctttcaaacaagtgtagctcgcttttgcctttctgctgttactttttagttgatattttaacttcttcgattttaaattttgaaggtgactagggaaaccagcagatatgagccaacgactcccacttcaaatagagagatgcctccagctgcatttcatcaaaggagagaacttctgagctacgagcaactttgttgcctcgatgatgtcaattttgccaatgctgtcatctttggcaacaaaggctttaggcccctgcagtacgaagcttgcagggctgcaatggataaccaagactgtttcatacttatgccaactggtggtg

SEQ ID NO: 201912 - DNA, 563 bp, Zea Mays
ttgtgtggcgttcaatgcaacaatggcatctgacagttcatggctctgcccaaggtaatgtgatatcttctgactctcttgaatcaccctttccaaaaaaactgcaagtagtaatcagtaatcatgctgaacttgctcgaactcttatgataccaaattatcaattccatttatagatgcaagtttaacgaagtggaatatgaggcaaatgtaatcttgaagcaaaaccttggtgaggactgtgtgattggttctgataggacatgtaccaacgcatcattttctgggagggtgtcagtatctgttgctgatgagggagaaactgcccttgttgtatcaatggtgggtgcacattctgaaactaggggtggtctatcagaagcttcactaggacttgagacagcacatgaaacatttaactgcagtccatacccaagccattcaaaagatgtccttgttgcagatgctagttccttgaggaacacagatattgtcagtagatcccagaataaaccttctgaaataaatgttgtccacactctttgttctgagcctacagaaac

SEQ ID NO: 201913 - DNA, 436 bp, Zea Mays
gacctatattggacctctgcttgaagttaataaatgaagtggaatcagagaagacttccttcactttaagatgccggtcaaatgaagaccaactagaacttctaaaaaagcaacttgaggccaatgaatcacacaagtctgaatatctaaaacgctacaaagctgctataaatgagaaacagaaagcctctgttgatcttagtagtaatcttgcaaacctgaggaccaagtgtagcacattagaagaacgatgtgtaagcatatctaaagaacttgatcatgtccgacatgaatgcactgattggagggtgaagtatgagcaatctgtttctcagcacaaggctgaacaagatagatttgtcgctcagttggcatctcttgagtctaggcatagctctgcagaaggaaagttgggagcagctcgggaacatgcagc

SEQ ID NO: 201914 - DNA, 315 bp, Zea Mays
ttcctgaggacctgatcatcaaacaacatacatgtcggctaacccaaaccaatgtaaaccacatcaccccttgtagcaacgctgcacagttgcctccctccattgcgcacaacaaggggaggaatccttgaaggcatgagagaccattcaactgagtggggactaagagtgagggagcatgccaatcgaagcttgtcgaagaacaaccatctcccttgaagttgacgacgagcacccacaaacaacacatccaagcaccataaaccgccatcccacgcccttaaaggggaggaagcctttaagagggagtgctag

SEQ ID NO: 201915 - DNA, 1230 bp, Zea Mays
gccatgaaatctcagccgcatctgaggtgagctatttttgttgttgttgtatgccattaactatgtatctatgggtttgttctccaataatcttgtatctacattctgcggggtaattgtaaggactacagtgttgacatttagattaaatgggatctatattttttatatccttgtctttccatgttcttctgaagcatcaatgcaccattgaatctttgcacaagtcattgccgcacccctaccctcctgtgccaagtgttactttatgcagctcattgtgtattaacttgctgattgcctgacacttggtgtcttggtcaccaataggagaatgatgaactattccagttgaaagaggagttagaaaaatacaaggaggaagcacaagcaaataagaactacatggttcaggtgcctgtctctcaccttgttgaagtccagaggatcatgctttacgtagatgtaaaaatgtttctatgcactgaaaaactaaagggaaagttaaaatgacctttaccactattagttcttaattataaagcgttattctatgtttcctcccttatctttcctgttaccgatctgagtgccctgttcataatattttaaatgagagggcggcttatttatgatgacaacaccttaattttgccttctatgaaagttgcttattcactatgtatggatctcctgaatcatgcaacatgaaatcttgtacagtacaaagaaatcgcacactcaaatgaagttgcgttgaagcaattggaatctgcacatcaggactacaaggctgaggtactaaaattttgcatatgttacattgaagactctattatgcatatgcacattgacttaaggtacttttcatgtatagaccgaggttggcaggaaagccttggaagatgagattgttaacttgagggataagttatcagaaatggagaagagttatgtcattaagtgtgaagaagctgccaatgcaattgaatctaaagagaagcacatcacttctctcatgaatgaaatttctgttttaagaacagaagtttctcagaaactgtaagcattggtttactctaaacctgtcagaaatacttcttcagtgtacttgtacatgaattgacttctttgctgttgttttgtttttcttaacagaccacagttagaaaaattggaaattgaattggctttgtcaaagagttcacttgatgagcagtataagcgctg

SEQ ID NO: 201916 - DNA, 536 bp, Zea Mays
gctcaaatggccctagcctgtgcctctgcgcacctgttcgttgcaacggcctccctaatactcgtcgcgtccctcgctgttaatcctcctatcttctacatgccctctctctaagtataaatgctgaaaccgagaacctcaagattatcatccaaagctcccgtatcatagcgagaatagggaatgtgagagatggatccaccattgttgttgacgctggatgcgggcagcattctgttgagtcaaggccgtgtgggcccacctcatccagctcggggtgactgctggtgggtctcttccacctcgtaacaggactaccccgtagcttgcgcatgatgtaaacggactccgcatcgcaggccctgatgaacggatctgccggttttcccccatccttccaggataaagcaacctcctgcgaccgcttctagcatctagcctcgatctatgggcgccagagtcatggtccgcctagtaaagcgcagagagagatgagccatgtcgccatggttgaacgagcagagctttggcatggc

SEQ ID NO: 201917 - DNA, 301 bp, Zea Mays
cggcgctcaaccctccatggccgatgtcatgaagatgctacagaccctgtcctccaacatgtccaagatgcagtccgacatggatatcatgcaggagaaggtcgcctccgcggccgactacggcggccaccaagatgggcagcaccgcacggatcacccgccgaagttccagaggatggagttcccgcgctatgacggcaagtccgacccgctgatcttcatcaacaagtgtgagtcgtactttcgacatcaacgcaccatgccggaggaaaaggtatggatggcgtcttacaacatggac

SEQ ID NO: 201918 - DNA, 1102 bp, Zea Mays
atcaaggatcacccaggaatttttggcttgctggctaaggtatgattcagaaaaccagacacaggaatacatatagctagttgccgagctgtcataaattttctaagttatcagtataagtaacccattactcagattttgtaaagaaaaaggatgacggtcaccaatcagtcttttaatctgagtatatatgatgtgtatagtgtacttgggcagttggccttaggagttgtggcccgtatgatgttgttagcttacttggatgatgtgggtacttacaattgatgcaatgaagtgttttgtacatggcactgagcccctgacagcagcaggttgtcatgtggactgtggagtaaattatcggactaatgatgatgaactgctccttttactgtttggtggcaatcagtggagttcagtgaaatacttgtgggggtttaagtggtaaataatgctagcattacaaccaaggttgttaaaatcgtaatcttgaatcggatcggaactccaatagtaggatcgcaaatcataggatcatcactgctagaatcacaaaatccaagggttcttcaacaccggattctctgtatgcggatgaaaatatttggtgaaaagttggttccaaaggagttgaagaaggggatgaactctctcaccattctggtggcttgggaactttggaaacaccgtaacagatgtgtcttcgatgggatgatgccagatttggtggtggctttacaggacattgctagcgatggagtgctctggtgttcggctggggccaaggggccccagcagctggttgtaagggtctcgaacagaggctagtgttgttgcgttgtcacctcctgttctcagggtggctggtcggtgcgttagaacatttttagtttgtcttggtgtatacagattcctttccttgtgtactttctcctttcttaatgaaatgatacgcagttctcctgcgtgttaaaaaaactgtttactttgtatgtgttctattttcattacttttatgtaaaaatctgtcttttttctgaaaatacttgtttcttgtttgcagtactatagaatatacctcaatgtcctgactatccctttg

SEQ ID NO: 201919 - DNA, 645 bp, Zea Mays
acgatcgtttcattctttcaatgctggggacagattttaatgactttatttatctcccttctgttggggcagccgggggcattctagtggcttggagacgacatttgggattcactggtcaaaaaagactggataattacagtgtctcagttcagttttgtaatagtaggggaaatgaatggtggctgacctgtgtttatggtcctcaaggaggcaatgagaagattttgttcctgcaagaaatcagagaaattagggccgaatgtcttggaccgtggatgttggctggcgatttcaatctcatttataaagactcagataggaacaacagtaattacaacagagcaatgatgggtaggtttcgtagattaattgaggatatgaccctgaaggaaattcccttgcatggcaggcagtacacttggtccaaccaacgaaatgtgcctgtactggtcaagctagacagagtgttttgttcagtggattgggagtttctcttccccaatgttcttcttcagagtactgcctcacaagattcagatcattgtcctctaattttggggcttagggataataaatccggaaaaaggcgttttcactttgaatccttctggaccaagcttgaggggtttcaggatattgttc

SEQ ID NO: 201920 - DNA, 273 bp, Zea Mays
cacgattgcaaaactgtagtgccgaaggggcatcggaagaatcggaccatccgatcaaaattggacgccccagattagatctggatcacgctgaaccggtatgcagcgcgatccgtccactccgcgatcaacagcgcggattttaattctctccgatctcactagtgtcgcccgatcacgatctaacggcacccaaccaatgtggcgaaagggtacaccaagttctaatcctggctgttcgtcacccgatcaacggcgcgcctaagttcttcc

SEQ ID NO: 201921 - DNA, 324 bp, Zea Mays
actgagtgagaagttacggccagtgatagacttgcgtgtttctgtcactggtggtgttcattttgacctagtcaagagggttttaagggatatacagcgagctggccaggagcctgaagaaataattcatcagatctctgaaacggtaggttgaattttccaacttggctatacattttatgagcaatgttgttgtccattgttaacagtgaattacctcttactgtaattggtgtggtttaatgaaatatgacatttttcaggtttatccaatgtacaaggctttcatcgaaccagatttggagaccgcacatattaagatca

SEQ ID NO: 201922 - DNA, 831 bp, Zea Mays
cgcagcttcttgggtttggccggatactacagaaaatttgttcgtcactttgcagtcatggcaaagccccttaccaatttgttgaagaaaaatgctctattcatttggactagcgtgcatgaggatgcttttacagccttgaagtcggcattatcctccgccccagtcttacagctgccaaatttttctgtaccatttgagctggaaactgatgcttcagctggaggaattggggctgttctcagccaacaagggcaccccattgcctttgtcagtaaagctttgggcatcaagaatcaaggtctttcaacatacgaaaaagagtacctggcgattttaatggctgttgaccagtggagggcatatcttcagcatgacgagttcatcatatacacggatcagcgaagcttagcccatctgaccgagcagcaactgaataccttttggcaacgtaaagtattcaccaagttattaggactccaatacaaggtggtttataaaaaaggtgttgagaatggagctgctgacgcactttcgaggcgaccttcggataatcttgattgttatcacatttcctcaggcacaccggtttggctgtcagaagtaacagcaggctatgagacggatccacacactcagcagcttattgccgaactcactcttcatcaagctccagatagtcctttccaacttaaagctgggctactccgatacaaagggcgcatttgggtaggtgctaatccttccctccaactgaagatcgtgtctacaatgcacgacagtgcgatcggaggtcactccgggtttccagtcacttacagacgggtacac

SEQ ID NO: 201923 - DNA, 460 bp, Zea Mays
gtccgccccgtgtcgtggacagcaccactgtcaccactgtttctagtaggttggtctccattgggttctgcattttctcctcttacgtttgcaccgattagcgtggtggctggggcaagcaggggtgagggtcggtgggtggcgcttctcgccgccgtaggcatctgcgtaatttctgggggcgccaacgcgactgggcattcaggtggggaagatgatgccacggccgctggatccgtaacagacgactgggatcgctcttggcataccggttcggtcggggtggctttgtggccatcgatcggtggatagaggggtgagattagagttcgcttcaatttaatctgtgccactgatcttctgattcgacgaccggtagtgagtgcaggatctataagaagagcgatctaatctgggcgcttgaaagatgatccgatggcccagattacaccatacccct

SEQ ID NO: 201924 - DNA, 395 bp, Zea Mays
tgcatggtatggttcatcatcttaattctctgataattagtacaactttgagtatctcccttattcttgtagatcgatactgatatgcttctccactcgtcaaacattgtgttcgatcagaagatatggttgaaccttgaatgaactggttagccatactatagctatgcccttgaggcatctccatgcctcaattgggataccatcaaacccatcgccttaccgtttcatccttcttaatgcctctctaaccttagcttcttggattctatgcacaaagcgcttattgctatcatcaagagtcatccaactgaaaggtcgtgtctccattcttattgaacaatttgtcaaaatactcttgccatctatgtttgatctcatcctctttcaccaac

SEQ ID NO: 201925 - DNA, 292 bp, Zea Mays
caggtgaattgtccagcagtgatgagaagaagtacaaggcactaaagcgtgccactgaaagagagatactgcagagtgctgatgtcatttgttgcacctgtgtcggtgctggagatcctcgtctttcaaacttccgtttccgacaagtaattattgtcgcctcatgctgtctccggttagctatgattcctgttgtgtaatattctgatgcaacagtaaactttattgtcaggttcttattgatgagtccacacaggcaacagagcctgaatgtcttattcctttggtgctt

SEQ ID NO: 201926 - DNA, 583 bp, Zea Mays
gttttgttgactggaactcctttacagaacaacattggtgaaatgtacaacttattgaacttcttacagcctacttctttcccttctctgtcatcatttgaggagaaatttaatgaccttacaacagcagaaaaagtagaggagctgaagaaacttgtagctcctcacatgcttcggaggttgaaaaaagatgcaatgcaaaacatccctccaaagacagagcgaatggtacctgttgaactgacatcaatccaggctgaatactaccgtgctatgcttacaaagaactatcaagtactgcgcaacattggaaaaggtggcgctcaccagtctttattgaacatagtaatgcagcttcggaaagtctgcaaccatccttatcttattcatggaactgaacctgaatctggttcacctgaatttttgcatgagatgcgcataaaggcctcagcgaagctaactttgttgcactctatgctaaaaatattacacaaggaaggccaccgtgtccttatattctctcagatgacaaaacttcttgacatccttgaagattatctgactttagaatttggccctaaaa

SEQ ID NO: 201927 - DNA, 363 bp, Zea Mays
aaaacatgtctacgcggtctgaaccattcccaccaacgccattgtgccacaaacaagttgacattcatggccgcatcaacgcttataagccgctctcttcctgtttccctggccggtatggcactaaacacaacagtaaagagagcaccacaacaacgtcgatgtcctaggctgaaatcttagtgtggcccgtattacagtgatgcttggtgagcccatatagcgaatctatacgacagctatcatcctcttcttcgacaacatccgcctgagcaactgctcgctcagcttcactcctgtgacctccctctccacacgaaaatggccgcatgcggttgctctgacggcctcgcctgctcctca

SEQ ID NO: 201928 - DNA, 303 bp, Zea Mays
ccagcaaccaacaagaacggccaagcagccccagcacaagtaggaggtcatgcatgcttccactgtggagaacaaaatcacttggtgaagaactgtccaaagaaagctgctcagcagccgccaacagtcaatgccccaactagacaaggagcgccacaacaagcaccaggagtccgtggtcaggcctacaatcgtggaaaggtgaaccacctggaggccgaagcaatccaagatgctcaggatgtggcagtcggtacgtttccagtcgaatcctacctagcaaaagtactatttgatactggt

SEQ ID NO: 201929 - DNA, 481 bp, Zea Mays
ccgtgctcgcatcatggatggtaatgatgatgacaccatgtccattgactggagtagctttattattgagaatgctgaaaataaggataatggggagacgagtgatatgtttagaatctgtgacgaggatgagatgtatgcgttcttgggacttggagatgaggatgacgagatgaattgaacccacccggaaccaagcaactttgcatctcattttacatcagaaagtaatagttttgatccaagtgatctagatgctgccatgccagttgatgatgaaaatgcagaaatggtcaatatattgcacgatattgaccaccctgatatgaagttgggtactctctatccatcgatgaaagagtttaggctagctgtgaggcaatatgctataaatgaggagtttgagcttggcataacaaagtcagatagaaatagatatagagtgtactgcaaagggaatgattgcacatgcccttggaaa

SEQ ID NO: 201930 - DNA, 276 bp, Zea Mays
ccaaataatacaaaactcagggtccaatctgtaataattccctagactcaggctaaaccagggaaggactgcgggttgatactgagaaaatagaggggctcatttgtaaagctgtcgaccgaaagggtatcgcagaacacgggccgtcagatctaaacagacggtccagatcataacgtgaatcggtacttgccgcgagcgtaggattcaaatccaacggtccgtagtgtcgcctcccttacaaccgcatacacgctgatcaccggtcgagatcga

SEQ ID NO: 201931 - DNA, 331 bp, Zea Mays
gcaccaaatagactaggaggtggcaacctctaaaaataacaatcggcttacaatactttacctaatgccactcaatcaaattactcaatgcaatatgttggcaacggtcacccactatagagcatgaacagtattgatcactagtgagttcgagggcactaagtcactcaaaaatgtacaaccccattggctcagcccaacgatcctctctacataaagagagagaaaaactgatcgttgaaggctttttagcctctaacttggattttttcggctcattgcccttggaaatttcggagcaattcaaatcaactccaatgatgggtcaaca

SEQ ID NO: 201932 - DNA, 378 bp, Zea Mays
ggcagcatccccgagtcgctcggcgactgcaagacgctcacgcgcgtccgcctcggcaagaacttcctgaccggccccgtcccggccgggctcttcgaccttccccaggcgaacatgctcgagctcaccgacaacatgctcaccggcgagctcccggacgtgatcgctggagacaagatcggcatgctcatgctggggaacaatcgcatcggagggcgcatccccgccgctatcggcaacctccccgcgctgcagacgctgtccctggagtcgaacaacttctctggcccgctgcctccggagatcggcaggctcaggaacctcaccaggctcaacgccagcggcaacgcgctcacgggaggcatcccgagggagctc

SEQ ID NO: 201933 - DNA, 421 bp, Zea Mays
gcaagtcagcaggatcaggttatcaacaagcaaaatataaggtaagtgcaagtcatcccttaattcaccaatggcatacaaaacttctttaaaatacctgctaactgtctccacagacctcctccaactttggtgtatgaccctaaaacactggttgtggccaactacatgaaggaacatggctacttgttcctccacactgctgtggatactatctctaagcaggttcctactcttaagcaactcacagagctgaaaaaagggggttcttctcatgcgcaacatgttaacacactccacatcattgaagttgtaaattctattcaagtttctgtgcctctcttcatccattgcactcattggggcataagtgatcctaggtcgtgccacttgacactggacaagtctagaaacaaaaaat

SEQ ID NO: 201934 - DNA, 402 bp, Zea Mays
cttttactacgtctgatggcatagctaagagagcaagatttgacatgtctgccacttcaaacctgccagttctgggattgtctgattattctgatatgcaggctgacaatgatgccagtgtgggtcattcatccgatccagctatattgaataatgaagtgtctcctgtcgagaagatgattgaaatgattggcgctttgcttgctgaaggagaaagaggagctgaatccttgggtattcttgtctcaacagtagaggcagatgtcatggccgacattgtgatagaaacaatgaaacatctaccggaagcttcatttcatttagcaacaaataacggtgtccagcaactgaattttaaatattcctctggtctcgtaacacaaaaccttccagccaattcag

SEQ ID NO: 201935 - DNA, 327 bp, Zea Mays
ctgagacggagggagtaatttgcgtgagtatttcttcgtccttccattttttttcttatgccccctttccgagtacctgtggccgcaccacatggtatagatatatcatatatggagtctttgtccactgccacaagcaactatgctagcttgtctttactcttgaccgacgattgacgatgctgaacctgaactccggtagggcatgcttatatcgcaagccccatgctgcacataagtttgtgcgtagacttcgccgtacatatcactgctttggttgctatgattttgttgaatgaataacatatagacacacggtatgccgat

SEQ ID NO: 201936 - DNA, 367 bp, Zea Mays
tgctggtccggctgcacccttaggcgacttatgcacggatagtcttcgcggtagagtggggtttttcgcacttgttgtgctagtccggctgcacccttaggcgacttctgcacggatagtcttcgcggtagacttaggtttttcgcacttgttgtgctagtccggctgcacccttgggcgacttctgcacggatagtcttcgcggtagacttcggtttttcgcacttgttgtgctagtccggctgcacccttaggcgtcttctgcacggatagtcttcgcggtagacttcggtttttcgcacttgttgtgctagtccggctgcacccttgggcgacttctgcgcggatttgtcgcacgcgagggtgg

SEQ ID NO: 201937 - DNA, 338 bp, Zea Mays
ctgaccccaatgggtgtgaccttgatgatgctgatcccaatgggtgcaatccggccagagctgatcccaatgggtgtgctgttcgcattattgacgaggatgaggaagaggaggaggaaatccctttaattcggaaaaacaatcggcgtgatatagtcagtggggagagtagtgatattccttcttcagctttgtctgctctcattggtctgcaagaattgtctttggcaaattttgatcagactctcgaggatatggtccctgaagatctgttgtccgagccgacagatggtggtatgatggacgtttgcactgatatgcctgatgtcaggttagag

SEQ ID NO: 201938 - DNA, 979 bp, Zea Mays
gttattggtaagacagactatgagatattgtcaggtgagggtatagaagagatgaatagtgtcaagcgagaagttatggcctcggggatagcaactaaaagagaatttgcgtttaatacaccaatgtttggggcaaagacatttgtgacatacattgagccagttttcagcaaaggtggggaagcgattggtgtgaattatgttgcaatggacataacagatcaggtacctttatgaatttaaacctcttatgatgtacctttgattccctttgcttctggatattggaaattctgatattatcattgtgggggctctaatattggcactagctgtatgattcttcgtttctctttggtgtagtgtgcactagtacaattatatttttttggtaaaatatggtactatataattcttgtgagtctcctaatagatgtataatatcatacctagaactgcatgctaaaatttcactaccacaaaagggggcatgatatttcccaaatgttcaggatgtagtatatatttttattggcttgttactagcacaagtgaccaatagtaaacttttagttgctattattccacagatatgttaacgattttgatttttaatattggtgccttgagttgagcatacaactatttttctgagggtgtttttcacatgttatatcctgcatgaaaaaaaatctgttttcacccacggcatgatgttctgcatttgatttcatgcttttgaatggcaattaatcttcttctttgcacattaggtcaaaagaagagagaaaatggcagacataagggtgagggaagctgtccaaaatgccaaggaaactgaacttagcagatctcttcacataacaggtctgcatgttgttacaatactcttttgatgcacttatgctagactgggatactgaacactttcttaacattcacattacagaggaaacaatgcgagcaaaacaaatgctag

SEQ ID NO: 201939 - DNA, 454 bp, Zea Mays
atataatctcttcaatgtgatagcactaagagtcaccccctgggtatgcgtatgtttcaattgtgtgctaagtttctctaaattattattatattatgcaggcagctgaaggtaaactttctgaaaagtctgtttctgatgagtcacgacaggtatacatctacagatgttcagtatctaacattctatagagtgaggtagataccacaagtttatattttcttatttttcaggaaacttcaaaggtagaccgaaatgtcaattgcctaggccaagaaggtactagcccaagtagtactccaacaactgccattagcaatggtggtgctccgattgacaatgtcaagtctccagatgaaccagattcttcaaaacagaagcaagaactgacttctggtgacgaacagacaccagattcttctaaacagaagcaagaactgacttctggtgatga

SEQ ID NO: 201940 - DNA, 339 bp, Zea Mays
tgtatgaagttgagtctgatcgagtctcctgagttaggaccctagctgccccttttatacgccaaggaaggggttgattacaattgcgaataagaagggttgatggtgtccacgagaagggtgattgggtctcactctgctgacattcctctttcatgtcatttgctttcatgtagcataaccttgctaacttcttgtgacaggaggggttgtgtgcggttcgtgggggcacagggatccctacaagtgtctgtcatcggctccgttggagtgcctttatcggagttagtagcatagtgtcaactgtggtggtgattcttacctttgagatgggctagc

SEQ ID NO: 201941 - DNA, 349 bp, Zea Mays
gtaccgtaagcctacacgctccaccactctgcgatgggtgtcctagtatctggaactgtgattcagggggtccgagcacacggcttggcttccctggccaagtcctgccggtcctattgcgtaaatcaaaggataaaagataccagctagtgggtcctatgggtgcgctactaaaacttcctagccaaggctgtgtgcaggtccgggtcccagtcgagattacctcctgggggctatgtcaccaattccttcttacaaatactggcatccagcctcgacacgttgagcccacatcccagggggccaagtaccagggaagaagttggtaacgacgcacacagcaaaggaa

SEQ ID NO: 201942 - DNA, 331 bp, Zea Mays
gggggaaatgcgggggagaatcttaatgcgacggcggcggttagtctagggttcgccgggcgccgaggagaagcagcatacggcggcggatttggctagggttcggcgggagcgatagttacgggagagctgtgctgagaaaacgacggctcagttccttgattcgtgggcccggattacgtaaactgcctagattgcgggaacacgatcttttcgtgggcccggatgccgcgagacgtgcgcacaccaaaagagtgtaaacggtaacaaaaaggagcataactcgtatttataattgacgtaacagtgtattacagtaaaccagtaaagc

SEQ ID NO: 201943 - DNA, 295 bp, Zea Mays
ccgcgatccactcgggacccatcggcggagtcagagtgggagtctggaaggcagccagggtggctgcgtcccaaccaaccagcccggacggtggagcaggcgacggtgtggggcacgacgaagcggcaggcgaggtccagggtgacgaagaagcgaaggcaaaccccagtggcgaggtgaaccccggctgcgcgccagcgaacatggccgccgggggacgagcctcagaatcgggcccctataacggccacatggagatgcgtcctgaccacgggtggtggaaagtgggccaagg

SEQ ID NO: 201944 - DNA, 476 bp, Zea Mays
cttgcaatggtctatcttatttgaattatatctgctcagctcaagcatcattgacgttggcgctggcctcctctatacaaggccaggggtaagtgccttcctcccctttattagttgattcctcatcctctctatctcttgttcgtattttgtagacctggatccgagatatcaccagctccctctttttcgttgccgccctcattgctcttccctaccaccagacaccgttgtaatagagttgctgatatcgatgtcgtctgtgaactgactgtcgaggaggcctccgtggatacaggtttgttttgctatcgaggactgcttctatatcatattcatctccttgcttggtgatattctttggttcgtgatccaggcgtccttttggtcatcctggagtgatttccacaagctagatagtctaggccaaataatatcaatacgggacgaaaaaaatttgtgtcatacctacaaat

SEQ ID NO: 201945 - DNA, 417 bp, Zea Mays
agtacctacgatcgctaagcaaccccaacatgcaaaatcttggcgtggctgatctctcaaggcagttaaaccttcagaaccagattctgcaacagaacagcattcagtttagttctcctaaactgcctcaacaaatgcagctggccaatgagttgtcaaaggcatctcttccactgaatcagattggtgtgggcaccaaacctcaagaacagactcaagacccaaacaatctgcagaggcaacaacagtccatgaaccaactacttccattgagccaatctcaaaccaatcttgtccaggctcaggtccttatccagaatcaaatgcagcagcaaaagcaaccaacatccatggctcaaaatcagcagccagctgccagccagtcactgatcctgccccagcagcagcaacaacagc

SEQ ID NO: 201946 - DNA, 702 bp, Zea Mays
cactgatgaaatatacagtacaattttggatgtttctttcaagagaatgctgaagaacaatggaagtgcaacttctgggttgttagaaatatggagtgaagagcttgaggggaagagcgacttctgcaactaccgcaccaaattggtatgttttcttttctcctgacttctaaaaaaaagagttgcctttggtccttgttaatcttaaaagatcatttgtgtttctcttgtccatcaatataatttcttgtcatcttgtcttcagtggtcttgattcttaaagttttgttgcatgatgtgaaactacacaaaattaggaggatgtctagtttattcatagtacatttttgtccttcaattactgattctttaccttgatacatacaacatgattttccttcaattttttcaatttgattgtgtgatttgttatagaagtggaactttttgtattgtaaatagttgggaggatcccaactatatatgtataaataagttataaaaggctatttacagtattttttggaccaatgatggataatggctggcctcttattgtccacaactcagttaacgatgttttatgcatcttcttgcagttggatctcattaaagtcattgcttctcaaagatctgtgattgctgcagcaattgtagttcagagaataaatgttgtctttggagatgctaatcaagcaacta

SEQ ID NO: 201947 - DNA, 669 bp, Zea Mays
ccggaattcagttgagagcttgggattggatatgcaaattcactacccttggtttcattggttgatttgagtagaattggcgattttgcacgctgatgaaaatgtcatgagaaggaattgagcgaaggacagattcatgctcacatgctgctactgctgatgttacagctttcgctttctcaattcttattagattggactatcggtgataatgaactgacaaaatttaaaatatttgagccagctgttgcagcatttgtagtgcatattctagtagccagtacatgccagagcagaattggttgctttgactgatatatgtctgcataatgtttcctagtatgcattgctttggtctatttcgtgccatgaggctgtccgcgccccattccaaacaaatactgttcggccactactatctgacctactggttcattgtttacaaatactatcccacaactaatgtctctccatgtccatgtttcgttatttaattaagtatatactcatctctatagactatatctatatctatctactatattaaagcaccagttttcctggttccttgttttccatcgtcgttgtgctccccacatttaaataaataaataatgctaaaattatgcacgaattcaccatggctgttggctttaaaccccacattca

SEQ ID NO: 201948 - DNA, 453 bp, Zea Mays
tgggaaggagtcttgtcggtatctaggaacaatggtacaaaaggatggtcatattgatgaagatgttatgcaaataatttcagccggttgattgaaatgacgtcatacttctagcgtcctctatgacaagagggtgccataaaagcttaaaggtaagttctataggacaacgattcacccgagcatattatatggtgttgaatgttggccaacaataatgcaacatgttcaacaagtgagtgtagcacaaatatgcatgttatgttggttttgtggacacacatgaagggatagagtctgaaacgaagttattcagtatatggttgggtggtaccaattgaggagaaaatgatatagtatcggttgagatggtttggacatatcaaaaaaaccacctgggacgacggtgcatagagaagttttagatcggctggataatgtaaaaagaggtag

SEQ ID NO: 201949 - DNA, 425 bp, Zea Mays
tcagcgttgtcactggctagcaagatggttcaggcttccaagttccaagctatccaggtaatctgacaattattgatatattaagggtacgtttggtttagcattctgaaccaaattcgttgccaaataaactggaacctcaatcaaacgaatacaatagcagaatagattcctaaaatctgtagattcatattgttcaattcagaatcacctcttaccctagatttcataaattattgctatccatgttaccaagctatcatacttttatagaatctacaattcacagttgtttcaaccaagcatattttacctttcccacaaccgtcaccctacaatagctttctcgcaactcatagctaaaaccatatttttaggtctctcatttattttttaacgcacaggcccgactttatgaagggaaa

SEQ ID NO: 201950 - DNA, 415 bp, Zea Mays
atggacactggtgcctctacacatatgcactcctctgaaggtatccttcattctcatctcccagctgctgcttcttcgatcatggtaggcaatggtgcaagtattcctgtcacgacccgcggctcatcgatccttgacatcaactccactaaatttgtgctgaacaacatccttgtcgctccttccatagtccgtaatttattatctgttcgtcaatttacccgagataatggcggttctatcgaatttgacgcttttggtttctctgtcaaggaacccaggacggggcgagtgattcttcgctgcaatagctcaggcgatctctacacactttcaccagccgcccagtccactgccagcgccctcctcgcagcctcctcctcagtgtggcatcgtcgcctaggtcaccctggtc

SEQ ID NO: 201951 - DNA, 321 bp, Zea Mays
cttagctaaggcccctttgccttcagtcaccgagcccactcaatcttctggtaaaggcgccttttcattttctgacgagggcaactattcagctcccatcctcgaaatcgactcgccctactttgaaccggttttggttgctggctcgactgctatacccagttgcaggtgcctcttcgattctaacattgcccactcttctcttactgttgctgagaaaacccttttgccctcaccctatcgaactcaatagtactatggtttctcacatctaccataatttctcttgcacatggccaacttcccggcggaccctcggcc

SEQ ID NO: 201952 - DNA, 281 bp, Zea Mays
acaccacaaaaacttggcattctaagcttagaagagtcgagagggaagttttatgagcattatatgcagaagagggatgcaaaactgaaggaagactggaaactgcagaggggggagaaggaagcaatgttaaaggctatgcatgagagcctagaacggagcaaggctgagatgcgagctaaattctctcagtctggagatgtttctgactcaacttatgtttatcattgttctcagaagattcctccttcgcgatcagcaagaagaaataatgatcaggt

SEQ ID NO: 201953 - DNA, 323 bp, Zea Mays
ctcccaaattccgctgctttcccggcagtttctggaaaaagaacgagccatccatttgttgttgtttcagatttgccccctccgatccttttgtggcccagagatggccagtcatgtagtttatcgctctgccgccggagtcaaatttctgattggtctgcggccgccttctcttccgagttgcggagttcttagtgatttttgttcttccctccacgcctcgctttacttgatttcgtttcaacgagctggttcatgttggaattttgcggtcgttttgttctctctccctaaggcgctgggcctggtgatcgttctgttcg

SEQ ID NO: 201954 - DNA, 1131 bp, Zea Mays
cagtgattgtcctcaagctatgtcacctagtgctagaagttctaggatatcagcattagagaatatgttgtgctcatcatctagtgctatggtatctatggcttctcaactgtcagaagcagaggagcgggagcgtgtattcaatggtaaaggtagatggtacaatgtcaggtccctcccagaggcaaagaatataatgaattaccttttccagttagcatcatctgcaaggtatgccgtaatttacattccttcaaaggattttatgatgaatgctatgtatgcccattcttagtttccagatacttattttctgtattttgcttctaggtctcaagtactggataaagaagtaatttgtaatgaaaaagaacacaccattactgaattgaaggaaaaggtggttgtgcttaatggtggaattaggcagttagaaacacaagtgagggatctaaggagccaaaatacacaggtaaagattctccaatttgtactgtgcaaattccatggcaccaaactaaaaaattattttgtattacgatatttagataaaattttggttatgatcgtacgtgctaacagtttcttgtttatacaaattggcagcttttcactgcattgaacaatgcaaagaaatctgctaggtcgaatggcactggatttgctcagcgtaaggtatttttcttttgcgagtgcctttaagtttatctagagctcaagtgatattcatagtcagtatatgcactctttgctgttttttcttgttagatgtctgaccatccctcatacatgcagagtgttcgagcttcccagcattttggttatagtaaggacaacttcaattgggtggatgatatggacatttcagacagtgagcactcggatgagttagagaatatgagtgatggatccgattcagactgggtacagtcgaccaggaaagccaaaaaacaccagagaagagtgtctagccattcaaatcctaacctggattgtcaaaatacacaaggcaatgcagaaccagagaagccctcagatgaaaagtgcattttgcccaaatatatttcatcagacggctgttcatgctcaaaatcctcctcatgcaagaccaacaaatgcgagtgcagaggc

SEQ ID NO: 201955 - DNA, 302 bp, Zea Mays
ttttccgtgcttcgaccgtcttctctttcttttgttgcggaggcttctatgagactacccctcagcagccatcctaggggaatcctccatcttcgcaacaacctctggtgtgttgatcttaacccacaccaaacgtcgcctatgggggacagcacactccgaggttgctgacgaggccccgcgctgctccgagaggcgctgccacacagacccccttgcttgttgtttttccaatctctgccacactgtcttcttcctctacacttctcggcggcctagacacctgacagcctgatgtccag

SEQ ID NO: 201956 - DNA, 291 bp, Zea Mays
ctttttatcattatcactgtgaataaaatgaatgataatatgcttttcttcaaaactgtattatcagctggcggtgtttttcaaatctaagttggaccagctattagtgaaagtgtgatttatctcccccaccaaagaggtgaccatcatttaccatgaatgtgcctaaacggcaaacaagttcaaacaacctctaaagtccatcatcaatagttctgtcacatagccatgcatgatatatgcagtcaaacaaacacaaaagcaactatatgaataggcaaacctagaaca

SEQ ID NO: 201957 - DNA, 417 bp, Zea Mays
tgaagccccagatcaacggtcaccgagtcctagccgagtcgttcacctggcttctaatctggaccgcccaggccacatcggacgatccgcagcctttcttctttcccccctttcgtctgtatacggcggcgcccagcctccacgcccgacggagcgtcggcgaggtagccaatccaccacccccgagtgctacgcataaaattggatggagctacgctatggggaagacaaagcgatcagcaacgataggtttcttaccgagggaatgaggcacaggggctcggccacggcgtcgcgcgggtccgccgtggagtcggtgcgacgacgagagattatcgccccaccgaagacactcgcgcaccatgaaatccacgaatcgaccacccaggctagcccgaagttccccgtggcacccac

SEQ ID NO: 201958 - DNA, 512 bp, Zea Mays
gcttgccaagcgcagcagaacgggcaggtgcgtgcgcgaacaactattatatctacctagcctacgtgcgaacgatgtctctgctgacactgacagggatgtgcagcagcaaccgggtagcatggaggcgtacaatagaatggtggcgctgtaccagaagatgaaccaaacgcagcagagcgcgcccagcaacccgtccaagcagtgagcatgacgtacgtacagctgctttcttgtacattgtttgttcagttttgtttagatttttttggctcattttatcgcatttgttcagattctttcctctcaattgatgaggcctggaactgtgtaacagaggtgtgaaacccgtcgacgcggtacctgtagcatcatgtatttgttttggttcttgaccactctatccttgtatataaggagaccagacgttgcgcaaccgttgagcggagaccaactccagcagactctctctccgtatccgtatttaggacggccaacagtttctctctcct

SEQ ID NO: 201959 - DNA, 523 bp, Zea Mays
gacgacttcgtcttgaagataaatggtccttcccacttcggttccagcttaccccgtgactctgtccgggttgtgcggacaagtacgaggtccccttcgttgaattctcttgggacgactgcgtggtcgcgccaggccttcgtttgggcttgatatttatcgagggcctgcagggcgaagacacggtctccgtcaatgaggtctttggaagttggctcgtcgacgtcaggtactgttgaagcgcttgtccgcggggacccatgtttgatctcctgcggggtcaaggcctccgatccgtacaacaggcgaaagggagtgaatccggtcactcagcactcggtcgtgttcagtgcccagactgcttcaggtagcaggtcggcccatttgcccttcttgtcgtcgaggagcattttcttgatcgctgtgaaaatcttgccgttggcgcgctccacgacgccgttggattgtgggtggtatactgaggcgaaggcaagtttgtttccaatggagaagcagaaatccc

SEQ ID NO: 201960 - DNA, 1038 bp, Zea Mays
gcacccagcagcagagtacaatgtccacaggcaaatgcgataaggtgaggaagagagagcacgggatgggttgagaaacaagatggagggagaaagtgggcagcctgctggatcttggcatctcgccgccgctcatttccgctccacctggtatgccccgcttccctctcactaaacagactccgctggattggattggatctttttttttccttcatgcgtgccgtgattgttagttagccgcttctcgtcttccttgatctgcgttttgcgcctggacgctccaaagatcaatcttttgctgctgcttcgtgattcggctttgctgggcatcggaatggttggtgttgacgaatgggtttggttggtggagcagtatgcgtggatcatgtgatctatatgctctcttttttctgtttgctgaatggcgcctgactcgcgagatttgcttccaaaacccgcttcttgccttctgctagcagatatgctcatatgcagaagcatcgcgcctcgatgttcccgaggctccgtttctggggaaacgaattttgggttctgttggtttcctgtttatttatttatttatatatgtaaaacaaacccttgattgcattgttccccgttatattgcttaccttgcttatcagtcagtttgacagaattctgattgctttttttacgtcacacgaaggaagcgttgcactatcacttcagtagcgcttactgtgcatgcacaacttttttttttctcgtcatacagttactgagggaagtgctatctttttcttggctcctgtttggtgcagtgtgggctagttatctactagtagtatcttcgggccagttcaagacttagccgctggtacgtactaactcgtgtcatagtcatagccatggtgtccttgtgtcctctccatcattgctgttgataccatactttattgatctttttcaagttatgattttgaggataagatattgcatctctgcacagttctaagcgctgaggaagtaaaatatcatttatcggctagagta

SEQ ID NO: 201961 - DNA, 357 bp, Zea Mays
gtgaatttgggagggacgcgcggcggccggaggaacaaggagttactggcgagcgcgattagtgtccgactaccatcgcaggctccccggtgatagacggagggttacagcgagtcacggcgacgccggggatgtgccaaggcacgtggcgttcggtcgacgggcagccaactccgatgacttatccgaaccgaccacaaagcaaaaaggagcacgtcggctagccggataagtgcccatagtccaacagtggtgacgatctttttaccccgcggcgttatctgggctaaagtgggcacgaatcacctcatcggcgcgaatctatgcgcaaggtcaccggcagcgagctaaccgagc

SEQ ID NO: 201962 - DNA, 293 bp, Zea Mays
atcaggacctacttactccaactcggtgaatggccccaagaatgccccagcgcccgcctccaaggcaccctcctccatcagcctgcagaacaagacccagtatcatggcagggcacgagtaaaccacgtcgatgctcaagaggctcaacaagctccaggagtagtgctcggtgagttccttgttgaatttactcccgctactgtactttttgattcaggagcatcccattcatttatagccactagttttgtggaaaagcatggcattccctctacccacctagaaattccct

SEQ ID NO: 201963 - DNA, 464 bp, Zea Mays
ttataaatttatataaagtttgtacaccagtaaaaatagaatgaaaaagataaatttaatattatttaaatcaatgtcacgtcaactactaataactaaaactaagggttgtctcatattcgaattgcctcctccaagccttgtatttacgccccagtccccagtctctccacctagaatcgaatccgcgatcttcttctgctccaagcaaagccgcacccagacctcgacggacggcgagcagcaagagggcaagcccgtaccctatcgactcgaacctcggagcggcggatcggtactcgtaggcagtggtggacatggcttcggcggcggtgatggtgagctcggcgggctccctgctggcgatgctgcaagagccggcgccggagctcaagctccacgcgctcgccagcctcaattctctcgtccacgccttctggcacgagatctccaccagcgtctcc

SEQ ID NO: 201964 - DNA, 328 bp, Zea Mays
atcacagttttgggctttcactagcatgctccactggatcggattggtgaactctggttcccatgatcccatcaaccttcaccttctgctagataatcacgctgaccaggctcaagtttgcctcgatgctctcttggaccgtgtgggatgagctctcatggacatgtgcattatgcaagaatcagtgtatctgttttgtctctccatgattcaattgggctgcatgacggagaagtggcccttgacgcggtcatggcgcgcagagtgcaatctcctgcatgcccatgattctacgtactattacaaatatgattaagccataaacaag

SEQ ID NO: 201965 - DNA, 625 bp, Zea Mays
accttgcctttctcttggggtcatttgcttgtgcactaagctcaggagggagtgctgcaattgccttttcagcaagggttttacaatctgcagcagctgataaagcagacgcaagaccagtgctatctgcatttgaggccacatgaggaacaaaagcactttgacttgcactgccgaccatatttgactcaaggaataagacctcaacgttattagcacgtccacagccaccattaaaatttgaacagacaacacaaacacacaaacagagatacatggttactattgggtattgggctactgcctactgggagataccagatgactgctatcttccgggcgttgcagaggtaatagagggaaagggaagggagactaggagataatcagagaagggagagcaagtgctaccttcatatgacgagctcatcttcaattcttgactagctgacagacgccggagcactggacgccgctggacggctggagcacttggaggctggaacagagacgtcgacagaaaccagagaggacagaggagaggagtagggtttctggcggctgggaagggttctagcgggtttctggcggctgggaggggtcctggcggctgggagggtttttg

SEQ ID NO: 201966 - DNA, 282 bp, Zea Mays
catgattgatgcatgtatgatatagtggtctcgagcagtgtgatgtttgagttatggcgacagtgtgtctgttagactctaattacgcatatcatatttaatgtatgaaaaccttatctgaagcaccagcgttatgagaccgttaggagtagatttttgacgtggcatcctatctttggggttgtcatgcctttggtgggggacaactatatttctttgacttgcaattgccttttatattttatccgctataatgttgtctccatcattcttacatatccg

SEQ ID NO: 201967 - DNA, 449 bp, Zea Mays
ttggtgttcctacttcatctcagccagacccgccgacatttgaaggaggatcaagaattaggccacaaaagttgtcaccgatcaggaaaaggaatgcttgaagtattatgtgtcgtgttgttagctgaattttaggcctcaattggtgttcctatttcatctcactactggaatgcttgctgttttggtggtttcagtaattaggccacaaggtgaacgcctgctatgttgagatgaagtaggaacgcctgctgttttgctgttttgtttgcctaagctagctgcttaaatcagccaaacccaccaacatttgaaggacctagaatttgttactgcaaactgtgtctgtgtttcaccttgttttgtgattctgaaagactgaaaccatgtacaaaactgttttgcactttgctgtaaagcaatgcgtaatgcacctatgaaccctgttg

SEQ ID NO: 201968 - DNA, 576 bp, Zea Mays
tatcttccttctgtaaagaggtaacaatactttcaacaaagacaaggcctaagaagctcatcttgcaaggatcggatggtcagaggtacacttaccttctcaagggccgggaagatttacgccttgattcacggataatgcaactgttggaggcaataaatagcctgttgtattcgtcttccgacactcgaagtcgaaatatcacactacggttctattccgttacaccggttagtggacgagctggactgatccagtgggtggaaaatgtaagcagcatatacaatgtgtacaaatcatggcaaaagcgttcacagttggcacatgcacatgcagaggcacaagtatcttcagttagcactggtaacattcacaaccctgttgcacctgttccccgtccaagtgacatgttctatggaaagattataccagcactgaaagaaaaagggataaaaagggtagtctcacgaagagattggccattagacgttaaaagaaaagttctattggagcttatgaatgagactccgaaacagattctgtggcaagaaatgtggtgtgcaagcgaagggttca

SEQ ID NO: 201969 - DNA, 1125 bp, Zea Mays
gaaacataaaaatacaagttagttgatcttgtcttagaccttatgtagatattgctagttaacttctggcacttctattggcagatctgtgaagacatttacatatgagtcactgaacaacattgcaaggttcataaatggaatgtcagcactcctattgacactattacctggaaaaggcaacattttagaagggataaatggctgggaacttaagccagcactccgtgggccgcgtcttcctcgttggatggaaaggtagtctaattttcttcacaacacttccattaaggtagaaatttatggatatgatgtgtttgtagcattgagaaacatccaatacttaaaaccaagcagataaatagcgagtatttattccttaagcacaatttctttacatgcatttgaatccacatgacctgttgttgcatattctctacgagttacttcctcccattgagaactattgttggttgatgcagagctttggatagactctatatcaatattgagacatggtaaatgatgtggtccagtttgtttccaatgcatactaaattatttacgtgaaatattttagcctggtgaaatatcccatcgccctgtatatttatgtttccttttattattagtattattatttagtgctggataatctaactagtatatgctttgttttcttaggtaacatagttttactctgttctgacaacttcattccttcttttgaacatagtggggtatcttcgtttaatgagttcatccatgaactttctgttgattctgatgctgattcaattgctgactctgtcgctggggacgatgatcatgaagagtttgtctgccctccgtctccattgtcccaaagttcacggttatcacatgcaagcagctttggtagacatgatcgtcgactcaggagacatatcagatatgcagtttcttggatactatggccattgagattctttgtttctttaatattcattttgttcaatgccattaaatttcggatggtaagatcaactgctaaaggtgctgaaactcctcacctctcaagaactggtcttgccaagaaatcatttcatataagggaccagtttctccaacgcacaactgatagga

SEQ ID NO: 201970 - DNA, 324 bp, Zea Mays
cgatcgatcagtgtttctcaaccattgttcgacttgaattagttaacacacaagtcacctaaatagcacatttttggggtctatcgtggaggcatttacacatggcgcaaaattccataagattacatttgctactggcatcaacaatacctaccgacctattattcaccatacgaacgcagttacacactgcctactagtttttaacataatcctcatatagctcggaattccaactactcactaacaataaatcacgcacgaccactaccgcatcgaccggttaatttatttggacaccgcctagcgtaccactagtatccc

SEQ ID NO: 201971 - DNA, 287 bp, Zea Mays
attggaatggcctcatttggacttaatatgaaatttctagggattaaacaagttctatgattatttttacacttaaaaattcatttattaaataaatttcctgattactctctgtttggaccgcgcgcatcataacagagaaggtcggggttaatcttgcaaaattaaccagacacaggattggttcgggtggacggcgggttgattcctagattcttcggggactcattagcaaattgacatgactgaaagggtaccgcccgctctaagccatccgatcccacgcg

SEQ ID NO: 201972 - DNA, 708 bp, Zea Mays
gtcagatgtatcccctaggaactgctcgttttgtattagctggattacatctgtattgctccaggaaaggcctaccagtaatccttgcaggagcaccatccactttcaaaccggtgaaaccgaactctatccctcagaataataacacggcaaagtacctttgagattatcttcatccattcatgacagtcactgcaaacctgcaaattctttgaaaccattatttctgtccctggaccagtcttcaggacactataagccactgctagcttctcactatggaaggtaaggttttcttctctttcctcttcggagacatcttttgttactagttcagtcaatggagcataaccttcaaccttagctcttctgcataatccatgcagcactacgtatatatcctcggtgtcaggatgagatctatcaccagctttaaattcatgggtgcttccccctaactcaacccaactcaagcctttggtcttcctaactttcttttgtttcctctgtttccatacttcctctgaatcattccatctatttgctgatgaatagatgtttgaaagaagggtataatccccactgccatggcatgccatatgctcaatagtggcctcacctagttttgtgtggcgatatctgcgacaggcgctaagtaatgccctccatatcacaacatcaggctttacattcatcgacattaccaac

SEQ ID NO: 201973 - DNA, 609 bp, Zea Mays
gtgcgatcccaagcgctcggatcctgatccgatggtccaaacgaatccagcatcgacccgagccggtacgcgctgtggtacgttagatccccatccaacggtttcacgcaactctgcccttacgtccaatttcaaccatcgatgactaatccaaccgttccccttcatctccctcctcccgagccgaggcgcggcggtgggacaccaaccgcggcgacgccatagctgtggtatgcacccgagtaccaaagtcgaatcggacaaaagccacacaactctacgaagctgtcgatcttaacttggaacttactggagaaaggtacgacgccaggaagaccgcccacggaacgatgcgggcacacgacgaagccattactccgatgcgaaattagtcgagcgcaggaggagaacatcgccagtgaatccacgagaatcttcccggaggctaggcgcatcgcccagatccgctcccagtgcatcagggatggcaaatcaaggccccaagtgacggcttccaacttcactgctcgaccggtgatgtcgaccaagctctcaaccttgcgggaagcctactgcaacctgatccatggcatggtggcgaggccggac

SEQ ID NO: 201974 - DNA, 344 bp, Zea Mays
tgaagatccaacacaagggccagcagatcatgtgaacagtaaagatgcacctatagtgaactgtggtaaagttcatgtatcgagggagagtaatgatgatgagcagtcgaatggtttacaatccagggacaccagcattattaattccaatgtgtcaagaagaccgtcgggccaatttaactcccagaatgaggttcttgaggaaagtgtttcgcttaatgaaggaagtcaagacaaccaaagttttagtggcgctcctaagaagtttttaaagaagacatcacatgggacaacaaataccgaggaagagatttcaggtcccaagattctctcttgttcagtgc

SEQ ID NO: 201975 - DNA, 1028 bp, Zea Mays
cttcttgcatatagtctctttgctgaatggaacttttgatgaagcagttggggagcaattggttcttaatgtccttcggacactgactgctctacttgctgaaaatgatgagtcaaaggtaacaaaatatttcgctatagttcatgcatgtgctacataaactgtactaagcaagtactttcaagcctgctgttaccattttggttgttcctggaaaggcacctgtatcttgttttcatggatgtcctcctgggttaccgttggcaacttaatccctgcagtgttgcataccactgtaccagcaacattagtgctgcaccattaccgtttgcgtgttggcactattcattggtacttaatctggcacatacatgtggtaaagttcataggcctacacacatggcacagcactaggtggaaattagactattagataggtctaattatggccttatgggtgtgagcacagcccacccaatccacctgttacacccaaccaaatcatgaaacaaagtgatgcatggattgggtaaaaacgggttggaaactaattggacccagggtcacctcactgtgctgccatccctgcatttgttggcctctctgatgttgcacttctttcctccttgtgattcagttcacagctcctatccccagtaggctgatgcatatataggaaggatggctgaaactgaaagcattcatttgcagccacagcggtaagtagtagaagcgaacaggccagcacatacaagcaagcaccccgctgagctgggtttcttttacaagggggtagttagtctaagtattggtctgtccagctctttactcgtgctgttatttgcttgatgtgattttaaattctggtttgccttatccaggctgccttcagattgctggtcggtgcaggttatcaaacactgcaaagcttgctattggacttctgtaagtggattccaagtcctaaactcctggatgccctacttgacatgcttgtcgatgggacatttgacataaatgaaaaagca

SEQ ID NO: 201976 - DNA, 364 bp, Zea Mays
caggtgcctgatcttgtttttcttctccccttggactgatctaacatatggtttccaaatctgtcggcactcttcctgcgatggacccttcctctcttgatagatcgatccgtttgagtagtctatgtacaaatggcatcatgcgaggtactcgagggaaccagctttgttcgtttttatgctcgtgcattttatatatgattacatttttcttgagcgcgagtggtctcatattgatgaaacgttgtttgattctagctatatttgtacaaattaggataggtatgttgcattttcactttgtggtcattattagtactttagtttttagtattgatcgataatgaacacaataactggacat

SEQ ID NO: 201977 - DNA, 629 bp, Zea Mays
cttctgcaaagggaggtgccgaggagcatggggacttttctgaacttgatcacatgggccgagcagatgctaaattgcatttacacttaaattctgaagtgcctgagaaaattgatgaaatagagtgtaaagaagtcgctggcactatgagactaactgggagatattctgatcagaagcttggagatgtgcctgaagttgggtacacagaagatgaaaacattagggggctggtagtgaacacaagtgataggaaaccttcagaagtctctcaagtcgagcctgcaaaactggaacattctaaggatctggtgaaagaggaaacagacaaatccgaaaatattcctggattagaatgtataggattggaggaaactcgtggagatttgatggaagagtgtgcaaataccaagtctgataatgttcccgaattagaaaatacaggattaggaggaactcatgggccaatagaggatactgatggtagactgaaggaaattcatgatgtcaatgcagaactggataaacacaatgtgcatgagagcgatattgatagatccgaggacatcatgcaaatcgatccactaacacaggataaagctacgtggctggcgaaggaagaaactgaa

SEQ ID NO: 201978 - DNA, 391 bp, Zea Mays
gcgggtggaggcagctgcgattccgacgaggtccacgtcggagggcgaggaggccgtgactggatctatggcggggggcgagtgggctgctgcagggtccatggtggaggagaggaaggtccgacgggatccatggctgggggtggtggagctggctgcgacggtatctacggcggggggcgagggtgtcccgacaggatccattttcgctgtccggcgacagcaacctgttgtgaagcaggcgggtctggtgttccactgcgcgaaggttgtgtcccggcatctggtggcactgtcgatccagtgaggatgctcttcattttacttcatctttcctgtgctcgagtatattttcctagttctactgtttttttggatgttcagtatgcag

SEQ ID NO: 201979 - DNA, 809 bp, Zea Mays
gcgctgcggaactcggggccccgccccgcccatcctgtcagctctgcccagccggaacgtgggcgtggggggctcttaaaaatcatggtgtcgtcttttaaggccaggccaattacatcattttcggcagaggactagggccaaattatatatgagcttctgttcccttccctttcggatgtgtacagttgtatccctacgcgtttgagtgtttatgatggcccctgcccttgttggtggatctggctagtgtgtgctgttgatgggggccactttacagggcactttcgtttggatctttgcgctgaaataggtggtgaggattgcgcgccgaggctaatcatcgacgtagatggaccttatttagtgctgtccatggccacgtacgaatggcccccctccctgcgctttacaggaaggaagcactgttttagcagtacgcgaaattaaaccctccatctcctcctactagtacacaaatccaatccatcatccgtcgctggatcatggtttttgaacgcgttcttccgttcccatcctataaaacctagcagccttattacccccactctgttttgttttttattttgttttttttgccacgagggtcggttacctgcactcatatcgctttagcttcaccacacacacaccccgcacgacacccccgaatctgcaagcgacgggcgtcgtcgcatgccttcgcctttaagcttccttccagtgatggggtatgcgcagcgcagggaagcttctccctttgtgctgctacgtcgtttctcggtggtggcaggcagtataccggccgg

SEQ ID NO: 201980 - DNA, 391 bp, Zea Mays
gttggaagtagcaagatctctcatgtttcagatgaatgtgcctaagtatctgtggagtgaggcagtaatgacggccacatacctcatcaaccggatgccctcaagaatacttaatatgaaatcacctgcagaacttctattgggaaagtgtgactttcgtgttccacccaaggtctttggttgtgtctgttttgtcaaagatcatcgacctatggtgagcaagttggatcctcaagcaatcaagtgcattttgtgggatattcatctactcagaaaggatacaagtgttgggaccctattggtaagagattgttagtgagtatggatgtaacatttcgtgaggaagacccatactatagaaagaaagttgatccatatcaaattctggagg

SEQ ID NO: 201981 - DNA, 491 bp, Zea Mays
tctaaagggagagagaagaggtctgttcgctagggggctcgatagagatggccgttgcagttgcaggtggtagagggcaactgttgcccttagtgcataaatagtaacaggggagggaagacgtggagtgcaccgttggagtactctagcgctcgcgggacactcaccgtcaccgagccagggagcttcggtgctccatccatgccatgcatcatcgggcgtacgtacgtacgtgccagccaaaaggatgcatcactgggtgctttgtaaagttgacgaaacgtacgcaatcgccgagctttgctttataaaggccatccatacatacatccatcatattcatatgtgtccagtccacaaatctacggctttccccagtccctcaacttccttttggcttggtttgccgttgccgaggcaggcatcttcgtgctcctctttttcttctttcggtcgggcccgcacccttcgctttccatgctactttttcc

SEQ ID NO: 201982 - DNA, 421 bp, Zea Mays
gagatggttgttgcagacacgtttggctcatttgctcagattgtcctgctgattcttggtggattcttgatagcaagaagtatgtaatgtattcattcagtcattgtttagtgtccagtgtttgggactcagttctctttctgcagataacatcaagaaatcatggatttggggttactggtcctcccctctgatgtatgcccagaatgccatagcggtgaatgagttccttggcaatagttggcaggtggtgatgcaaccaacgcaagcttgatgtctctgaagttcagattgacaactgaaatgggaaatgatataaacctttgtgcaggtcgatagggcagaaaacaatgacacgcttggtgtccaaatcctaaaggcacgcggcatttttgtaggcccaaagtggtactggattggt

SEQ ID NO: 201983 - DNA, 396 bp, Zea Mays
aaaccatgcaagcacctgcggttgaaaggatgagcagtgagatcactgttacaagagatcacgacgaagagcagcaggaggctctgcggcgtgcgatcatgctaggggttgctgatgtaaacatgccatcaacatatggtacgttcaacgaaaatcctacttctgaaccagccgaggcctccccattactatcagacagcggaaggcgcagggcagtatgggaggagtggatcgcaaggatcttcgagaaggatgaatcagggcaaatggttccacggagatgatcgtggcgacagctcaaggcatgcttgcttgatgggtcggtttcttgatgctgcttccactctgtttcgagcctattttgaaacttcggaacggtaatgtaagatgagtagg

SEQ ID NO: 201984 - DNA, 475 bp, Zea Mays
cggcgccccagtgcgctccgtccgtcccgtccaacgggtcgcgccccgcggatctgaaggacctcatcgctggcctctacggatatcagccgccccacaccgccgacgcggtcccgcaggtgaaggcggaggaggatgaccaagggtttggagacgatgattgggaattcacggcggcgacggggcaacctgctgctgatcaggatggaggcggaccagggcatgcggatggatttggtaagatcgaggtgagcctgccgcacaagttgtcgtgagacgtttggacctgggagatctcgttgccaaattgtcgtgagatgtttagacttggagtgtaatggcatcgactctatccaatccagtatgcgatccaagctctcaggactgttggggggagatattttgacatttgacacccaattcacatgtctttcaagatttgacaccccctatcacaatgacatacggggtcact

SEQ ID NO: 201985 - DNA, 314 bp, Zea Mays
ggacttcgtggaaggcctcccaaaggtgcacggcaaatcagtcatactaactgtggtggatcggttctccaaatatgcccatttcattgccctgggacatccttatactgcagcctcagtggcacgagccttctttgacaacatagtccgtcttcatggatttccactttccattgccagcgatcgtgatccagtctttacaggcagcttctggcgcgatcttttcaaggtggctggggtcaaactccacatgagcacgactttccacccccagacagatggacagtccgaggttgtcaataaaactatagcca

SEQ ID NO: 201986 - DNA, 416 bp, Zea Mays
ctcatccctctcgccttcaggttctactcgccctctccccacccgcagcgcctcctcccattcccccaacggacattgcctaggaggctaggacagaaccacccagagcgcacaaccttacccgaatcgccgttgcatggaggccgtgcgcgcgtcggcggcgtgggtcgccagtcgctcctcccatgtcacggtcgaccttcaaggtattgttgcggcttttgcccagctgtaaactttgtaatacaggattgctcacttcctgctgctgtgagatgtttacgggatgatggaattctagggtttccaggtgtccgctctgcagttgtttcaccatattcataccgattgcttgtgtactgtgttgcaataaaccctttcggtttacctatccatcttgacagcgtgtttcaaag

SEQ ID NO: 201987 - DNA, 342 bp, Zea Mays
gagagctagagtcagaacagtccagatggtagcaggcttcaccatggggctaaaggccatatgcctttagcttctgcttgaagatctatttcttggtgagcacattggcgccataggggcgtggcaacaagacccaggtgtggttcgccttaaaggcctcatactcctccagtcctcctacatggcatgcttttagttaggatcggtgagcgtagtacggacaaaggacaacttgggggagaccaccggagaggaggacgctaagagaacttggcagttgacatgctggaggacaccgacgacccgtgccagtaaccatcgggtggacatacctagggtcct

SEQ ID NO: 201988 - DNA, 446 bp, Zea Mays
ggagctgaggctgatgcaggagatattgctctatgttaggtaatgtttgataataatacaggcttttttccttctatttagcaagttactgagatttgccagtttgtcctaatgctgattttttgtgcagcttctacatccacaaatctgtgctagccgaaatggacaactcaccctgtgacatgctcgatcatgcaaatgttgatttcactcccagtcctctccataaattgcttagtttgctcaacctaaagccatccaacaaggttgcaaattgattgattctttctgtaaattttgcagtgttcttgtttttttttaaaaaaatgttgatatacctaccgtgtgcaggatgctttctcccttgacgatctcaccactagaaagctgaagcaaattctaagggtaagcaacaagccatcttgttgttttttactgttacaatt

SEQ ID NO: 201989 - DNA, 435 bp, Zea Mays
agacattaacaagaactggtatagcgtacctcctgcatggttgcacctacatcttctctcaaggaacatcttaaactatgcatgatgcctttttgctgtcattgttgttcttgtgtatgcagtaagagggatgatgtactatcgaaaagctttggagcttcaggcttttcttgatatggcggaagatgatggtatttctaatagcagtctgctgtggttctgaaatgttgttctgaatgcgggcttagtggcatatgtgataacttctgttcttgtctcattagatcttatggaaggttacagagcaacagaagtaatgcccgaggactcgcaattaatgactcaatgcaaggctatagctgacatgaagtttacatatgttgtctcatgccaacaatatggaattcagaagcgttctaatgagccttgcgcaca

SEQ ID NO: 201990 - DNA, 427 bp, Zea Mays
ggcaaagaactaagtagaactatgagtgtttatggtggatctattgtgcaaacagcaacaggaaaaggaaatccagggcgaagagatgccaaccttctgaattcaaacaggaaaatccaacaagattgtcatgtaaatctggaggtggaacaagaggaagtttgcaatgctgattttcaggagtcaaatgaaacactacaggatgaggtccgtaagttaaggagcgaagtggaaatgcttaggagcaaggagaaggctgtgttcaacatcaaatcctgtgatgaagagatcatgaaattgctggctaacatgcaaatggctatcatgaatgcagctctgttcaaagagaaggttcttgagctcatcataacatgcgagagttttgagataagtgccatggtacagaaggaggttctgaaggaagaaa

SEQ ID NO: 201991 - DNA, 862 bp, Zea Mays
cgattggagctactgacgaagatgaatactctttaaccaggtataggccaatagcagcatttttttaacctctggcatgcacacatgttagtttgacactagtatccttaattgtttttttgttatatattctgtgctccccttgtttcctcctaagttcttaggaagcctatttctatcatatgttttgccttatgtctcaggatgttgtgttttgaatatcaataaaaataaaggattggtttgaaaattgtgaatcacaataccagcgaaaggttgcccttgatttcatttcgagcaaagtaataaaaagtgatatttgagtcacctttcatgtgaagcaggattttttatgatataccgggatgcatgtgcagatgcacaccattttcataggaattcatgccatattatttttccataatgatttgattgtatatttcttatttatgattcctccaatcatatgtttttccaaccaatgctctcataaataaaagtaaaaccatgtcactcatgacttctattatgtttttccttgctttgaaccaagtattcatgcttctcgttatgcagctgtgatgatgattggtatgggcaagaggaaagcagcacactttccttcccgtcatactatattgatgcagaagtaacaatactcagataacactcatcatctctttccaaacaatcatactcctctgtcccacaaagttgattgtgtggcttgctctgttttattgcattttccaggccgtagtttgtttggatgatggtgattgcaagattcggaatggacttgtggcagctgaggatgattcaactttagatacatctattgcttgtgattcctgtgataaat

SEQ ID NO: 201992 - DNA, 305 bp, Zea Mays
ccgcacccaccagccgggtttaccgggtccgcgtggcgcaccgctcggggatcctggtgatgtgggcgggagagaagcctccgccgcgtccacagtttccgcccaagctcgccgtccatggaactcgggttccgattccacattccgtcgcaagccgttggggtcaacgcgggtttgtaggattccattctggtgttctgcagagcgctcggactccgctacggagtataaagccggggtacctcgtgcgcccctcttccattggcaccctggtgtttgaccgcgctgcacgagctaaacgccgc

SEQ ID NO: 201993 - DNA, 377 bp, Zea Mays
cgatgcacgtgacattttagcaagaagcttgatagtgaagatgatggaaagcatacgagagaggccggaaagggagcaccacttgcgtgtggagaaggcccatgtctatcaatgaatttatctagccaagagcttggtgctcatgtgtactacccttgcatggagctctaatgaggattagtaagaatcatgtgtgcttcttgatacctcggtaaaaatcttgacatgtcaacgggagtttgcatcactatcacaattaagcttctacatttacattcttacctttgattgcatgctttacctttcatagcttagttacaggctagttggtagggctagaacctaggttgcataacttcctttttggtagagatagc

SEQ ID NO: 201994 - DNA, 370 bp, Zea Mays
cttgcgttggctccatctctgcaaccccttgctcagtctttgcagctttaggaagacacactcaacaggggaggaagtagatacatgagcattccaattgtcagtgacagcatccaagaaaccaggtagtttgggccaaaaactttcgaagtgaaaccgcctcttcttctgaatttgggctgagactgaggataagaggacaatggtcagaaaaccccgaggaggcactctgcaagagtgaatcagaatagatgtcctcccactcagagcagcacaaaactctgtcaagccgcacaagagtaggggatgacctctcattggaccatgtatacttacgaccatgtagaggaacttctgtaatattggtatc

SEQ ID NO: 201995 - DNA, 449 bp, Zea Mays
cgcgacaataactgttctattgagtttgacgcttctggtttttctgttaaggatctccaaaccaaaacggtccttcttcggtgcaatagcaacggggatctctacattccacatcgtctgctgcctcgctgccatgttgttgtcgttgctccggagttgtggcatgctcgcctcggtcatccagcgtcagccatcgttcaaaccctaaataagctttcagctatacggtgtaataaagcagctcgccacatttgccatgcctgccagctaggcaaacacgctaggctgccttttgctagttatgtttctaatacttctgcaccctttgaacttgttcattgtgatgtctggacctctctagtgttgagtatttcgggctataaatattatcttgtgatacttgatgattttactcatttttgttggacattcccccctgcgccataaat

SEQ ID NO: 201996 - DNA, 347 bp, Zea Mays
cgttgatgtagtatgggttgatgtttcttggggaggatcactgagttgtaaaaatccacatgctggagcgtccaaaaacggttcccatcaatcctggcatcacgaatgcgcaatgcaggattctggaaacggatatcctgaaggagagcagaacctccactggcagtgaaatcagtcactggctcattgccagcacgccgagcctccgcccggtggaggaccaaccctcgaataataggggtgtgggcagggggaagatcaatttcatcatctttcccgccctcgtcatcacttgttgcttcccaagtctgtggatttgtcgcgggtcgggaccgaccggagggatt

SEQ ID NO: 201997 - DNA, 422 bp, Zea Mays
tttggggagagagaggagttggacgcgagatcgtggagaaggatgaggctgaggaaaacagcggcagatgaattttctaaagacgcatacgtgcactagataaggattagttggagatggacatgtagaggcaagaaaattcagattttctcttctctcttttctatacaaatatacacagataaatacaatttcagcaactaggattttaaagatgcattgggtgtgagatggcctccggcggcggtgattcttggggttcggagtccatgattattgggcggcggtggtcgttcccgagggaggcattgggtgtgtatggtgagaaggcgtcgcgggatggaaacaaaatgatagcgatttgtatatatcatcaactcaaggtgatttcactatttgctacatttttcatatatgtcttg

SEQ ID NO: 201998 - DNA, 355 bp, Zea Mays
caaagggagccacgagatcaagttcaagaagaaagtcttactcgagaagagagtcgatcgtgggccgggaggggttgataaggggaaatttgtcctggcgaagatgacgtgattagagatcaagaaatgatgagtggtgaggtcaggacaccggtaccctttgtgatcaggggagtaatcgaggaagacacaatgggtggagtgaggggaaagcttatgggaagcagtagcaaaaaggttgggaagcatgcacacccaaagacgcaaagatgatcataggatggagtggtgccaaaaagagcagagaggggtgttgaagcgcaagctgccttagtagtaaggcgattaagaaaat

SEQ ID NO: 201999 - DNA, 609 bp, Zea Mays
gttgcatatcatcatgctggtcttacggtatggaagctatcttctatcttcataagatacacaaaatatcaaatatatatatatatatatatttatttatttatttgaaatttgcactgctaaatatctgctaagtggtgagagtggtctcactaagctaccaggtcgcgggttcaaagcaaccccttcacatttgcgggggaagggttgccttagttttatcccttccctagaacttactcacatggcctccgtcactgggtctgacctttacactgctaaatttgataaagtgatgccatttttacctaaccacagctgggcaaagggtggtaggaactgatctgccattacctgttctgattgatccaatgagcgtcatcgccttctgttctgtggcaggtcgaggagagggagattgtggaatcatgctaccgtaaaggccttgtccgtgttctgactgccacttcaactttagctgctggtgttaacttgcctgctagacgggttatattcaggcagcccaagataggtcgtgattttattgatgggactcgctatagacagatggctggtcgtgctggtcgaactggaatagacacaaaagga

SEQ ID NO: 202000 - DNA, 364 bp, Zea Mays
gcgagagcgcgagcacgacggcgagcatgaggtggaaccaccactgcggcacgggcttgtagttccgcctcatgatcctcgtgtgcacgtcgtcgacatctgtcttctggtgctgccgcttccggcagaggccgtcccagacctcccttccgtggtagagcgcgacgtgcgagagcgtggacatgaggctggcgaagccgatgccgtagttgacagcgaagagcacgctgacgttgatgcggctgtaggcgtcgtagccgacgaggttgagcgtgaaggtgtcgcggttgaggacgcggccagtgtcgtagggccttccggcgtcgtcgtagacgtgcggcgagatgagcgggaagcgcctggc

SEQ ID NO: 202001 - DNA, 399 bp, Zea Mays
ccctccacctagcatgcccgtcaggccctctcttcgccaccctgccatggagctcgtcccatgcccaacgccggccaacctcacttcccatggtcgtcccttcctccttcctccctatggtcgacggcctcaccttccatggcttccaagatctgctcaacatccattctagcgcgcacccctgcttccgtttcctggtggccgacgccccctccctggagctcgcccttgctcatccactcgtcctcgtcttcattgcgggcatcagcgcccttcgcctcctgccggtgagcagctcgccgccggtcgttgcgactccatcccgcttggtcacgtttgtctcgctgctccttccaatcagcacctagcgctgctcatcccgtcgttgatctgcgctcc

SEQ ID NO: 202002 - DNA, 439 bp, Zea Mays
gtcgcgatactcactgactgacatactaccttgcttcagcgacaaaaaatccttctttatcttcatcagtccaacaagaatgtgatagtttctgaaatgagtagcaaattctgcccaggtgatattgttggcaacatcatgagcagcagtataagaatcccaccaatcagtagaggggcttgtaagacgaccagaagcataatgcaccttctccaagtcagagcattaggtaatattcaacatcttctctactgactttagccaatcatcagcgtgcagaggatctggagagctggcgaatgtcggtggattttggctcatgaactgccggtgcttctcccggggtggaactggtggtggtggaggcatttcttctctcatcttctgcctttcctggcacatctcttgacgttcctgctgcatctgagcttgcatatcc

SEQ ID NO: 202003 - DNA, 565 bp, Zea Mays
aggaaattgatagttgtgacagccatcctcatgattcaaatttgcctgctagttcaagcaaagcaccacaaataagaagacaggtaaacgacatgctctttatgattcatatctgctgcatctcatgctagttagactagactagatttgaagtaatcattttgcatcctgaactcccaaaatgggtgcattgactagaataatgcacatactggtagtaatatgatcctactttctgcagatatcacctaacgtggaggcatctaaccgttcctccaacaaagataccgaaggtgatagtaacgatgagctggcagataagtctgagctctggcgtcctttaaattgtttagtagaagctgccaacaggacaaaatcctttaggtcaagttcacagagtccagttgttaagggagagcaacccaatggctctacgagtagtacatttgctagcaaagcaaaggcaagggagaatctggagaagtccaaaattcaggatgacaaaaaagatgttcccatgccaccagtgctgccaaaaagaagagctcaaggtactgcgcggaag

SEQ ID NO: 202004 - DNA, 273 bp, Zea Mays
gaaagcctcatgccagcacgcctgtggctttgctgtcttcgccaggtagggcaattatgtcgggcttatcttcttcccccatcttcacgcaactgagtctgccgtcctcgcgggattgttgcgtgctgcgtgtcgtgatcctctcgtggctggcaataaaacccaattgcgtcgtcctgtaacccatcggtgctggcgggcggaaccacgaccactatcggggctacggccgcacagatttctcctcgtgctgtctgcccatctcacaaccag

SEQ ID NO: 202005 - DNA, 319 bp, Zea Mays
ccgtcccatcatcgccggtgagctcgccacgactgaggacacgcacccacggcgctagagtcctttcttatctccggccgccgcgttgttcgatcaaattgagtgccaccgacaaagctgcctataaattgagcccgtaactagctttgcaacatcattgcgcacccccacacctagtattgctcccagccgatcactagcaagctccaatttcgtattcccccaaatcagtcgaagaacaccgtgaaaccaagttcactgtggccagcctgttctggtaaaactctgcccaattcaaaccttgtttaagtgctctcgt

SEQ ID NO: 202006 - DNA, 398 bp, Zea Mays
ggcgaaattacccgcgaggctccccgcaacacgacccacatttcggcacgcaggagagcggaaggcgaacgcagaccaaccacataccctccagaagctcacctcgacggcggagcagatcgggcgcgcccgccgagtcccgtggtccacccgatcttcggagaagcagattcagcggacagccccagaccaggcctccccctcctccctctgggctccgcggacggaggaactgccgggggccgccgcctgcctctccctcctcttccgcccgccggagccgcgcctaggagcgaaggaaagcgagagggaaaccaaaactagaccagcagaagggagagagagagggacgggggggggaggtggttgggtcgctgcgactctgggtgagaggaacc

SEQ ID NO: 202007 - DNA, 276 bp, Zea Mays
attgactatgcgatgggctaataatgacagcagcatgggcgactaggcagcaggctagcgacagtgggcttatgactaggtgacgggctggtggcgatgattgggcgacaacaatgatagggcaagcgttgagcaggggttggacgttgtagacctgtggttggtgtcttcttctgtctgcctatgtttcagtcgatgtgggttgtggtctaagatggtgggctataccgtgtgggttagtgatggtatgtcgtggtgatgtttatctattttggc

SEQ ID NO: 202008 - DNA, 584 bp, Zea Mays
gccaattacagaaggccctgatatttgtcaaattgatggttgtagtgttaaattggaatacaagaggaggcaagtcaaatatggtttgtgtgacagcacgttactaacttactctactatatctgcatgagaaaggatgaaccctgtttgcatgtatactaattaatctacggattcattaatgtgtgaataagattttatttaattatgacagcaaacgtgacatgccattacaatttcgtttatgcaaaaaagtaagttgcttatagtttagcctttggtttcaatttgcactttatagaattatactggcagagctcctgacggagcacctgacggagctcgccacaggtaccaaacggcgcagcagcagttgatgtgcaacccgagtgtactgccgctcgaggaggccagtaagtgccaacaacatgaatagccaaagcagggaaatagggctggcgggggcacatgggtaacttggtcctggagcattggagaaggagcataccacaaggaaaccaacacggtcagtcaaaaccaaatctagataatcatcatgctacttctatgttttatgtctgttt

SEQ ID NO: 202009 - DNA, 617 bp, Zea Mays
cccacctgcaacaacagtagagcaaggcaccgaaaccatatcgtcgtcgaggagaaagtcatgggaggcgtgggaggaggcgtctgaggtggctgcaaaggggaaagtggtctcgtcgaatatgacatggcgagaaatgatgatgcgacatgtcgatagatcgaggcaacggtaacctttgtgcgaggggggatatccgaggaagacgcatgtcgtggagcgaggggtgagcttatgtttggaggttgcttgcatgttggggtaacagaggcacccaaaaacacgcagatggttataggttggtggctgattatgtagacgagtgtatggaatgtcatgctgaatggaggaggatgggcgcctattatgaaggtagcaggccgtcaggagtccctcggccgaatatgcgggggatagggaggcatggagaagcatggtgcgaatggaattgttgagtgtgcggatgatgcgttcggctttgctattttggggtgatgtgtagggacaggaggagcggaggtgagtgccttgagcagcgaagaatttggtggtggcagtgttgatgaattcagccccgttgtcagcctgaaaacattttatgggagagctgaattgtg

SEQ ID NO: 202010 - DNA, 309 bp, Zea Mays
aatttgacataaaccccactgggaactgtctgcccacgatcatggcagaaaccgggttcacgagtacgcgttcccgccaaatcatggccgaattgagtaaacgggtgccacggtgagctttaccagcatgcagagccacggaaacaacacttgaattggataggaacttaccagagcgggctggccacgatcgggctattcttggtggcgcggctgaccgatttgggggaaattggtgattctccggctatggtggctaatcgagggtgggagcaggtgcttcggcttcgcaaagaactctagttttac

SEQ ID NO: 202011 - DNA, 424 bp, Zea Mays
ggctatatgggattctcagtcagaaaaaggtacaacaataaaaggaaggttgatggcaaaattacatcatgtcgttatgtttgttccaatgaaggtcatcgagcacgagacaaaagagatcatctagtaaaatgtcctagagctgaaactagaactgattgtgaagtccgcatgtgtcttaaaatggagggagagggttatgtagtatatgagctatttctggagcataaccatcaccttcacttggcagagacctcacatttaatggtatcgcaaaggaaaatctcagaagtacaagcttttgaaattgagaccgccgatgattctggaattgggccaagagccgcacacgagttagctagtcgtcaagttggtggatcatttaatctgagctatacacgtcttgatcataaaaactatttgc

SEQ ID NO: 202012 - DNA, 277 bp, Zea Mays
ccaggtcgtcccagttggagatctgcgcaggaggcagatgctccagccaggctcgggcggcatcggagaggaacagggggaggttgcggatgatgaggttgtcatcatctattccacccatctggcaggccagccggtagtccgcgagccacagttccagccttgtctcccccgagtacttggtgatggtagtcggggttcggaaccgggtcgggaacggcgcccgtcgtatggcccggctgaaagcttgcggaccgggtgggttcgggcgaggggc

SEQ ID NO: 202013 - DNA, 695 bp, Zea Mays
ccggatatcagtatggttatggatattcttcatttatttggttcagcttcaggtctaaggactaatgtccagaagagcagtgtgtttccaatctgctgtggggaagaataggtgaattgtttacaggacttgctgccatgcaatatttcagtttttccctgtaagtacctcggtttgcctttgtctcccaataaactcacaagggaccaggttcaagccattgttgatagagtggccagccttttgcctggatggaaagctgaacttatgaccagggttggtagagctattcatgtgcagtttgtcatgacggctaagatgatttatgcagctctggcacttgaccttcctgtatgggccatcaaagcaatcgataagctgaggaagggcttcctctggaggggtaggaaagagttctgtggtggtcactgcctcttggcttggcctaaggttacccgtcccaaggagttgggtggtcttgggattagtgagttaaagaacctctgttgggctttgagagctcgctgggccatggctgcagaaaacggaccccagtaggccttgggcggacttccccattcatgtttgtaaggtggttaaaaatctgattgctgcagccattattactaagctcggtgatggagccaatacccttttctggaaggacagatggttggaggggagatgtattaagg

SEQ ID NO: 202014 - DNA, 417 bp, Zea Mays
cgcaactgcagatgatggtgactgaccaaatggtctccgaccgaatacgctcgaacagcgagtcaggttcttcttcaggccagggaagtcccattttcatacaagaaaccagctcgctggcagaaccgtaccgtctaaacctatctggagacgcgctcgaagcttacgatgaagcttacgaagagttcatgaggatcgcggactccccttacaccacaagtccaaacgggaagccacaggcaaccgaagattgcttggcagaccgtggtctagtctggggaatggaggacagctctaggaagctgagagaagtgcccacctgggagagagctctaaggagtgcagatcctagcagagatcacgagcgcgatagggatgagtcaggtggcgacgacgacgatgacgactgtgaagtgc

SEQ ID NO: 202015 - DNA, 404 bp, Zea Mays
ctaaaacgggagggcagagggtatgagcggacctgagacacgctggccacggcgaggtcacaaggcacggtgttcttggttgatttggggaaaatcccgaattggagctctctggtggaggatctgaggtacgggtgggtgcgctagatgcctgaatacatagcgaagccgatggcgcactcaatttataggctccgggggcggtggcatccaatttcacgaagaggtgctggcggccggaggggaagaaggttactggcgcgcaagcttagtggctttcaccatggcaagctccccggcgatgaacagacggctaatgcgagtcacggtgatgcgatggatgtgccaaggcacgtggcgcaaggccgtgaagcgactgtttggtacggtggccggagtaaaat

SEQ ID NO: 202016 - DNA, 546 bp, Zea Mays
tcaagcttgaccccttccagagcgtatccatcgcttgcctggagcggaacgagtccgtgcttgtctccgcgcacacttccgcggggaagaccgtcgttgcggagtacgccattgccatggcgttcagggacaagcagagggtcatctacacctccccgctcaaggccctgagcaaccagaagtacagggagctcagtcaggagttcacagatgtcgggctgatgactggcgacgtcacgctccatccgaacgccacatgcctggtcatgacgacagagatcctcagggcgatgctctacaggggctccgaggtgatcaaggaggttgcctgggttatattcgatgagatacattacatgaaggatcgtgagagaggggtcgtgtgggaggagagcatcattttcttgccccctgccatcaagatggttttcctttcggctaccatgtcgaatgcgaccgaatttgctgaatggatatgcagcctgcacaagcagccctgtcatgttgtgtatacggacttcaggcccacaccattgcagcactata

SEQ ID NO: 202017 - DNA, 348 bp, Zea Mays
gggtcttcggaagaggacttggattattttgcagcgttggatgtggctgcggcggagactcctccgcgtgtgatgggtgctgaggatcatccgggtgtgagtgcttggcataggcggcgaagagcggtggcgaaacggagagtgggtgagttgtcgcgaggtgagaggcgtcatcgtggtgagatggagggtggttgtcttcgtatggatgggactggcaaacgggaattgttatcctcgccggctggggcgagtgtgggtgagggggagctgcgaagtctgtttgcgggtgaggaattgaggataatgttgttcaactatagggagatgggtatcatcccgaaggtt

SEQ ID NO: 202018 - DNA, 283 bp, Zea Mays
tgaaccaatttcagtcaccagtaacctaacagtccatttccagtctctccactttttgtgtaggatcatatccatcacccttaacgacatttgtacaccaacttatggtcttcaatttctctatagaaattatagttcaaaaccttatggattatttaccacgaagctccaaagtcagtcacaatcactgaaattcagacttagataatagtccaaatctgaaaattcagaattcagccaacaccactttgaaccacctttactcctagtagcatatgatttt

SEQ ID NO: 202019 - DNA, 291 bp, Zea Mays
gtaacaaccgaggcggctgggagatccgtgtttagcgcgcgagtctgttacagccgtggagtagaagattctgttcaatccagacccataagcagcgacccaataggcttaaagcaggttcgtgaggacttgcatgctgacctcattatgatggtagggtgacgcaggctccggcaaggagaataaagaattgataaaaattaaatatgatcgtggactgctacgtggagtgggctgcgcggtaaatggagggctgggccgactgcagtggcttggtaagttttttttttc

SEQ ID NO: 202020 - DNA, 467 bp, Zea Mays
tttgcctggaatctaccaccacataggtcattttctgaatttgtgtcgaaccctcctgctagtgatggtagtctgggccttagagtgcgaccctctcccgacgacattgaggctctgattgccccatttcgaagtcttccagatgatgagaggtagactcattttgagatgccagctagcacagacgatgcagagatagatgttgtgcttagtatgctggctggggaatcatattactcgacccatgccgagccaatggctattacagctggacaagaacttggcaaagcggtggagactcagaagcctgaaggtgctcgcccaaagtgtctacgccgagttagccgctcgactgcacctgttgaggaaaagaagaagaagaggcggcttcggcgactgtcatgcttggaccagggtgcaggtccttctgctccggtttgtgatgaggtgccagcagaggtccttcc

SEQ ID NO: 202021 - DNA, 439 bp, Zea Mays
aggcgaggaaggaagaaatcgacgaggggattggattggactgcgactgttgttgattctctcttgcacgcggcggtcctcctccagagtccagacccaatcccaaatccctaatcctacagagggatcccaaatccggcgtccagtccagtccaacctgtagtagatatccccgccggcttggccgtccgtccttgccccaattccgattgaccggagaggagttggatcagggagcattggaatggccgccgccgcataggatggagctggattcctccggccgctgctcggttgctcccgtgaatgctgtgatcgtcgcgattggaggtggaggcgaaggttctcttcagtaagagcttcaagagctgtgatctagctgattgggtatggaggagagtggcggcagctgcggaaagcgggaggacgcggcgccgcc

SEQ ID NO: 202022 - DNA, 310 bp, Zea Mays
atcaaccttgtccaggtcacgctcttgaggttatcagtcgatcagtttttgattcctagctatagcttcaattcaattcttgtcgatgatatacgaatttcaatatgaaaaatcacgatacgtactagagccatgcacgaggaggagaagcgtcccaggggcggtgtgacgcgtctccagttcttcgtcatcgtcgtcatctgcagcttcgcctactacctcatcccgagctacctgttcccgtcgctgagcaccgtgtcggtgctgtgctggctgtacagggactcggtgacggcgcagcagatcgggt

SEQ ID NO: 202023 - DNA, 373 bp, Zea Mays
cttgcttcctaagagtaatggggtgattactgttcaacaatatcgaccgatatgtctcctaaatgttagcttcaaaattttcacaaaagtggcgactaagaggatctcggtggttgcgcaaaatgtaatcagtccattgcagacggcttttcttcctggaagaaatatcatggagggtgtggtggtcctgcatgaaaccttacatgagcttcacaccaaggaaagagatggggtcattttcaaaattgactttgagaaagcgtacgataaggtgaagtggagctttgtccagcaagtccttcgtatgaaaggattctcagatacgtggtgtagttggattaagacttttatggaagggggtcatgtggcggtt

SEQ ID NO: 202024 - DNA, 291 bp, Zea Mays
tctagtcttcttcatccttcgtagctccattgcctgctgtaggagaccgttcgtcagcaaggttcacggaatgagggggcctaaaaaggttcagctccccatcacgtccttcatttgctgttcccgatgatccggctcctattgcagcaacgtcttgaggcacgtccaggtgcagtcgagcatacaatacatgcacttcttcatgtaatgtattacagtacacttgcaggctttcgagggatgctctaagctctgccacatgagctagagctttcgcttcgcagtcccaag

SEQ ID NO: 202025 - DNA, 383 bp, Zea Mays
gcgagtggtcttaccagtgattttacacgacagcgagcagtccacggaacgaaggttgttccgccccagatttgaactccggcgagcacacacctgacccccggtcgccaaacctccacagcgagatcccagatactatactcagggcgcgacggggcatccacacgacgtgacgacgacgaattggcggattaacggcggcttccgctgcgctctctctcccgtgggcaacagcgatggcggcaagctggatgaggtgagaagaaaaggtcgcggggcccaatttatagcccagggcgaggacgagctcggttaggcttaccccgagattcaagcgtggatttaggggttgttacggcatcccctgccatggctgttgtccg

SEQ ID NO: 202026 - DNA, 948 bp, Zea Mays
gaaattgaagaagcggaagaaaggcaaggatagtaatgattttgatgcagtggctgaatgtggacccgaggttccggcattggttcaacaggaaggtgaacgggctgttgttgatataggtgatggtgttgctgatgagaagagcaatttgaatgtcgtgaaactggagggtagtgatgtttctgggaattgtgcacagggtttggatgatttggggttgaaagactccttggcagtgctgtttacaagacctggtcggaagtcacggcaggtctcagaggaggcagaaggcatggaagtttcttgtccgcatgatgaggatggtcttaacaagggatctggtttggctccagacacagcttccaagggcattaaaaggagaaggcgacgcacaaaggaagagatgaagaatgcttctgtgcaggatcagaaagcctcattgcctcggaaagcaaagacaaatggtagcaagtctactaaactctataaggtcggtgctggtcctgggcaagctttgggaggattgtcttctgtttctcctcaactggaaaagtctgggaaagagaatgctgtagatgatggatcattttaccaatcattaggtgaagtgcttctacaagatgtggaagccagcaaagtactgaaggatggatcaattacctctttcaatggggtcactgatcactttgaaatctcagcttgggcaagcaatcaccctgggctggaatctcgttcaggaaatcttgatgaaaaaacacctcgcacagcagaacatacgaccaatcttggtgtttctgatgcacacacacgttcccaaacgctagggaaggaaagcagtgatgatgttgattgttctcaaggcaagtcaccaacatcaaccataaaaaggaaaattggtctaaaaccaaaacaggttcctgggaaatctgttcgacgaaaagaggaagt

SEQ ID NO: 202027 - DNA, 376 bp, Zea Mays
ctgttggaggaagaggtccccggagcgaggctcaacaacaatccccataaagtggtgaagggggctcaaatctttcatggcgaacttatgctgttgagtggtgacaatccagtgcagtagagccaaagaggaggaagtgagcacaatgtcatcaacatagagtaggtacataatgtcattgccacgccggtagatgaacatagatgtgttcgacttggcctcaacaaaatcaagggtgagcaagtatgtggcgaagtggttgtacctgttagactgttgttagggcttagttaaggtttcacatattccaacatggtatctagctaggttcctttcttccccaccttctctccactcaaccgccaccgtcttcccc

SEQ ID NO: 202028 - DNA, 368 bp, Zea Mays
cacaaatgagaaaatccacaacatcaaactctaagtgagaaactagggcaccaaggagccaaagctgaatatgagtggcagcctccctgtaacccatccgtggcagaagcgtccgtctcataagctgatataaaaacttggctgctgtggtgaagtctgccggagaacgtcgtgacccatctgagaagggcggtcggaacagagccgcgacgtgagctgtaccaggagcaacaccgccgtaagggcgacgaggaggatcagaggtgccatagcacaagctatgtagacgagtcgatgactcaggaaatccaaacaactaatgaatctgacttgcatgaatggtaacatcctcaagctcaaatcggaat

SEQ ID NO: 202029 - DNA, 575 bp, Zea Mays
atgaagtgttataacagtactccgcctaggacaaccactgtaaccatgtgtggggtcgatccccagctaagcatcgcaagtacatcaagatgatccggttagtaacttcagattggccatcagactgtgggtggaacgctgaactcatctgcaacttgacccctgtcctggtgaacagctcagtccaaaatgtactagtgaaaactggatcacgatcactgacgatggagcaaggaataccatggtgacgagcaatatgatcaaagaaagccttagctaccgaagatgctgtatagggatggctgagaggcacgaaatgagcatactttgagaagcggtccaccacggtaagaataactgatttgcctccaacctttggaaacccctccacgaaatccatggctatatcgctccaaacccctgaaggaaccggaagtggttgtaacaaacctgccggatgaaggtgttcggacttattacgttgacagactgaacagcccttgacaaaatctcttatgcggctggcagcaaggggactatggaaggaagccctccagcggttgagggacttttcg

SEQ ID NO: 202030 - DNA, 535 bp, Zea Mays
tgaaagcttttccaaaatcttgaggtaaactgtgatcctctatcagaaacgatcttcttcggtacaccatgtaaacacacaattcaagccatatataactctgccaactgagaaccattataagtaaccttgaccggaatgaagtgatccactttggtcaatctatccatgatcacccatatagaatcataaccctttgaggtgtgaggcaacccggtaatgaaatccataccaatttcttcccacttccattcgagtacctttagcaggtgtagtagtccagctggtcttttgtgttcaactttgaccctttgacacacatcacacatagccacgtgtgcagccacatctcttttcagcccataccaccagtacttttgcttcagatcccgatacatcttagtgctaccaagatgaatagagtaatcggagtcatgggcttccttcagtatagtctcgcggagactgtcaatctcaagaacacatatccggtccttgaaccgtattgtgccttgctcatcctccataaattctg

SEQ ID NO: 202031 - DNA, 375 bp, Zea Mays
acgacgtggacgtggctgcgtgcaggtcaaagacgaggtggacatggtagagcggaacagagacgaggagatgaagcggctgcagtcccagggcgttcacttcgacttcggcgtgctggtccggatcaaggagggcatggtagacctgtcgtccgcctgcatggagctcgccttgaaggagagccaggacgccagagagacgccgacgccgacgcgtgcgaagtgggcgagcagccacggcgatggagagtcgaggatgctgtggcgggtgttccagctggccttccgggtgtacaacttcgccggaggccaggacgagcgggcggacaggctgacgagcatcctggcgcacgagatcgaggagcgagcgctcct

SEQ ID NO: 202032 - DNA, 326 bp, Zea Mays
ccgacttctacgagggcctcatcgcgctcgggcagcagcagttcgagcaggccaagctctcgtggcgctacgccgacacgtgcaaggtggacatgggaaccgaggtgctggagctcttcaaccacgctgaagacaacatggagaaggggatggagatgtgggaagggatcgagtatctgcgagtcaaagggctgtccaagtcgaggaaggggaaggcggccgcggtggtggacaagctggtggccctcagtgagcagggaaaagatctgtcgccggatgaagcctttgagcaggcatccaacatgcgctcgcagctcaacatctcg

SEQ ID NO: 202033 - DNA, 473 bp, Zea Mays
aggggacccaacactagtgatctccttacatgccctcacgagtatccattctgagagtaccttgcagctggaagtacatatcatggggaaagctcttacagccctgttggacacaggatctactcacaacttcatcaaccaagacacggcacgctctctgaaactggactaccagccaagcccagccctccaggcatctgtggccaatggggataaaatcatgtgttgtaagctctccaacagcatcagcttgactatcggccaggaagactttctgatggatgcttacgccatcccaattgattctttcgacatcattgtcggggtcaaatttttgcgcactttggggccaacactttgggacctcgagaacctgtgcctagctttctggagaaggggacaacagattgtgtggaaaggactgggatcagaccggaaggccattaatgtgtacccagcagtgagaacaatta

SEQ ID NO: 202034 - DNA, 517 bp, Zea Mays
ccctgagccatttgaatcatggatcatcttctttgcccctctcagtccttcatattctcttctgagtgcatccctctcctccctgaggctactcatctccttggagagatcttgcccacgccgactctccttcacaatttgctttcggagagtctgcaactccatatctgagacatccaatttcctggttaaagtggctatttcacttcttagcttctccacgtcgtcatcctcccctcttaaccctgcctcaccagaattgctcgttgacccatctgtactagcatcaggagctgagcttcctgaccagtcacccgaactggtcaatgggttcctcacagtgccattgttggcaaatggtgagagagcattgctactatcctgaagatatgagttgtgcatggtcgcactaattttgggggtatatctcccagaacttgcatctgaacctgacaccgagacagcatcgaaactgctgccattgtggagatggcccactgggtcaacagacataggc

SEQ ID NO: 202035 - DNA, 280 bp, Zea Mays
gtggccaaaggaacaaaccagaggtggtaggtctccttttcctctcatttccaggagagcgaccagtactctgacatggctcatggtccattggtcagcagtttatagaatcgcaaatggagtgtctaggtatgggacaagagcacaggtatcacactggaatcagttttgaataccaccagaggtaacagcaagtagggaggtaaagccaagatggccaaaaaggagaagcatacaggataaattctagtatggatgtatgaagcaagtgcaaacgtaa

SEQ ID NO: 202036 - DNA, 521 bp, Zea Mays
ctggagcacatccatttgcctgtgagatcctggaagacgaggtgccctccgaacctctcaaccttccatctgaaggttttccacttggcggcctaaaagacgcagagccatcacgtttcctcagtgcttcattaagcttctgtgacctttgttggactcctatgagctctcctgggttgtaggcacgtgcagcatttgtgttcccaacatcgtgaactctgtaagaactgatattttctactccaggtctgatgatccttgatgctgcttccattatatcagctgcattcctgctggatatatggttagggtttttcatgggagacagcaacttatactgtgcgacagatagtgtcctcttggcaagtcttggaggcagtgcttccattttaaaccgatcaataggactacccggcatcttaaggggactaccaacataacttctgccgatcaaatcctcgtggctgttgggttggaaagggggttgcacagttaatggaacgggattggattcgggtgag

SEQ ID NO: 202037 - DNA, 303 bp, Zea Mays
cgctgctgtcctgtactgggagctgcaggaatcgctggttgaggtgccggtactggtacagacgggcgttggggttgacgcatggtcttgttggtggttgatgtcggctggtgatcgagcacttgtgacctccgttcatatgcgcgcgccaaactcaaggcgtgattgatatcccgtggtgccatgagttccacgtcgatcttgatacgctccggaagtccagccgtaaacagatgtaccttctgctcctgtgacagtggagctgtttgggctagcaggtcccaaaacctctcctggtagtca

SEQ ID NO: 202038 - DNA, 311 bp, Zea Mays
ttaccgggggtcgatggccaaggaacgttctgattccccatgcgaccggtgaggacatatttacgcctcgtatggcccatgaattaaagatttttccttacggatggaatattgttgttgttgtatcagtagtgatggacaaggatcgttcaggacaagtcggctgcggaaaacaagagccgcaggctggcgaagaggttggcggctgcggaggccgagaaggcggatcttaggcgtcagttggcggaggagaggagggacgcgaacaaagcttgtgctaaggcgcagtctgcgcaagccgaggccaagct

SEQ ID NO: 202039 - DNA, 353 bp, Zea Mays
accaaaagctgaactcgcacctgacagagagagtttgaacacaatttactccaacaccagtgcatcaacctacaacagacctgtaccaagattgctcactgatacaaagtcttcaactttgttttaatggttactatcaaaagctcaactgacctcaagttatcgagcaccaaagttggggcagcaccagcgaactcaacaattcagcctagctgaatttggttcagcacaccaatgtctgacatagcgacttggagcagcattttctcccctttctaaacaagctcaaggagatgaaacttaatagaagttactcaccacactaccctctaagacttctctgtggagagtgc

SEQ ID NO: 202040 - DNA, 369 bp, Zea Mays
gaagaaactgttgcaactgccgaggcaaccctggccacggtgcctagaaaaggggagaaggtgtttaacaaagagaagaagattgccgaagatatttcggaggaaggggacttcaattttcgaaacatgattgtcaggagttatccaaggctaaaaaagaagaactaagagattatgctatatcttgcggctaccagccaggagcattgctcttcggtggcgttgacgaagagagcttaggatgcctccgggaccggactggagcgaaggttgtcagcactctatcaaagagtgttggctttccgaagcttgaggccgacctcagcagataccggcggcaacatatcgccggtagcttgttttattcta

SEQ ID NO: 202041 - DNA, 754 bp, Zea Mays
aaagattccgaacactatttaacctaccaagtgcaatccgtgggaacattagaaaaggagaatatgatcttgctgtcagagagtaccaaaaagcaaagtcaattgttcttccttctcatgtatggcaacttcctgttttgttttatctgcctatgttatccaattggatggtgaagcatgcatgcatgaatgagcgcatggtatggcgtaatcccacagctgataagatattgtgcatgcattgtccagctcatgcactcaatgaaattaggtcagtagcgtgttccagatttgtgttaaattctatattgcacacaatggcttaaatatgtatcttgtcaaataatgatctctaaccttaaatgtaagtaaccgataatcactcagcatggctgattcatgcaaagctcttggaatcactaggtttaacgatctagtaactcatgaatacttaatcctctgaactgactcgtttgtgtttgcaccgcttgaccgtttgactcggtatctttttgttgtagaaaatagaaattatgtctgattccatgctgaagtatagcacctgcaagtttctccaccatgttttgtggccccattgttcattgttaggcactagatctactgcattcagtatgtttactagatgttgttatgttgaacaacctgcaggtggggatactaaaacgtgtactcgaagaggtcgaaaaggtgatgcaagaattcaggggcatgctttataagtccatggaggatc

SEQ ID NO: 202042 - DNA, 440 bp, Zea Mays
gataaaggctggcatttgtactgtttgtcgccgccgctcgagcgagtgcctccagggaattggtattgctcagattgcctcaactccgatagagattgttttgggtttatccaaaggaggaagtcctgcttgcttgagactttccggcggtttgacgacagggtgagaaagagatggtttgggcagaggaatcccagccgtattcaaattgagaagcagttctgggagattgtggaggggaaggcaggggaacttgaggttatgtatgggagtgacttggacacttcaatttatgggagcgggtttcctcgtcttggtgatacagtgccatcatctatggacctagagacgtggcagaaatactgttcaagcccgtggaatttgaacaattttccgaatctgcctggctcagttcttaggacagtcaaggataaaattcc

SEQ ID NO: 202043 - DNA, 558 bp, Zea Mays
tgagcctcgaagtgttgggaataactgagaagttttcagttgctgcaggcgctcgaagcatcactactgattacgcgaagctagattgtgtaacatcaatcttaatgggtcttttatctaggaaccaatccttggctttttggaaggctttccttcctgtggtctacaatatatttaatgttcatggtgcaacactaatggcaagggagaatgaccgcttcttgaagcaaattgcttttcatcttttgcggcttgctgttttccgaaacgattcgattagaaaaagagctgttgttgggctgcagattcttgttagggtaagctgcttagctgaattgtagctttatctggtcttcaattgaatgacactgattagatgttcttgtggttctagaactcattcaactatttcaaaaacactacaaggttaagggtcatgttgacaattactttgtccgagttgatgtccgacgtgcaagtaactcaaatgaaattcgatggttctcttgaagaaagtggtgaagctcggcgccttaggaaatcactggaggaaatggc

SEQ ID NO: 202044 - DNA, 474 bp, Zea Mays
cccagcccaggccctacaggtcaatattacgtaagtcaaaggatgaaggataccagctaatgggcccgatgggtgcgctactgaagctccctagctaaggctgtgtgcaggtccaggtcaccgactccttaagtttactagcatctagcctcgacaagtcgagactacatcccagaggggccaagtatcagggaagaagtagacaacaacacacatagcaaaaggaaagtagcatacagataagttataatgttgcttggcaagacatacttaaatgtatcttattgaatcgaaagtagcatacaaataagtgataagccgcttccagcggaacccttgctttctctccacagatccgactactcatcagtaggatctcactggaaacgctgggccaccacatctacagcgtcctgcacactcccccgagcggcgtcttcggtatcggccaccggaccggcgatcactggcccc

SEQ ID NO: 202045 - DNA, 399 bp, Zea Mays
gccgacttagcccggtgagactctgatcttgaggagaagtattctcaaggtcaagccaacctggcccaagtttctgcttctgtggatgatgcgcgctctttgaactcttctcttaatgctcagcttgactcagaaaggacggcatatgaggtaaactctcttagttgattttatcatgcttattgttgactgggtgttgaatgttgattcttgtttgtaggaggaaagacgagctcttgttgcttctcgtgataatctggacaggttataccgtgatgctagcacttccttgactattttggaaaggagccaccgcttcactatgtcagacctggatcatcatcgtcacgagctacaagtatctcaggatgaagttcaacgacttggacaacaattatc

SEQ ID NO: 202046 - DNA, 461 bp, Zea Mays
tacgtacgtagctgagtcaagaggttcaagtgacagcagcttctccgcagccaactttccaagctcaacattcttgtgaactctacaggctcctagcaatgcgcgccatattgttggacctgctgggaatggcatgccttcaatgaggctcattgtttcatccagcttgcctgcgcggctatagagatcaaccatgcatgcataatgatccatcgttggagtgatcccgtagtctctgaccatcaaatcaaagtattgctgaccttcttcaacaagaccagcatgagcgcatcccataatcacagaaaggaatgtaagaccatccatatcaatgccctcaacttccatctgtcgaaatacatcaagggccttttggctgtaaccatgttgtgcgtaccctgatagcattgagttccatgacagcaaatctctatctgtttgcctctcaaagacacactgag

SEQ ID NO: 202047 - DNA, 341 bp, Zea Mays
ctgactgttcttcaattttagcaaggattgactcatgaacgctacttgcctccaatagttattggactgcgataacactcgtataagacctctaatcgaccaacaagacatttatttatccaaaggggcatggaatgcaatatttgacaaggcaaggcatcgacccgccataccacagaaagcatgacgacaccgacagatgctatcaactaatcgtttttttaaaaatattaaacttacttctcgctttaccactacaccaccctttagtcacgtgaccatcgggagagtccttcacacgattatacaacagcaacctaaacgtcgggtcacacaataca

SEQ ID NO: 202048 - DNA, 349 bp, Zea Mays
tggcccaagctcctaaaatgataagggagttcagccccttgcgcagcttcttatcggaggggctaataagggtcatgcttacattctcccaccaatcatcaaaggaagaagaatcgagactgggagagaggtgctgcaaaccgactgttttcaggatattaaaccagacttcccttgagaagacacaggaaactagcagatgattcatagtttcttcctcctggtcacataacagacaactttgaggatgaggcaggcctctccttgccagccggtcagcggtccagcagcggccgtgcgccaccagccacatgaagaatttacattttccaggagcccaactcttcca

SEQ ID NO: 202049 - DNA, 603 bp, Zea Mays
actagtccatttggtgctatggcaagcctttttgcaccaaaactcccaagtggctttactacaaacctaactggtgaaaaatcacctgccacagataaaataaagcctgtaaaaagggaaagacaagcagttagaccacctgtagagcataagtggtcccttcctgaagttgctcaggacgccaaacccccagcaatttttcagcatgagttgattcagagtttctctatcaacatgttctgtaaggtatgctcaagtttcatttcttctattcgtaagtgatgattgtgtggctaaaatgtaattcaatatgttttattagtagttcctgcaactttattttgggattaacaaaccggatcagcctttggactaatgtctgcaagtttgatgtcttttgcatcttcattagctatgtcatacttcatatgaacgatggtgcttgctgaaattgataaacttctataatatttgaataggatatactttataaaatgcaatggttgcatatccctaatgttgctttgcatttggacagatacctgttagcaaagttcagacctacaaggacctgcgtagtgtactcatgaaaaggatattttt

SEQ ID NO: 202050 - DNA, 279 bp, Zea Mays
aaaacaatcaaataaaatatagagttaaacaacattgtttacgaaggttgcgctatgctgtgacttcaggggctcgaataatccaccacattccacgcgagtacaagctccagtgtatctggcgtcaacatgtgtgtggccatcaaggctatgacaacgaataagcctacgtaacaagcgcaacatgcgcaattgtggctcgatagtcgcagttggggtacaggataaatccacgcaacgtgcgcaacaggcgcaattgtggctcgctgatcatggcgg

SEQ ID NO: 202051 - DNA, 442 bp, Zea Mays
atccgagcatgaacaatcaccataatcatcaagtatgcttgagatagaacaatcatttgcatcacttgagtttgagccagcaccatcatgattatcaagtgaacttgtggtatgcctttcatcattatcacttgaccgtgaggtggagcaatctttcacaaccaccgtgttgaggatgtgctccacatcctagatggagatcctcccatatactccatcaagatatgtccaaatatcatgggcggtctccatatacataatttccttaaacaccttatcacttatccattgatataaaatgttagtagcttggtgttcaagatgtaagcatttctctttttcttgggtgagatcttttgtgttctcatcaaagggtttataaaagcctacacttatgatccaccacaattttgcatcaattgtatgaaaataatgactcatg

SEQ ID NO: 202052 - DNA, 1012 bp, Zea Mays
gccgcacgtgcgccactcaagctctcctcccccctcccactcctctccttcccacggtcgggtcaaccacccccaccggaaaccgtgctcgcgccgcgtccgttcccgtaaacaattgctggatccccatttccccaccaagaaaagcagtagaaccgcgccggcccacgccccgctgtacagttgtcgcgctcgggcggccgagtagtttaatcctcgaggaaggaggggggcggtcgccccggatggccgtgtcctcgtcgccttcctgcagacccactcccgggtttgaggcgtccctcctcctccgccgccgctctttccggttgcgtttgggaggaatggttgtggagttggtggattctcattctccgctggggttttaggaggattccgggctcttggccggggaagcggagatcggaggttctgccaggcgtacggattgggcgctggagctcctgtttgtttggtgggtttctggctttctgctgtcgggctgtagttttcagatgttcttctctttcgttctcggtgtttctgttgcactttatgatgtgtacagagttctgcatcctagaatggttagattttgaatgggccatccttcgttgaggaacttgtgggaacaatgcttggtttttcatgtcaaaaattacattttgtgtgtgtgtgtgggtaagttttcgatgttttcctctttttgttatttgtaaattgtaatcgaacagtgaggcacttggttccaaataacgctgtggatccggcgtagttttttcgtacttgcttgaaaaaaagtggaggtttcgtacaactgctccctttttatatttcctgtcagaattccatgtatatgtttcttttatttggtgctactgtgataaccttgatgatcttagctcgttttcgttctattaaattatgtgttcagaattgaattttggggaaaagcttccacctttcttctgcctttaaaaggagatggctttttcacacgacggaaagatgaagg

SEQ ID NO: 202053 - DNA, 1202 bp, Zea Mays
caaaaactggggggaacactggattgaaagaggagggtgtggatgatattgttgatggaacggatgacacgttcagccttaccattttgagctgaagtgtaggggcaagacatgcgcagatggactccatgggaggagaaaaaagtgcgggcttgaaggttgtcaaattcgcgaccattgtcgcactggatgctctggatagggacaccaaactgcgtacgaacgtaggcaaagaaattggttagggtggaaagggtgtcagatttgagacgtaaaggaaaagtccataaatagtgagagcagtcatccaagataacaaggtaatatttgtggccagacacactagtgatgggtgaggtccagagatcacagtgaattaactgaaaattacaggtggcgcgtgaggaagaagtaggaaatggtagacggacatgtcgtccgagttgacaagcatgacaaggatgagtactagtatttttattacaagaaattgcggatgactgcgctaaatgtgataaaacggcgtgaccgggatgtccaagtcgttggaccatagggtagatgcaagaagagcagaggccgggaaccgcagggggtatagtggaccagagctgttacatctgaagatctcgcgccgagtgggtagatccttcacagagcagccaaaaggatcaaattcaacagagcaattattatcagtggtaaattgacggacagaaatcagatccttaatgagggagggggaaactaaaacattgtgaagagaaagattatagggaagacgggtggtgccagtggagataacagggattagatgaccgttgccaacgacaatatgagtaggaagatgctgggaagaggggggatgagatattataccagcgtcagatgtcatgtgactggaggcaccagtatcaaagtgccactcttgttgaggcggctgctgaagagtgacagtttggaagttggcagcgagggtgtgttgatcccagacgggtgcaggcgtagaaggatcggcgtaggcagggggcggcccatatgctgcagcgggaactgcccactgaccaggagtgtcggcgacgaaggcatgcggtggtgggggcgaggcagcaggcggacgaggagtcgaaggtggacgttggccaggccacatgtagatggcccccgtccaagggttgtagtagttgtagttggaagatggt

SEQ ID NO: 202054 - DNA, 306 bp, Zea Mays
aaattatccaagaggcagaagaacaagtttggatgatcagagagaacttgagaatagcacagtcgaggcagaagagctatgcagatacccgaaaaagaccactggaatttgaagagggtgatcacgtgtatctaaatatgtcaccaatctcaggggatgaggagatttaaagttaaaggcaagctatcccctcgctttattggacccttcaaaatccttaagtgagttggggagatggcctaccagcttgagctaccaaatcatctatctgatgtgcatgatgtgtgtaacaccccaggtgttacc

SEQ ID NO: 202055 - DNA, 448 bp, Zea Mays
gtcttttgaaaaaaatgcacatctagacctccggatgacttaatgtcgtttttggactcttttctcggcgccatagtatacggcgccgaggtacctagtacactggactctttttgctgagctggcatctacgtggctgagttggcatctacgtggccgagctcaaacaattgctacacacgctggtaagtggtcggctggatggattgaatgaaaggcgttactgtgtgtactattttctaattattgtgcgtctctgttcctcttgcagtctcgctctgactttgactctgcgcgcggcgcgtccttgtgaagagttgaagacaaaagcttggcacatgcactgcacgtataaaacaaaaagatacaggatgggggttgagtgaaagacgtaacttttttcctccttcgaaggccacacagggtatacactagagattttcagtaa

SEQ ID NO: 202056 - DNA, 338 bp, Zea Mays
gtttgacaattgaattaaaatgaattgttgaagttggtaagagttgttcttagtgcatattacctcttcataaaaagagtgttgttttaagacattgatcttgatgtatggttgcatccaaattcaatgatagcaaatcctaatgttgattgcacctatgacaatgccttgggaattcattttatattgttttatgattgatgtcaaggtgtgtcattttctttggtaaattagtctgacttagaggttatttcatgaaaaactcttttcatgatctcgtcaaggctactagtctactatatgagtctatttagggtgtttggccgagttttaccgtt

SEQ ID NO: 202057 - DNA, 355 bp, Zea Mays
atcagtaacaggttcctcatcttccggtaactgaaaggactgccacatttcttcgaccaggtgtaactgcacggtgtcagggcacttgtgacctcgattatattggagtccacatttgtaacaaagtcctttggccttccgatatgcatataatgtagccaatttgtcctcggactgagcttgtcgagaaggaatggcagcaggcgcatgatccaacttgagggaatgagttgctttactgtcatgtgtaaggttggtgcctgaggccgctggtttgctgaatgttcttggagtgaacttgccctcccgctgtcgggtaccctcgcgcacctcctcctgcaactgagcaagaaca

SEQ ID NO: 202058 - DNA, 327 bp, Zea Mays
ctcgtcgcatgcgcatttctcgagatgtgagcttcaatgaaaatcgtcccttcttttacaactcttccactcattcttctttttattccacagagtctacctccttcatgagctttcctcccatctttgaaacttcatcagtatcaccacctactgtttctaccctagatgtccttattcccatcacaccaccttccacttccacaccatctcagtcttactcttccaaaccacctgtcactcagacttacatttgtcgtcctcgctctactcccacggccagtcctgatgatgatcctgttgctgatacttgtactaacactgatg

SEQ ID NO: 202059 - DNA, 2974 bp, Zea Mays
aggagacactttcaagcgttgctcaatgtattgagcatctacgacagagttcttcatcctcacaggacaaagagagctctttgaagcagttattagatcttgttcaaactcgtgatactgcattcggagctgttggatcgcattcacaggctgttccaatacttgtatctcttcttagatctgggccatctggagttaagatgctggctgctactgttcttgggtctctttgcaaggaagaggagttaagggtgaaagtcttacttggtggttgcatccctccattgcttgctcttctcagatcgaagtcagctgaaagccaaactgcagctgccaaaaccatctatgcagtttcacaaggtgggataagggatcatgttggatcaaagattttctttacggaaaatgttgttcctgtactgtgggagcaacttaaaattagtctcaagaatgagagtttggtggatggccttctaactggagcactgaagaatttatcaaagaatacagaggggttttggtcagcaactgtgcaatgtggtggagttgatatacttataaagctggttagttctggacaaacaaatacccttgcaaatgcttgctatctccttgggtctttgatgatggaagactcttctgtttgttctaaagttttatctggagaaacaactaagcagctcttaaagttacttggtcctggcaatgaaacttctattagagctgaggctgctggggctctcaagttcctttctgcacagagtaaagaggccagacgtcagatagctaattctaatggtattcctgctcttataaatgcgactattgctccatcaaaagaattcatgcaaggtgaatctgctcaatcattgcaagagaatgcaatgtgtgcattagcaaatatatctggcggtttgtcctatgtaatctcaagccttggtgagagtctcgagtcatgttcttcgcctgcacagattgcagatactcttggtgcattggcctcagccttgatgatatatgacacaaatgcggaatctatcagtgcttctgatcctgttgacattgagaagacactgttgaagcagtttaagcctaaggttcctttccttgtgcaggagcgcataattgaagctttggctagcttgtatagtaacccggttctctgcaagacactagcagattctgatgcaaaacgcttgcttgttggtttaataaccatggcagctactgaggtgcaagatgacctcacaaaatcactgtttgctctctgcaaaaaggattgtgacctatggcaagctctgcaaggccgtgaaggtgtccagctattgatttctttacttggtctttcatcagaacagcagcaggaatgtgctgttgctctgcttgcgcttctttcaaaggagaatgatgagagcaaatgggctatcactgctgctggtggcatacccccacttgttcaaattttggaaactggatctcccaaagccaaagaagattcagcaaccatccttggcaatttatgcaatcacagtgaagacataagagcatgtgttgaaagtgctgatgctgttcctgctttactatggcttctgaaaaatggaagtgataatgggaaggagatagcttctaaaacactgaatcatctcatccacaaatcagatacaggaactattagtcagctgtctgctctcttaacaagtgaacagcctgagtcaaaagtttatgttctggatgctttgaaaagcttgctttctgttgcaccacttgatgatattctacatgagggaagtgcagcaaatgatgcggttgagacaatgattaaaattctaagctcacccaaggaagagactcaggctacatcagcaactgctcttgctggtctatttcattgccgcaaggacctgcgagaaactcatattgcagtgaagacactctggtcgctcatgaagctgcttcatatgcagtctaacaaaatactaatgggggcctcatgttgccttgctgccatttttctttcaattaagcaaaataaggaggttgctgcaattgcccgggatgccttaaccccacttgtctcacttgcaaattcttcagttattgaagtggcagaacaagcgactagagctttggcaaatcttttccttgatcaggaattatccctccaggtgtcttttgaagaaaatctcttccgtgtaacacgtgtgctaagagagggaactattgatggaagaactcatgcagctgcagcaatagctcgtcttttacagtgccgaactgttaatcagccactttcagatactattaaccgctctgggtctgtccttgctctagctgagctcttggaagttgccaacggtgaagctgctgcaacatcagaagttcttgatgcactggtgctgttatcgcgatcaaaggcatcaagtgggcacaccaaggctccctgggcaattcttgcagaaaaccctcacacgatacttccccttgtttcatgtattgctgatgctgcagcctccttacaagataaagccatagaagttgtgtcaaggctctgttccgaccaacatgatgttattggtggtctggtttctgaaactccaggttgcatatcatccattgcatggcgcatcattggctccaacacgcttaaagttaaagttggtggatgtgctcttctcgtctgtgctgcaaaagagcattgtcagaagcaaatagaggttctgaatgatgcaagtctgtatattcaactaatccattctctaattgatatgatccatatggcaaacacgcctgctgaaaatgtcagcagtgaaagcatatcagatattagaatttccagacactccaaagaaaactacagtgatggtgaaactgtgtgccgtactgctgtaatctcaggcaacatgattccactatggctacttgctgtcttttctcgtcatgacagcaaaacaagagcagaactcctagaagctgg

SEQ ID NO: 202060 - DNA, 284 bp, Zea Mays
gcgaaatcaaataaacgccggtccccgcgcgcggcgtcgatcgatcgtcgcatctgcacgaccatataccaccgggggtccacgccgaccccgtacggaggtgcaccggccggatcgctgggaccggcatccgccgaggacgaggaccatcatctgaccgtgagagaagggaggaaaaaagacagtatgaaattgcccagacgctgcctgcggtttcatcggcaggacgtcgctctacgtacgtacgtacgcctgaagaatgcatggttttctcgtacccggac

SEQ ID NO: 202061 - DNA, 341 bp, Zea Mays
aatttaatcactgactgtttgggctactcttgcgatcatcagaggtccaaaccgtctaggccacaagaccggaccgtccggtcatccaaacgccagatttggtgctcaccaacctctgatccccttctaaccaaacaagcggttaaagtttagcagctactccctctgtcctaatacataaggtgtaaccgctttttattctaatctcgtaatatctctatcctaggatactaggcgcaactcaaaaaacacaaagaccaagaaagacattaattaccacttatttcttaaaaaaggcatgtattccaccactaattaggctattcataataggagtttcg

SEQ ID NO: 202062 - DNA, 310 bp, Zea Mays
cctcgcttcgacttcgtcgaccgacttcgccaggcgcaactacaggaccccgccctcttcgccatcagagatgagatcgccgcgggtaccagaggtgccatggtctctcctggacagcatggtggcttatgccgcccgattgtacgttcccccggactcgccgctgttgcacgagcttgtggcagctacacacgaggacgaccacgaaggggtgcagcgcattctccctcgcctccgccgcgacttccacttccccgccatgtgccgggtggtgcaagacttcgtccgtgcctgcgctacctgccagcgc

SEQ ID NO: 202063 - DNA, 454 bp, Zea Mays
ctgctccatatggtcaacgcgtagcatgcaccgcaccgtctcctcgacttagagcttctttagggcctcaaatggaggtgcccaaagcactcgagccagtgtaaggcctcgtatcggcgagcggcaaggcagaggtcctgagtcacttccacatgtagcacatatagtcgattcctcccatggttgaccttagcgaagagatgacaacggtggtcctagtcgcggccacctatgaaccgttttcatcaagctgcccaaggttgttgatggagttccttagcgtgaggatgtagtagatgccactgaggagcctgtgctagtcggtcttggccacaaagatgacggagccgacacctgggacctcgacagcagacatgtcatcgaactcgacggagttgcagatgctctgatctaggttggagaagtggtcccatcgctcgatcatgtggtgagc

SEQ ID NO: 202064 - DNA, 444 bp, Zea Mays
ggctggtcctcggctcaagctcaggcaagcttcacggccttctggggaagctatccgagggcttggaacgagcggaggtggacgagaaagggtttggccatggtggttgccctcgggtggctctggtgggtcgcggggaggtcgccggagctgcgggcgagctcgggagggtcaggcatggtacagaggaggcaacggggaagatggccgtgcactggggtgggctttatagccgtggcacgggtgtgggcatgggtcggccgagggcgcgtgggggttcacgtgcgagcgtgctctggacgcgcccccgagtgtcagcccacgtcgaacacgtgggggtttacttctgccagggttcaacggtcgatttggttgacttagcgtgcagatcttagcaaaacccccatgtacggtctcttctctgcaccaaatcctacctttttg

SEQ ID NO: 202065 - DNA, 528 bp, Zea Mays
gtacagaaaaaatcacatttttgagcccgcccacaccattttcccaaaactgaaaagtggcaacacgtgctttaagctcatgcacgttactagttaactctggctcagcgactattacgtggagcggacgagtgcatgtaccaccccacgcccgccaaaacccaaatgcagaacaattcagcagcagccagcgcagcccccccgcactgaccactcggacctcccacatacagcacggcacggcattctacatacctgaaatgcaaccctacgggtctgtggggggcagagggagccaaatggggcgcccgattgagcagggaatgaacctgcacggccccacgccaggagctagggttagggtttggggcaggggagcccggggaaacccacgaggcagggtgcggaggctgagagacacctgtggaaacctcaagagcggaaagggcctcgccggaggcggcggtgtcgacgacagagatcgggcgcggtgcagcggggttgcgggggcaggggcttggtggtgcg

SEQ ID NO: 202066 - DNA, 556 bp, Zea Mays
cggggaagcagcagcccgtccggtgtagatccgacggccggagcgatggattcggcgtgcgctcgtgcagagagaagttgtcagggctcggttgctcccctacgccattgttgcacactcgccgtcgagcaagcagtggctttttctatgatttggggaaaaaagaaggaactagtcccacatgttaggacatgggtcccatctgtcagacatctaacggacggaacgggtccctaggctgatttctgagcacaacacaatggtggaaggggaaatcttaggagagaattgaggtaggggtagaactgagcaaaatgtttagactagtgagaaaagtgtaacatcagatgcccagaaatatggacccagcctcaaaacagacgagaggaagcgagcgagctgctgaggatatcgacaaatgaaaaatgtttctcgatgtcgctgtgtcacatgggtttatgaattagggttgtgtaatcatgtttgtgaatctgcgaagatcttttctaggtttcattcaacaactattgtgaccatattggtgccttctcttctg

SEQ ID NO: 202067 - DNA, 651 bp, Zea Mays
ctcgctagcagcttccaccccattctgtccataggcactcataggaggctccttaccattactccacacatccttggatccactggcagctatgttttctcggtatgattgcccactgcttcctctgccaccactgtaaggtcgaccatctgttcgctccctgtcgtgttggtttgacacgggagatcgccacagcctgtcctgcccaccttctttatttgttgcagccacatctctcccaaacatctcctttttgaagggatccctcatcgatacataaaggtcgcgccctggaagcatggcctcagtcctgccaaatcccctctccctgctgtcccgctctggaaggctcagccctgtgtcacgctcgtcatcagcccagtcagaatcatacctaagccggaccatcggaagcggccccagatcaggcttctgcaccctctcagcggaagtgcggccaccaggtcccaagctgacaccagaggccagcgtctcagtggtccgcgaggttgtcacctgtggccgcatcccaagagatcctggtcgcgcctctggcgtgacgacccggaccccatcagcatccttctgccgctgcgcaggctgcgggggtgttggcggggcaacagctgctttcaaggacgggaagtcctc

SEQ ID NO: 202068 - DNA, 335 bp, Zea Mays
aaaaaagagaaacagactggagcacaagaggctaaataaattggcctatgtaagctacaacaggaagatggataataggttcacaaatataagagagctaggttccaagggaaagagaagcaatccactgttgcttgaagagtttacatggcaaaatgaatgggttgaagaagaatctgatggtgataacatttgggatgccgtggatgaagctctaggtgcaagtcagggtctccgaggccgaaatttgcctaggattgctgctgctgctggttcctcctctcaaacccagacacaaacctatgttagaaccagaaaaagacccagaaatgcag

SEQ ID NO: 202069 - DNA, 354 bp, Zea Mays
gcacagcaaacatcaagcagaatctagcgaagcaatttaatggaacagtagtactaagccaaggaaggtagggcatcacgtcaggacgcacaaggccgcagcaggaccgacggctgaaacgggggcagcatgaacgccccaaagtcagatgaattcagagagggtaggaggaacccaataaatcatgccaagacactaaactctctaagttttggtctcggagagcacgaaatttgcagcgaggagaaggacgacacggccagttgccagacacccgaatccgcggcagagcagaagtaaattcgaatttgtttggccaaacgcagaaacggctccgcgagggccaggaatggc

SEQ ID NO: 202070 - DNA, 356 bp, Zea Mays
gtggcttgtcgaagcaactgaagctgaaggttgcaggatttgttgttgattatggacatattctgggatgtatggagaataatacgaaacagtgtgaaggacttgcttcggctggttctatcttacttcggctttggcaatttccttctgcttttgaattgtgacttggcaggttcttgttgtgtgctccttaccctctccatagaataagcagaatatccttgttggctaagaattgtatcttccccaaagcttcttcctacccttccacctcttggagctggcggtctgagagaactctgttgtgttcctgttgactgggagtgattttgttgtccttgggtatgattgttttt

SEQ ID NO: 202071 - DNA, 804 bp, Zea Mays
gcaggcaacctttttcatcacgtacgtgctcacctcaggctgggcgagtctgtgctcggagatactgcaggttttcaacttggtctacaacttcttcagcaggttcgtctgctgctgccatcgccagaataaggaatacgtttactctttcccgtaccacaccgaagtgcccaaagtcctcctgttcaacctgctcggcttcacgttctcgatcatggcgcccctcatactcccctttctgctcgtgtacttctgcctcggctacttggtgtatcggaaccaggtgtgacaattcttgaaactactctctgtgcatgtgacatgatactgataccggaagcttcagtcgctcatatctttgtctgtttgaccttgatgggtttcttgtcccgcatgcagattctgaacgtgtactacccaaagtacgaaatggggggcaagctgtggccggtcatgcacaacgccatcgtgttctcgctggtcctgacgcaggtgatcgcgctcggcgtcttcaccatcaagcgctcccccgtgacggcgggcttcaccatcctgctgctcgtcggcacggtcctcttcaacgagtactgccggcaccgcttctcccgcatcttcgaggcctactccgcccaggtcggtgtcgtctatgcagcacgtgaacaacgcgtgtctgtcgtttctcaaaaaaaaaagaggagcattcatgtttgttcttgtgttgtttggctgtggcacctggtgtcaggacgtgatcgagctggacagggacgacgagcagtccgggaggatgcaggagatccacca

SEQ ID NO: 202072 - DNA, 380 bp, Zea Mays
aaatcaaaccaagcgcacacttcactcatatttacccatataaacctattcgtgaagtatcggctcaattccaaatcatttcatgcctcaattccaatttcaaacctcctatggcactattcttcgttcaaactctgttttcacgccgtttgacctctcgatcgccaaatctctcgatttctgtgccataacactctgtgtatgtatttattcacatttcatatacttatgactatgtgactaatacgtgctcacctcttctgtcattttagtgaccttgcctgcctgtgagccgtctcctgtcctgcctggattctctccctctctcatgagatttccaggtcaatcaattcttttgtcatcttattggctgctatctt

SEQ ID NO: 202073 - DNA, 495 bp, Zea Mays
aggttcccgtcgaggccgcaaggcccgcaactgccatcgtcctctgctcgtcgcgtcgttctcctctcgaccgcatcgcgcccgtggcggggaacgagccatcgacgccgcgtcgcgtgcctttcttcttcgtcccccccctgcctgcctagctgtctcaggctgccgcccgcccagccccaaaacattcggcagccgagtcaaccgagaacacgagccatccacccaccctgtcccttccccggctttcccccgtcctcggctccaccaattgctctcgcgtcagtggaaggaaaaaccaagggcgagggagggaggagcgcatctccgccccgcccgcgttcccgtaccccgatccgccacatgatctgacaccgcattgccgccgaggtgacccctcccgcccccagaatggaggcgctcaacgagctctgcgacctggtggccgcgcacccggatctcctcctcgccgacaagcttgcatggctctcctcc

SEQ ID NO: 202074 - DNA, 562 bp, Zea Mays
caagaatataatcttagcgtgcgcatctcccgctcgaactgggaagaaaacaatataatgcggctgctatgggcagccatcgtgcttcccatgccggtatgatttggtccctcgcagtctgctaggcacggcagatcttaggggatcctcctcctcctcctcctcgtctcccaccccggcctgtgttaattaagtactgctaactccgtactacgcttcacgatcgaactaacttgagttgtataatcccagcgtagcagtgcgcgttgtgggcaagtggctacaaaagcagcagaaccttctgcaccaaaatcagctaggtcgccacgcaagcaaacacactaggcgatgctccgaacaagcttgcgctgcgctgtcccagtcccggcagctgtctcgcttgcatgcagagcgctgcaataattcggcaaggaacgacaaggctctgcgtgagacgcgagcgtgttattttaatccagtctcggtggcctggccatgtagtagctagctcctagctaggggagtgaggaagcaacttgcgaggcatcgcccatgccgatcg

SEQ ID NO: 202075 - DNA, 1323 bp, Zea Mays
gcaggatgcggatccgggcgtgcagaagctcgcgctcgagagcatgaggtactgcccgcttcgcaaatccgcccgattcaggtctagggttgcgtggccccaagggtaactcagcttttgtggtggtcctcgtgtgatattagttgtgggtttaagtttgtcatctttgtgaagatttggttgagcttgagcgtcgtggtgctgtatgtttcttattgcctatatagtgtgtagagattaagacgagttttcctgtgtatgacaatgataattgagtgttccagctgcactcctgtagttctggacttctggtgcaaccaacgtcttatttcttgacccctttgctgccactaaaactgatctgtttcaggcaggagattcgctctgccacgagctcaatgacttcagttccaaagccgctgaaattcctccgcccacactttggaactctcaagtcctatttcgaaacaatgccagagtccgagctcaaggtatctgtgatcacttcgggccacccagctgaggtatgttgtatattggtttggcacagtgttgatgccggcatcttattgttttgcagaagtacatggctgacatactgtcagtgttagctttaacaatgtccgttgaaggagaaagagtatgtgcccaccacaatagttatcttcatattgccattattttttttttgtttaacaaaaaatcaaaccttcagctgttccgtgaatctggaattgagacatcatcttgtcgcaggagagtctgaaataccgtttgctgggttctgaaggtgatattggttcatggggtcatgaatatgtgaggtatggttgaactgaaataatatgtttcctgtctgctacactgtttttcctggttccttcaatcagtgaagtctaaatttttgtatcgtgctgtattgccaatgctactcatgctacgttatgcaaacacaataagaagttggtaagcatttattggactaatatatcacactatatcatgaaacaataagtgatcttatacaagtatatgctgtttacaaacttggtcacatcctgttcaaataacaacagagcatagggatgattgatgattcttttttgtacttggttttcactcaggattttttttttgcatagagtaacctcttcctgaaatgctgttgattcagctgtgtacttgttgggaagtttattttacctgtttgatatgctatttttttaaatatagatacactgtttgcattcaatttctttgcaaaactgttggattttacatgaataactgccctatgcagaaatttggccggtgagattgcac

SEQ ID NO: 202076 - DNA, 350 bp, Zea Mays
gccgcacgccgctgcggtcgggcgtccctgtgtggcgattgacagtaagggcttctccatgtaattcacattggtgtgcacatagtgtaatcgtgctccgtcgaaggattcacaggcgtcgctgtggagctcgagtgctggcgagggaaggggggaagtgcactggccatccgttccgtgattaatggatgggattgaatcggctaggagagctattcggcgatggaatccagggcgttggtttgttgatctgtggctaggattactgtgggtgcacccactcggcggggttcgattctggcagtcgatcgcatgatctgcgcgtaggattagattctaggttcataaaa

SEQ ID NO: 202077 - DNA, 347 bp, Zea Mays
cgtcagacgtgccccacctctcgcgagggtggttaggggagaggaagtagagcaaccgaatcgaggtgtagggccgtaggggatgcggatggaagaaatgcgaggtagagaccgtggaaaacttgtgaggtggattggtcttatgaaacctctggattgaatggatctaatgagcttgttggagctcatcttacgtgtaggaccagtgtcagtctagctggactgcgtggtactttcttgttgttgtttttttcgcttgaaacatatgattcatcgtgtttatcttattttgttagttctgtggctgtttgcgttatctatccttgcagggaatttcatatggtgtt

SEQ ID NO: 202078 - DNA, 399 bp, Zea Mays
gtcaatcggaagtcgtcaatcgcacaattgctatgtacttgcgatgcatcacaggagatcgacctcgttcctggctggactggcttccatggtcggaatattgctatagtacatccttccactcagcgctgcagactacaccattcaaattggtatacggacgtgagcctccggcactggtaccataccaacagggcacgacgcaatcccaaaccgtggaagacctgctacaagaccgagacaatttcctggcagaggtgcgggaccgtcttcttcaagcacagcagcatgccaagcgttggtatgacaaccatcaccgagaagtgacttttgaggtaggagactgggtctggcttcgactcctacataggccaatgcgctccctggttgacaaagcac

SEQ ID NO: 202079 - DNA, 451 bp, Zea Mays
ggggcatttccggtatccccggtggtcaatcatcatcgtatgactacccgtgccaagttgggcttccgccagcccgccttgttccatgcagcagctttgtcaatcatcatcgtatgaccagccgtgccttgttgggctttcggattttttttgccgtctgaaccattccttatatggtcttaagcaagcacctcgagcttggtatagtcagtttgcctcgtttctgctctctattggatttgttgaagctaagtctgacacctcattatttgtttatcgccacagagatgatatggtgtacctactgctatatgttgatgacattgttctgacagcttccaccgaggttctttgctgcatcatcaccttgtttcagcaggaattctctatgaaggatcttggcaaattttaccatttcttggggatgcaggtccaacacacggcaaccgga

SEQ ID NO: 202080 - DNA, 514 bp, Zea Mays
ctctttcagaagcgaatagcagtcttcagaatcagtagctcgtgaaaccaatggaacgaattttttgcaaagatttttgtaccgaagtgtagcatctaacttaggattttccaccatttcccgtacattcacatcttggataatatctgaccttacatctcgagtccatcgttttaaaatgtatcgttcaggcaaatgcttattgttcaccaaattgagacctttcaatgcgtgcctgcataatatatcaattttctcaaagggtcgacaactacatgagaccatctgatcagatgggttggctataaacttgcactcttcttcatttgttaatgtttctataggagcttcaattgcaatgacaaatttcactacatccatttgagcttatgcttctcatattcagcttgaaaatcttcaaatgttgatggtgtgtaaatcatacttgcttgtatcgtaggtgtcatcatcctcaaatgcttctttctagattcaaattcagcttctaactcat

SEQ ID NO: 202081 - DNA, 271 bp, Zea Mays
ggacgagggcaggtcaggcgctcggcgctcctcacgagcaacggctaccacacgaaacaatttcctcttcctcctcagcggcaccgtctcgtcgtcacctccctcctcttcccttcccgcggcccccgacgccctccgtccctcgtcgtcatccagtcatcccctacacccgataaaaggtacgatggaagaagcagcctgcaccgctgctccgagcctcccttatcactctccgtggatcaggaccgctcccgtcagagtagtggcgaag

SEQ ID NO: 202082 - DNA, 309 bp, Zea Mays
agaggaagatctctagtttgctgctgaaactggatatatccaaggctttcgactcggtctcgtgggcgtttttgatggagattttgacacatttggggtttggtcctgtttggcgtaatctgatctccaacttgttattcacttcttctactcaggtgcttttgaatggctcgcctggtaatcctatttttcatcggagaggtcttcgccagggagaacaaatttctcccatgttatttgtgatggttatggatgtgcttagcagcttgttccgggttgctgaaaatagaggcttgttgcagggccttg

SEQ ID NO: 202083 - DNA, 725 bp, Zea Mays
ttctgctctcacatggcgccgggattcttgctcacggttctagggaatgtgtggggggaaaggtgctcggcgcccggttttatagccagagaacccagaggcgctccggttggcggaatcccaacagaaccagcgagattttcgccatgaatttctgttgaggaccgagcgccactagtttaaaaaatgattcgttctttttatttctttcttcttcattcccgtataactcgtcttcccatcgcttcctcatccgccggcgcctcatctcctcccactccaacccagccatctccctctccgccccgcgctcggccactcaagcttcattggacacgctagcccacaacttcctcgtttttttttggtggaaaaagaaggaacaaaatatactgacatgtgaggtctaccccaagagtaaattaggcaatttcaaccaaattgtttctacgtggatctggagtttctacatttgccaaacagttccatggtggatcatgtgatctatcccaagagtaaattagacaaatccaacaaaattgcccctgcatggatatgttacacttgccaaacagttccacggtgctcagatccgctagtggagctgctccatagtgaatccagatctagattcacttttttggcagacctgtcccaaagaaaccccaaatcttcacatccagatatactacaatctcaggtcaaatagtaattagaattagaag

SEQ ID NO: 202084 - DNA, 283 bp, Zea Mays
gactgagtgatgctccaaccgataaggtcgagctgctgtatcatcgagcattcagtggacctatcccaggaggaagataacatgtgtcgtgttgtgttcatcacaattattggcacgtcgccgagaagtggaactgggagaggcggcaagagtgattgacaagtattttgacattgatgcctgtggcctatatggcccttcacaaagcctgaagactttccattgatattgttagatgaagcaacaacgcaacacatttgaaatggcggtcaaccggtgcgga

SEQ ID NO: 202085 - DNA, 491 bp, Zea Mays
cgccctggtagatcaggtagtagtccttcccttccctaatgatcctgacacccttgggaaggacgcggcgcggtcacacacacacactcacaggccaaacaaaaacaaaggaggcggctagcagtaacaccagctgctgatggcaatcggaagcagtggagctggagcagatgggcgagtggcggcttacagtccgtatcggtcgcaccggtcctgcatggcgaagacgtccttccaagacttggatccctccggcgtgtagaacgctgcggcgtccgctccccacctgtcgttgaacagcttgcgccacagttcatcatccgaggtcaacaccctccatttcctgcaaactgatgagccaggaacagcaccgtcgcagttaattggtatgcgtaactgcccaaaacaagagatcgctacgcacgctatctgcatgtcgtaccaactactcctctgtatcaagctctctggcctggaacgttttcatgctc

SEQ ID NO: 202086 - DNA, 957 bp, Zea Mays
taatagaccactcaagttcaggtgttgagctcgttcaatttcgtcagggtcaatcgaaaactgcatcagatatacaacctggaaaaagtacaaatccatatagtctaaaattagaatcctctcatgcacctttagtcagtagttcacacccactggagtcaacaagtttagcttcgtcttcccacgttacttctgataatgggttttcgttgcataccaaaagcagcaacagagcaactgcaaatggtcatggtagagagtgtgcacagcccttgggtatcagttctgagcgtgcacatcaagctttagcacttgagcaccttgagaatatgtggacaaagggaaagaactacaaaccagaaaatgtagaacatgtcgcaaaagtgtctgttggatctgcttctctgggctcgacttcagttcagcaatcagttccttgcagcacttcagtttgttacaatcaaagtaattctgaaagaccaacagcgtcatctcagtcaaaggaccagcatttggtaagacactcaactacacctacatatgtaacatatccaaatggcaccccgaaaagcctatctgcagaaatggcagaacatgccggtccagaagactttgcagtagagagtgagagttcatatgccactgaggacgatgaattcaacaatgtgactggacttgattctcctgttaccagagtttgggaaagcaaaagtaaaggaaatgctaccttatcacatatacatcacccactcgaatctcctggtttccatagagcaaagaagaacagaagtcatgtgggaaaactgaagatgtcaagaacttcttcaggaagaaaaaggtcaaggtcaaatgctcagaagcctcctatctggcaagaagtggagagatcctctttctctgttggtgatagtatggacatactaaatacatctgcaaatgatctaaagacgcatgagc

SEQ ID NO: 202087 - DNA, 290 bp, Zea Mays
gtagttgaaggacaggaatgaccaacctcatggaacatgggaggaggtgtacagaaatgtgaaaagggtagagaggttaaaaaatgaattgcatgaaagagatgacaaggagcttgagcggacaggtcagccactttgtatatacgaacctttctttggggaggggacctggccctttctgcaccagagctctctttatcgtggagttggtctggtaagctgttgttaccactaagcataataaataattgtggtcaccttgaatgttccaaagatgagtttatacaatt

SEQ ID NO: 202088 - DNA, 336 bp, Zea Mays
aaaaggaaatttaatggatctccacttagaaatccaaaatttcctcctgctcgtcgtggtcgcaactttaaaaagaaccttaggcataaagaaaacaagagagctcgtggaaatgaaaaagttgcaaatgacaaaccgcgtctttgtcacaagtgtggttgtaacacgcatttcgcggccacttgccgtactcctaagcatttggtagacctttatttaaggtcactccgagatggcaataaaagaacaagatatgaagcccacttcaatcaagctactgagaaagataaggagattggttgttccaacaacaaggcatccgctcagcagatggac

SEQ ID NO: 202089 - DNA, 285 bp, Zea Mays
ggaaggggagcatacctgtggcggtggaatggcccacggcgaagacgaaggggcacgaggacggcagcggcggaatggccgatggcaaactggcgattttggcagcctaacggtgtcgtggtgaaaaactggcacgaggggacttggaaaattttcgtcacctgtgctcccaccctttatatagggaacatttctactggcggttgtcttagagaggacttccagtagaaatgattctacagtctatggaagccatttctactggcggtcttttatgagaactgc

SEQ ID NO: 202090 - DNA, 335 bp, Zea Mays
gtggagggattctagtggcttggaagaataatatcagctcatgtggctctaggattgatgatcattgtgtctcggtgaatcttagccttgagacttggtcatcttggtggttgtcatgtgtctatgcccctcaagggaatcatgagaaaattcagttcttacaagacctcagattgattaggacccactgttctgggccatggctggttgttggcgattttaacatgattctgagtgatgaagacaagagtaattccaatgttgatcgtgctatgatgggcaggtttagaaggtggaaggatgatcttgccctgctggagcttcctctgattggg

SEQ ID NO: 202091 - DNA, 533 bp, Zea Mays
cattatcaagaactatgctgatgataatcttgaagagttcatgactccatacgactctattgctaatgaacctgctgaaaatcctttggtaatcgtagaagatctaaattcttcacagctatctggcgcgaaacgtttcagtgactcaactggagaaatgaggcaatcctccaagaaatcaaagagatattctgaaatccctcaagatctttatgccaaaattcctggtaacacagcttcattcaagcaccactcaaaggccactgatgtattcaatccagggaccccaaatcacttgctacctgtacttggcctttgtgctcctaatgctgatcaggtgaactcatacaaaaactcaatttgtgcaccaagcataaaggagcgtaaaagggccagtggtgacattgtcaaacaactgtcaactcctgctgaccattctaatgtgcatagaaacgaagctcaatcagcttctgataaggccatctttcctggtgcatctgaggaggctttgcgaagaataagtaacatgattc

SEQ ID NO: 202092 - DNA, 355 bp, Zea Mays
gttctgcatactcacatgtaataattgataatgtatattgtaagaggaactaatgatgaagtatgccttcgaagatttatttttcagaaatactaatacgccttacaaaaggaggatacggccgggggtgggggagtatttggttcatagcagaaatgttgcaggaaaccattctcgccgcgtcgacgacgtacggtgccccattcgaacgttggagcagaggttctcaaacatggaaaccatgccgcgtaaccaaaatcttcaatcaatcaatcgtcaggggtcctcggtttcctcgcatgcatcacgtcgctcccttatatagccacctcccaacatggcacgtccagacctc

SEQ ID NO: 202093 - DNA, 497 bp, Zea Mays
cagatcttgttagtgtgctgggattgtgagcgtccattagacgaggagaaagacacacattgatggctacgaccactaggaccatgacgccctctgccccgaccatggccacgacacagttgttgctttcgtgaccttgaccagcaacattagcagaagcttgatgacctccatgaagtagatccatactgacattgaagctgggaggtggctacagtcacggtgacctgctcaacatgggccaccagagttgagactaccagattgtactcttcatctagtcccaccaggatgtacgagaagagttcttcatctatgtttttctttgtagatgtcatctcatatacaagaggcttcattttggtaacatattctagcatagtcatgccacctagggggtcctgtaggttgaaacttgacttatgacttcttgagtcatggaggtcatgaggaaaccgaagacttgctgctcaagtcccacccaccgaccccgtagg

SEQ ID NO: 202094 - DNA, 274 bp, Zea Mays
cttggacttcttagtactttggtatgcattattgttactgctcttttcagtttttcattgtttgcttttgcgccgactgaacaactggacttgtcaggcttccactgaagttggtgctgccaaagtctatgagctgctccagggaaaaacttaccgttcagttggttggagcactttgtttgattgcttatctatctatgaggagaagttcaaaaaatcaattcaatcttctgcaaacatactgcctgattttcctgagggggatgcacaagcg

SEQ ID NO: 202095 - DNA, 390 bp, Zea Mays
gcgccgccgtcgcctatcgttgatagacttgctagtccatactactcccatctgccactgccactactctgctcttgtatacggtacattgttgtcttcttcaacagtagacgactcgacgccaagcttctgtgacaacgcgccaacgccagtgatggcacccaccggaggagcaccgtacaatgcgacctctagatctgtctcagcccctcgtctcttgttggagacgccttcacctcgtcttccattaattgcaggccaaactgcaccttcaggtatgtctaaatgtctcattccagttagcttttgttagactttatgattgcaatggaccctgagctttgctccatacactttaataggtagtgttgcggcatcaacttcaagtgc

SEQ ID NO: 202096 - DNA, 383 bp, Zea Mays
cactcagatcatctctgcatccttatgtaactggcgtcatgaaccctatatgaccacggttaaaacgaggcaatcggtctggcccgccggtgctacatgcctcacttgactcatgggtgatctctaagcccttacttacacgaggcaatcaccttaagtcacccttcgacttatgggtggtgttacatgccttcgtcagctcttgcagggtgaactcaggccctacctcgtgaggcaatcggcttgagtcgtgtcgccgactcaagtttggtgctacatgcccacgcaaaatctcgacagcgtaactctagacccttcatacatgcagtcggcctggcccgccgacgctacatgcatgtcgcttactcagtgaagggtgcctc

SEQ ID NO: 202097 - DNA, 351 bp, Zea Mays
gccaagacattgaaccttaagctgtgtatgagggaaaaaatatgaacgtcaacataagtacttaagtagcagtaggggtgccccatcaggcacgctaccaaaaagtacaagcatgaaatagggacctacgtaactgttggcagctatgattggaatgtaataccagcatatttttggctaccaaatcatgtaagcaatgcccaagtggccattggaaacaaggaggtgtagcgaaacgcacctgcaaaactgttccagagttgcatctcttcagtggcaaagagatagcggttggatcggccaaattcagaaaattagagagatttagaagaatctccccaagaatgccag

SEQ ID NO: 202098 - DNA, 325 bp, Zea Mays
tgagattaaagtgtcacctaagtttataaaggagctgctgtagtttgtattagggctcatcaaagaaagttttacctgaacggtggagcttccttggtcatcctggcgcaccttgcgccagctgacggaatcagctccccctctggccgatccccatatccactgagatcccttccccagtcccaagccttgctgcgatcaccactgcgtagccctaggcgcccacgacatatcagaaaaccacatgacttattccatcattctccccctaagtcttgtgcgtcgccttgtgggaaagttgagccatcccggacctggaacaaag

SEQ ID NO: 202099 - DNA, 499 bp, Zea Mays
atgttagatgcttggcgccacttctcaccttgctttgattttatggactatggttaacatcttcttcaatatctctgtctctctgtagcattgatcataaataatgaaaggtatccttcttgtacactacttgaccttccaaatcaacatctcctttctcatatgcaatagtgccgaagtcgcatctcatcatctcattatatgtgcaagtgtaaccatctgctttttttaagtgagatacacatgaccactggcggcgctcgatggcatgtccaggacagcctgccttcagggtgtttctggtctaatgcctgagaagtttttttagtgcaatgcctgcgtgggcggcgggagggggtctttcccctgcaagttgatttttttagacaaaatgaaagattttgaccaaatagtgtgactgttaactatcttaaggaccactggtgatatctatacctctgatccccaccactgcatgtggatgatcttatataattct

SEQ ID NO: 202100 - DNA, 362 bp, Zea Mays
tggtatctgccatcctttgattcatgcaacaggacctgcaggatttagcctgggaagccaagccgtatgtccggaccccctggatcacagttccaaatactaggacacccatcacagagtggtggagcgtgcaggcttagggtacgggaccatgctaagcggctacatagctctggaccaccccaggagacgagtgtccactctcgagaactggaccccaggttgccggacccacaagatcgcagctccaaatactagggtacccgttgtagagtggtgaaggtgcagtcttagggtacgagaccagactaagcggctacacagctccggaccactccaggaaacgagtgcccattctctag

SEQ ID NO: 202101 - DNA, 300 bp, Zea Mays
caatagtactgggtggatgtcacttgttatcattgtatcaagtattgcaactatctatcaactgtactgggactttgtcaaggactggggtcttctacagttcaactccaagaatgcctggcttcgtaatgatttgatacttaaacaaaaatacatttatttcgtatccatggtgcgttttcaaatcattaagctctacgtcaagacttccaaagcaaaaatagatagttcacttacagagactcacatattttacagggcctgaaccttgtcttgaggcttgcttggcttcagactgtc

SEQ ID NO: 202102 - DNA, 340 bp, Zea Mays
agctctcctcgtgcgggactgtgcccattagcatttcatcgagcacatgaatgcttatggtcgcttaactgctccgatttgtaggttgcggtccatatacgacagcttagcagcactaaggtgtcactgcaggggaagacgtggtgcgttagttatgaatagaatcagagccttacctagattggacacctgagccccgattcactttcgaccttgacacgaacgaacatgtcatgtaggcgctcttgttactctcgcttctcagtttagtattcgcccttctttccttatgctgattttttgttgtgttaactgtgcaaaaatgtgcaacttctccttt

SEQ ID NO: 202103 - DNA, 1020 bp, Zea Mays
tttcaaaggcgaatgtacgaatagtcagttggtgttttactcgtctaatcgctaagtgttgtcataaataattgcgctaaaatttggttataagaatacactggtcacgtggtgtgtttggatgtgacaagtagattaggagtgtggggtctgtcgaagcactgtgatgtccaacgtgaatatcaaagtgcattgtggtggtaattgcgttaagttaatcggtagtgtctcgagtgcatgccacaacatggttgtatgcgagacaaggtaacataaggtgtgctcgacacgaatgttcggtcgacataagtaggaaattgtgtttgcttaattagagaggtggtgacatgccgaagtagtcatcgctttctcaatatttataagtcgaatcgaatcgatgcgtattttgtgttcattaaattatgcttcgcatataatgtgtgattgtgctcacggattcgagtagacacttcaagcaagtcaagtaggtttgtggtatgagttgtgtaatggagttaattgttttaggataattattgaaatgctctgttggtatgataaacatgtatgtgttcatgattgggaagtaaatgcatggtgattgtgagttggagactagtagtttgcgattcgtatgatttggtcggtgtgcgaaaatacttgtgaatatgaatgtttataaaaatgttgtagtgtatgtggtgtctcgaattgtgataataataggcaagccgacgggtatgctgtctagcgggcggtgtcgttgttctagctagccgactattagatgaccttggttaagctcatagtcacgatgatttgcttgttgtagtctaaatgtgtatgattatggtcgcgggtaaaaatctgtagtgctcatgtggtgtctaaactaaaatgcggactagtgggtgaaaagcgcttagatataagtatatgccggatttgatgattgtggtgaatgcgtttgttaactgaatgtgataattttagtgcactaaatgatttagataaaatttg

SEQ ID NO: 202104 - DNA, 743 bp, Zea Mays
ggagcacctcttgtgtcgacccctagggcaactcttctagcccccggggcacttgtttcgcccctcgaggcacctcatgcctcggtccctgggacacctcctgtgttgccccctaggccatctcttcctacctatggggcaactctttagaccctcgaggcacgtattccgccccagggcacctgtgctttgggaacttcccattggggtctcttgtaggcgtgcactgcatagcgccaccgtcactgaccgtctccactggtcatcgttgcgaccactcttaggtctcgacacctgctaaactacaccatggtatctaggtggttgtgcacatgcaactccatcgtttggatggtgcccgtctaagatccacgtctccattggaacatcgacatctgcatccatggccaccaacacagctcgggaaaattgcttttttaggtcacactgctgctcaccaaaataccccggcattcgttgcactcgttagaattaatatatatgctcttgtgctaggatagtatagatgagcctttagacttctagatagtccgctgttgctgacaagctagctagcagcagtagtcggccaccaatagttgccaggcactgtagcaaccggacagctctagcaaaggtggttactgtagctagtcagatagtaggtcttgttagtatgaataatatagtttgtgtaatacactggctgctcactatttattttttgctgatttttctctcat

SEQ ID NO: 202105 - DNA, 413 bp, Zea Mays
cgaagtttaagtatttcaaataaattttttaatctcctgctaccttctttttactatgtgcagaaattcttggatattttagatcagtatgaggttgcatcggctatattttatcatgctgagaaagagagatcaagtgttttgcagcatgaaatgtcggctaagttggtcctagctgatgctacatcgggtgctgagaaatctcgcacttcatttgaaattcatgctcacgagttagcagaagcaaaagcggcggcagttgatgaagctaacaagcttgcaatatgggtcgaaaaacatgcactggttcttgaggctatacgggagaactctgttgcgtgcattgagtcatgcatgcaattgaattgtaaggacaagacattgagccttatttcagccgtcctagaatcagg

SEQ ID NO: 202106 - DNA, 333 bp, Zea Mays
ttagaaacttgttaacaacttcatcaacaatagattcggccacattaatgatatctattgcttccttcatttccgggtcagccagggggtcgaacggttccggtggaggagatagttcagctacagtagaaaaaattaattagttcgaagtcatgaaaacaaatgatgaagctagatgccgcgaaacaatacctatgtgcctctcatgctctgcagcttcttcagctcgcttagcttgtactcgggcctcctggatgtctttctcgctcttcttcataattttgtgagctatttctcggccaccatttgcccagatgtcagtgtaaaattttc

SEQ ID NO: 202107 - DNA, 287 bp, Zea Mays
cgacgccctcgccgtttgggggtctgcatggttactcgggggcttggtccacggcgggcataaccagttgccggagttgggcgtcgtcgccggtccgcatcgcgttgcgagcaccatcgccatcgctacggtgtcagaagaagagggctacatcgagcgtccgcgacgtgagattggggagagaagggttgccatcgccatggacaaagcactgggccgcagccgaagaacttcatctgcgctagggttgcgcagcaccgtgactcgcgcttcgtcgtcggccatcc

SEQ ID NO: 202108 - DNA, 656 bp, Zea Mays
agaagaaatacattctcttgatcatgaaatggcagtaaggatagaattttttcattggttgagtttgtgcctgaaggctgacagtggatctatttggcatatttgtgctgccatggtgctttcatcagtctaatattatttttccctttacttcagggttgttatattcaaaatggagctaacttttcttgaagcatatgcagttatgcacatgtaaaatgagagcagtggatgattaggagataactagggaacctatacttcttgtgtttcctttttccttgcagaagaggtggttctgatctgtgcaatacttacccgaagatgaactacacagactgatttgcacacaatggttcccttttttcttttggggaataaactgtctccatacaacccaaagatgaactactattttttgttttatttttgacttttgaggccactcattcaaatgaattacgcatactgatttgcacaaagaatgatgtgtgcaaggcatctacatgttatctattttaagaccacttatcccattttgactatttttacgtttatgttctttttttcaattttttgtctgcatataggttgagtgtcagtcatcttgttcttccttatgtttgtccatgtccttattctacttcagttcaatg

SEQ ID NO: 202109 - DNA, 608 bp, Zea Mays
cgacggcacggtctcgggggtggtgtcgaggaaggtgctgccggcgtgtggtgggctctgctgcctctgcccttcgctgcgtccccgctccaggcagcccgtcaagcgctacaagaagatcctcatcgacatctttcccgcggagcaggtttcgcaagttccctttcttccgcacgtccgtttatgtcagttatcagtcctattattctccttgctcgccatcagctgcattttcgtgggattttacccgttacgagctggcatttttatgagcatttacattgacactggcgcattacccgttatgagatgagctgcctagagccccaattaactatttctgtctccatcactggaatccttcaactgttcactagatctccccaataaggagatgtcaacggcatatataatggccatctttctgtttgttcacacagctcggttacttttaaacgggctgtggtttccacggatggttatggaccatactacatgtggcagctgttggttctatctgaaaacagacttaatttcatcaacatttgccacaggaagacggaccaaatgtgaggaggattgggaggctttgcgagtatgttgctaga

SEQ ID NO: 202110 - DNA, 349 bp, Zea Mays
gaatggatcgccacctccgacatggtcaggagggaggccatgggtacgcatcacttgcatttcatgcatccgttcttcacctttacttattgactagtactaacatatactactctattactacacttctcatgaagttgtgttttcaggacatgaatgacagtttttaacaatgtttaccaacatgtacatatatgcatattcaggtgtagaagatctgaccacaggcaaatggctgaacatgggccacaaggccaagaaccgggtgaacatcttccccaggatgtatgactacaagagtgccaaaggtgaagacttcttggagaacaccatcggggtgcaccagctg

SEQ ID NO: 202111 - DNA, 309 bp, Zea Mays
ccgttaagccaccaccggcgtccgccgcgtggctctacctttccaccgcatcgccgtgactcactctagctccccgttgatcgccggagcaattgccacggcactggacaccaagccattgcgccagtaaactttccctttctctgaccgccgcgcgtcaccgttcaaattcccggccaccgccctcccgtagtataaattgaccctgccgcgagctccgtaaggtagttaagcatccagccaccaagaattagcctcaatcgttcaccagggtgtgcgaattttgaacttcccccaaatccgcgcaag

SEQ ID NO: 202112 - DNA, 302 bp, Zea Mays
cgaccttgtcgaacgccgatttgatggtcagaatatccgtcacgcaccgtccggtagtcggcgtgccacttactcccactgttcgcccatccgtgtcctgcgccgtctattcaccttgcctcgctcgctccttccggccgttggcgtctcacctactaccgtcgtccgcccctcccgtcccgtgcgcagccatttctcagtgggccacaggatcgtgcttcctcgcctcgtgcacacatcggtgtgcaacttgctactgtcgtccgtctttccatccccgttccgccagatctcatcacgtg

SEQ ID NO: 202113 - DNA, 1194 bp, Zea Mays
tgatccaagtggatcaatatattgggatttcaagtaagttaaacagaatggcaggatggtatgttaccaaaaagagtttcaccctgttcatatgcacttgtttagtgaattccatctgccctatatttaaggtctgttggaactagatgattaactgtgacaaggttcagagatttctaagctattaagagcatgaccctgttcatttttaaatgcacggccgtttgcacatttccttatgtatgtgaaactttattgtgctaaattttttgtatcgatccttcagtgctttggtaggtctgtttttcccagcagtcactggaattatggctggctcaaaccgatctgcttcactgaaagatacacagcgttcgataccaatcggcacattatctgcaactctttcaacaactgctatgtacttgttctctgtgcttctgtttggagccttggccacacgggaagagcttctaactgataggtatctagtctactttttagtactatacacgagttcttgtgtcaattgccgataattattttaagggcttaatgaatctggctttatagttcatgatgccgttacagcatatgtgctagttttttcatcaagttcaagcaaacatgattttatggccaaaggcataattactgtcaagcttttaagtttcctaacagtagcgaaaatgattcatgttcttacttgcatccatcacttgtttctggttgtttatgaagtggacacaaacttttttattagcaaattgttggttactgttatatagatcctattttaggatttatgctccatacttctgcaatcagaatgctctacgattaccattgtgcatctggagctactatgaataaatgccagcagatggtctgttactaatctgctttataagattgatgttcatattattgtggtagatagtcttaatggctaagaatactctggctgctttgtataaccttaatgaagtctttggtttatttttaccttatcggttattgtcttagaacaacattctaacagcattactgtagtttccagttgcttattttattatgtagccacgtaaggcttacgccagctgttacagtgtcttctcacttgtgtggttatctcataaatatccttaaccacttgcaggcttcttactgctacggtggcttggcctgctcctgcag

SEQ ID NO: 202114 - DNA, 356 bp, Zea Mays
tggcttcggacaaggttttgtgccagacgaaggccctcaccgaaagtattttgacggtgccaatcaccatttccatcagttccacccagagccattgcctggtgcgccgctgcaccctccactgcctcgctaccctgatccccatggttcacatgcttggcatgttgaggcaggtgctgtgccacggccagcagagcctccattcccctctaaccatgattaccgtgctgcaccgccacggttgactgcaaattcatcattgtttcctgtcctttctggttcgccaacaacggaaaattttccatcaaccgctggtaccttgcctccagcccatcccatgccaaacaaaaaccgtc

SEQ ID NO: 202115 - DNA, 488 bp, Zea Mays
cccggatggagcgcggtggtggccatgactccactgcttcaaccttggcagggtccattgcaactcccttatccgagatgatgtggcctaagtaacccacctgtgtctcgccaaaggaacacttggtgcgcttgagggccaacttctgctctcgtaacagctggaatacttgccgcatgtgttgaagatgctcgacccaggatgagctatagattaatatgtcatcaaagaataccagtacaaacttacggatgaacggcttgagtacatcattcataagcgcctgaaatgtcgacggtgcattagtcaagccgaaaggcatgactaagaactcgtagtgaccatggtgcgtgcggaaggtcgtcttatcgatgtcctctgggtgcatgcgcacctgatggtagccgctacgtaagtcaagcttggtgaagaaccgggctccccgaagctcatccaagagttcatccactactgggataggaaatttg

SEQ ID NO: 202116 - DNA, 380 bp, Zea Mays
cttgggtacagtgttgagcataagggttatgttgttgggattcggttgctcgtcggaagaggatttctcggaatgttgtctttattgagattcgtcctttctatcctagtccgtctacatgtctgatctttggttgatcctctgtcttccctttcctgtctatgaacgactctgctacagcattgtgtctgtctcccacctaccactattgtgccttctcctcaatgtgccctcgtctgttgcgcctcctcctatgcccctctatgacttattcatagacttttgttctgattcctgactacattgtcaaacctcctgcgacaaaggtctatacacgaagacgtccttttgactactccatcggcttcctctggtgtgtc

SEQ ID NO: 202117 - DNA, 287 bp, Zea Mays
gtggtttagtggccaccccgagttaagcaaacgcgagcatgttgcaccgtcttaagtcattgccaacttaagccgattgctccgttagcagggcatagtggtcaccccgagttaagcaagcgcgagcatgttgcaccgtcttaagtcatcgccgacttaagccgattgctccgttagcagggcatagtggtcaccccgagttaagtaagagtgagcatgttgcaccgtcttaagtcgttgccgacttaagccaattgctccgttgacagggcatagtggtcgccccg

SEQ ID NO: 202118 - DNA, 524 bp, Zea Mays
gttcctggagcttggaagctccagccaagcaccaaagcccaccctccacattaacagcttttagcacttcctcaacacatggtcttgaattgtcaaagacacacctgttgcggtgtttccaaatctcccaagccaccaatgtaattagagaattgaggcctctacgaagccccttgggaacagcagcaacagttttcttccaccaacctgagaatcgagacactgtgggctgaggagccaactgcagcagccccaactgttgaaggatcagggcacaaatttggcgagcaaacacacatccaaccaacaagtgatgcaccgtctcattcatctggtcacaaaatggacaagacactagatggggcagatttcttcgctcaagacgatcagcggtccaaacccgattatggtacaccaaccataaaaagaacttacaacgcgatggggcccaggttttccagattctcttccaagggccaaacttggtagagcccacgaagaaggcctcatacgcagacttgctg

SEQ ID NO: 202119 - DNA, 550 bp, Zea Mays
tgacgctgatggtgacgacgtgaatattgagggcaaggatgccaagtctcctctagttggagctcaatatgacacacaaattacagtagttggtgatgtaaagaaagaatcaaacagtgtgatgaacatatcagtgccaccaagcattcaaattaaatctagtgcaagtgtaccgttgcatactttagacagtaaagcaagtagttcaactgacccacaagttggagatgatgataaagacactgagatagatgaaagtaaccaaggggagtcctgggtacaggggttagctgagggtgactattgtgatcttagtgtggacgaacggctcaatgctttcgttgcgcttattggtgttgccacagaaggaaattctatccgtgcaattctggaggtaatgtttatattgtgattttgttatcttgctattttcctattgaacatcatctgaacaacagactttacaggaacgcctagaagcagcaagtgctttgaaaaaacaaatgtgggctgaggcacaacttgataagaggcgttcaagggatgactt

SEQ ID NO: 202120 - DNA, 301 bp, Zea Mays
cgcaaccataaatatgtgtacaaatgtgcataactcatgcataaatggaatctttgcatgccaggaatcgcgcgcacgaatatttgcatgtgcttgacgtttacgactgcataacgttgtgatacatgatagcgtaaaccatgcaaacgtttaaaatctaccaccagatttgagataaggcaatacgtgatcttcgtgcgcgtaaataaaggcgcagttacggcaggaaactaatacaactttacagccgcgtccacgtttgctcgtccatctgaaatattggcggcggttagcggcggcg

SEQ ID NO: 202121 - DNA, 857 bp, Zea Mays
gaaaaaatagccgcaagatttgctcagatttggaatttaattatcacaagcttccgtgaggaagatttgatagacgacaggtgcaacatcctatctttactcatgcatatatagacttctttgtttgccttcttgccaaggtgttgtttatgatattaaaaaaatggcagagagaaggacttgttacttgttccatactgcaaagatcgtgatatggatataatccaatggccaccattcctgcttgccagcaaggtatattattcttgtaacttgtttgccgtctatttctgtgctatctatttcgatgagttttttttccaatttttttattgactgtatttcagattccaatagcattggatatggccgcagatagtggtggaaaagatcgtgatctaaagaagaggatgaaatcggatccatattttacttatgctatcaaggaatgctatgcttctttcaaaaacatcatatatgaactagtgatcgattcacgagagagagggtacatttgacattattatgctttcattcatattactacacccttgactgttaagggcttgtttgcttagaaggggattcccctcaatcccctccaatccccttctaagcaaacaagccctaaagcttaagttttgttttgaacccaattgataaagttgatatactatgcgatattttcagttacatacaaaagatcttcgatgcggtggatgagcacatagcagaagagactttgataaaggagctgaacatgagtaaccttcctaccctaagcaagaagttcattgagctgcttgacttactggtataaaattagttatcattgttctaataaattcaatgtggaa

SEQ ID NO: 202122 - DNA, 362 bp, Zea Mays
cagcaggagagcatgaagaagataactgcactagaagcagaatgccagaggctacgggccatggtccagaagcgtctgccaggccctgcggcgttggcaaagatgaaagatgaggtcaagcgacacggttctagttctgctgagaatggaacaagaaagccacgtgcaggtgcaggtgcagcagcgcagccacagcagtcgaagcattccatgtctgaaggtcaccttgtcaagctgcaggaactgggcgatgaaaacagacagctcaggcagttgttggcccagaaggagagcgacctgcagtttgtgttgtccaagtacgcagacgcatgcaagctgtcaatactgcaaatgcagcatga

SEQ ID NO: 202123 - DNA, 296 bp, Zea Mays
gcaatttttgtgttgtcacaccaactattagcccatgagacccaacttactttggctatgatcatggatcgctttgttaatgatcttaaggatgcagttagagttgtcgttgttattcagcgtccacacgacttggatactgcttgctctctcgctctgttataggaggacatgttgatgcaatcaggatgaagggagcataagaaaccagatatgggtggtttttcaaaggctcagatgaagaacatgatgacaaccaatgctggaatggttaacacaaccagcaaggtgactag

SEQ ID NO: 202124 - DNA, 373 bp, Zea Mays
ggcattagctgaatactggctgcgccctggcaacacgacgcaatatttgtgtcgtacggacttggctgcgtcatttgattgctatgtcgcactctcgcttaatcggaccactctcgttgagtcggaccgccatcatcgagtcacgcatttttcgcacgccctgtaggcattgtttgtctgtcgtgatcatcgagccataattgcgcctattgcgcatgtttcatggacttgtcatgtaccccgactattgagccacaactgcgcctgttgcgcttattacgaaggcttcctacgttgtcgtagcccagatggccacacacgcgttgacgccagatacgatagagcttgtactcgcgtggattgtggtgggtcg

SEQ ID NO: 202125 - DNA, 621 bp, Zea Mays
agaagatggagcacgggaggatgatgtccgatctagcgtcacggcagaaaggcggcccaggcgcagcaagcgttcttcaaagcccaacaccaaatactacggcccacgatgggataattaaacccatttgtaatagatatatatatatataaacccttgtccggttcggtgaacagtaggctgtaagaacacagcgaactggcggcggccacggatctctgatcatcggtccgagataacgagcgagttgctctgttgtgagagaaactacccacagtgatcgcgtgtgtttacatttggtactcagagccaagtctggatccaccacacgagtactggacgcggctctaggcgaagacgacggaaatggctccaccgcgtcccgacgacctcgtgatgcagattctggcgaatctcgaagaagggaacagggagacgcatcggaggatggagaacatgcagaaaacgatggcgaacatggaaaccaccgtgaagagtgtgatggctgaacaaggggagttccaaaagtcgaagccagaagtggaggccaaggtccaagagatcgccgatgtgttgataacgatccaaggcaaggttgattggttcgtcgagaagcaaccg

SEQ ID NO: 202126 - DNA, 597 bp, Zea Mays
gtcgcttacaaacaacagacctgccatgcatggtgccttaacctccgaagaagcagcagggatttggtttgcaaaacggggctcaatttctggagaggtagcaggaacagggacttgatcagctggaccagacggaaaaatcacagaggacgagctaccaggatcgttgctgctgacactattgctttccttgggtggagctgcaactgctgcaatagcattctgcacctgcagttccagatcttcaagacctcctgcacacaggaaagtataacgaagtcagagacttatcctggaaagtttgctgtttgcctttgccctgggttagtccaggcagagttggctgcttcctgatggatgacttgattcctgcgtgatgtctgatgacatgggataactaaccaacctccaaatagatgcttgcctgattcgccttgcctgaacgaggatacgccgtcgccatccttcgacgaccatgcaccttgatcttgcaggtcgcccgactctaagtcgttgcaagtgaaagaacaagccggtcgtcatcaactcttggattagtttagccgctcgtcatcaactcttgcctgattcgccttg

SEQ ID NO: 202127 - DNA, 335 bp, Zea Mays
ctttcgccgcgcccgtgcacaaacccgcgccgtcgaagctggccccttgcctcggagtcttgaacgcaaactcggaggatcgcctcgctactctgcgccgtcaccgcccacctcctcgttcttcaatctgctccctgtttgccgtgcagtggagaccagttatccgatttcccttgtcggtaagacgaagaaccctagcccgctgtcacgagtttgtgtggggaattggggttttgccccgaacggaacccgaattttcatctctttttctctcatcagttggtcgcagatttctccaagaaatctggggacgctgataggaggccgtacagaac

SEQ ID NO: 202128 - DNA, 849 bp, Zea Mays
ctcaacaacataaaatagtggcttctagatgcactcatctctcacatagagtatgatgttggtgactccatattatgtgagattgaggatctagtgccagatggatttaaggctcatcgtcagcttccccacgcccactacttatcctatatgttctcttagctaatttcacatctagaattggcattaacacatgagaactctcccaaggcttttgggtattatatgttgaccaacatagtggatgcgtgcccatgagctataacacttagctagaggggtcaagtgattttagatgagcaacatagatagtagcagacacatgataaggctatttgtcaggttgagcaggtagagttagatcagcttttgtagcagcgatgtgatcgatgaaagctcatacaaggactaccttgtgccaccatcttaacttttgttgccaccatgttcacacaactctaaggttggtgaatctagcaccataccaccatttgtcccaccatcatctaatgaaaggatatctgaccttttagtgtagatgaatgtaggtcaatagaagatggtagtggagggcaaagcagtaaaggcttctagtatagtaggaacactatgatgaagaggtcaaggtagagcagagacattaggccaacctctaagaacactagattaagaggacgtttaacatgtttgagtagatttcaccttgataagactagatctagcaatagatagggccttcaattttacatatttctagcatatccttcaacatacatgagttctttccttagtaccaccagtctagattgcagtccttgcccctctttagaaatactaggctagatatat

SEQ ID NO: 202129 - DNA, 430 bp, Zea Mays
ctcacaggggtggtagacttcggtgtggtgattttgatgaccttgggattggctaaaggtttatctaattgtttcaatccactctactgaccaacctttccaaaacatgcaacactttcatccttagtagcgaagcctaacctcggtctgtcagttcccctcttgaactgactaaccatcatggccaattggggctcactgtatgacacctcgctcaagaccaaccgaaggtatgtgttttcttcctcgatctaggtcttgtcatgtctgcaggactcaatagtagactgcaaactcttacaaagtgcacactgctcaggtacagaggcactcactaagctagccttctcaagcaaggatatcctagtgtctctctctgctagctcagtctgcaagccaggacaagcagtacacgcacctaacaagctag

SEQ ID NO: 202130 - DNA, 873 bp, Zea Mays
tattgactggctgttgttcggtgattggcttgaactgctgcttttctcctcttttacagtaggcagctcaggaccagttccaccagttgatttgcagggctgatccttcaaattggtagtaacatttgtcggttgcacgtgttgtgaatttgacaaggcagataccccagggttcaacttcgcttcagcatctgtgcccccaggcttatcagtcaaaatttttgatgatgaaagagtgggcactggattttttggactgttctcacttgaaccacctcgtttggtaccagcatttgaaatttcttggaaacctgcttttcctgaccaggaaacagattgacctgaaactaaaggtttcacatcatttgacttcatctcagcatcaacacgcttcttccagttctcaacaagacacttagctttcttctgaatctccagatttttatggctacgaagatgattgacagatttcccaatgctacaactttgcaatgcactgagattaataggcaatttagctaatgcacgaagcagggccgagagaagttcgtcaataggcttatctgcttctttaggactagtcccatcaccagacttccctttgtgggcctcttgaagccaactgtccaacacgggaaggccccttgattgcacaaatctgccgaggcaatcaggactctctgtagccgcaataacatcagcaagtataacccgaccactaaggtctatcttctgctcagttcgatcaagttgcataagatgtacaagcttttcaactgcttctgcatttggaagcccacctttttctgttatctttgatatttcagacttaatatcatccaagttaaagtttccaggctcactctcgtcaac

SEQ ID NO: 202131 - DNA, 390 bp, Zea Mays
cactttctatggttgatcatgttgggttcagaagattttgtgcagcactacaactacaaccccttttcaaagtagtgtccagaaacactattaaaaaagacatattggatatgtatgaggtgcaaagactttctttagtgaattccttccaacagtgccaatctcgaattgttgtaactactgatatgtggacagcaaaccaccaaaagaaaggatacatgtcggttacagtacattttatcaatgatgattggaagctgaaatcttttcttttgaggtaatattttctttcgtttcatgttctctactatagtcttataatcttgttgtgatggtgttgctaaaattgatatgttgggttattgtaggttcatatatgtgcccgcccca

SEQ ID NO: 202132 - DNA, 284 bp, Zea Mays
ggtggttgggttattgcagtggccacggcggagcacgaggttttgtctttttcagcatgtgctacgagggttgggccgttggggattgtaagcgtgtacggcagaaaggagagatccataatggacatgcgtgggcctggactttacatgtactcctacttagggagcataagtgggccacgagcccatggacaaggactcgtgattctgtcttacgttacgtatacctgcttcgatgcgtaccggaaatgattcaaacttgcgctcccttccctccaactcca

SEQ ID NO: 202133 - DNA, 411 bp, Zea Mays
acgatgcacggcatttggcttatagcctcaataaggcgcgcacgacccgtaacggcgtccgggaactgcggggttcggagatctcgaccacggccaattcggtgagcgggatccgattcacgcggggaggaagtcctctgtcggggcggcctgcttatatgcctgcggggttgcgcagcgcacggggaggtaaaggcgtctgtttcccaggggaatccgttgaaccggccatggtcagctgcggaggagtcggcggttgttgaggaggaccgcgcgtatttggttggggattcggtgggagagatggagatgacatgcacggcccaccggtcagttaccaagcgtgtgtgacaggggaaacggtggcttatgacaaggtggggcccgccttcagagactgcgcgcgtgaac

SEQ ID NO: 202134 - DNA, 443 bp, Zea Mays
gaagttagttagaaggtggagcagtgttagcgacatgagtattgatctcagcaacaatgagagcgttaacataaatgacaaaaaggacaatggaactcctgttgtgactccaacatctactgatttggaggccaactctaaagcaaaagctgatgtggactctaatggacagaaggatttagtcacatcacactcctggccttatcaaaaggataatgtaccaatggatccgactaccacagatttgtgcccaccctcaactttaagtaatacacttgctcctcatagtgatggtgcaggaaacgacatggttataaactctagcattgagagtgagtcatcctttgggaaagaagcgggggttattcaaggactcacaaggatgtcaaatcatgctacttcaaatgtttccactcgaaaccatctaaaatcttctgcaaagc

SEQ ID NO: 202135 - DNA, 300 bp, Zea Mays
caataataaggtgttggatgaaccagcttcaggcacgggctgactccctatcatctgggttagggagaagagcgaggacgagggcgacattgacggccgcgaagatcgatagactggaaaatcgtagatactggtttgcgctactgaggaagaaaaaatggtcataaggtgttggatgaacctgcagaagctatggaggcgaacgcagcgcacaaggagcgaggacgcacggccgttggtctccggcgtcgtcgtcgccctcgctggagacgccaggccatttgagaggaggcccttttg

SEQ ID NO: 202136 - DNA, 309 bp, Zea Mays
cctgctccaggtaccggcggcggttgagtttatttggcagtaacatcctgttagttttcaccccttctcgtgatttgttgttagcaggtgcttatggctgaggttaagcgcaaccatggaggagggatgcgacgtgacgaggtatggaacggggagcagccgaagcagagattggatcaaagagggctgggcaggagacgagcaaatcgtgagtatttgggtcccctgtattcccaccctgatgtgcaaaattaagcacctaaacctgaaattgagctatttatatttgaatcatttttatcgaagtgt

SEQ ID NO: 202137 - DNA, 315 bp, Zea Mays
tagaaatccatgtaacacatatttggatcttaaatactaagttcttcatttgtaacacgcactcatgtacatatggatgaatacctgatctggacgaaccaaagggaaatatggtggaggtggaggcgatggtgcaagtgttggaggcggcatcccaaaggttggcagcaagacgcccgtttgttgtgacacttgctacaaaatagatgcaagtaaccattgatgaagtaccaaacgaaacaagtttgtagttacaaataacatattacttcaacttaatgagaagaaagcctcttgctaggcccataagtttgc

SEQ ID NO: 202138 - DNA, 901 bp, Zea Mays
tggcaagaacgatcaagagcagttgctgttgtttttggtgggttgagctttggcagtgtcttagggtatgttgtattaagatatatggtcatttttatcgaaattaattaaatattccttaattgaaaaaatatacatggtccccactattttcatgatcctttgagcaacaatttacatacttccatgtatgtgctagcatgtaaaatgctgaattcaactaaattggattttcccccatctttgtatggctctaaacggtagcttacatactttctttagtaattgatggtaatgctgttttgtcctttaagtacaaagctttattcctgctcgaacttgttatgtatttggatgtaaacatagaagaatgcagtggaagttatttagaaggataaaatactaaatctattttttatgaactgcttgagactgttctgctggttttatttgtttcattcttcaaggcacatggatgaagagcaattttggcatccctagtatgatggaaaacttggttgttttctgcatcatcgcaaatcttgataactgcgcaagagtcaaggcctccttaacgatcagatgttaactttttttcttgttatcagaacaacattgctctacatttgtctgtatgactttgcagcttgaagtaatagcagaagctttgctacagttaatgttttatccgttttattacattgcagactcctgtttgcccctcccatcattcagaactttggctgggagtctgtcttttacatatttggccttcttgggattgtttggtaagcaaatatttatcagtaggtaccaaagaatctattgtgggtgaactttattttctgttgtatgcaggtgcttaggatttgaatctcttatagtgcaacggttcggtgac

SEQ ID NO: 202139 - DNA, 502 bp, Zea Mays
gttgagggagaagcagcagaaagtaggaaggctatccgcaggaagcaagataacgagcttgttcactgcaaacgacatggttttctgtggtacagaaactgggttaattaaggtcagtaacaaccaaactaatcttgagaactgactgacaactatgcttccctgagggtaatgtgaaacaaaaaaatttcttgcaaatgtacctacactacaggcatggataccgttgtgaagtgtagaagcaagaaggagcaggtggaaggcttaatcttgtaaatgtaaaggaaagctagagtgtacaggaaacatgaaaaagaggagcataccattgtacaagccctcaggacacaacacagcagccagcgcggttcgttcataaactccatggatcagcaagtttcttcgaaatggatgagtagtaggttcataatgtaaatactaactagtgtgtgcgtgtttgttttagttttgcgaagggatgagttgtggatgttaataaagg

SEQ ID NO: 202140 - DNA, 362 bp, Zea Mays
agttgatatagcgttgaagcagaataggttgatgcttcttggggaggatcacagaattataaaaatccacgtgatgaagcgtccaaaagcggtttccatcaatcctagcatcacgaatgcgcaatgcaggattttggaaacggagatcctgaaggagaacagagcctccactggcagtgaaatcagttactagctcattgccagcacgccgagcctccgcccggtggaggaccaacccacgaatcacaggggcgtgggtcgggggaagatcaacttcatcatccttcccgccttcatcatcactcgtagcctcccacgcctgcggattcgtcgcgggtcgggaccgaccggaaggattccgg

SEQ ID NO: 202141 - DNA, 322 bp, Zea Mays
ataaattttacaaaagggagagaagcagattcatccataataaaggatgacaaatctagattccatcttaatacagcaggagagctcttaatgtatgactagtatttcccgtcctccacttctcttcacaactttgatgttatagtacaaatctataatccatgttacacttgaatgtcgattacaggtgtgattgtgagaagttggagaatgccttgataaagagggaaattaatacaccagaaggagtgattaccacaacagttggtccgaattctgctactattagccgggatggtttagcaaagcagatatactctcg

SEQ ID NO: 202142 - DNA, 345 bp, Zea Mays
tggaagcatggtttaatcattaagaccaccctagcttcatgtctcctttcatttgggagacaattggaagcaaaatcatgtctgaacaacctgagcaaaggtgagtttatcggatgttcaagcaattttgatgatctcatcaaggaattctgcattctaggagatttgaaaatgactctttatctgctaaatacaatgttaaagaaaggcacactgcctaatgaagccagttacagttctgttatatataaactttgtacattgaaggagttcgatcaggcacttgattttcttgctgaaatgcagctggcaagtctaaaatcaagtgaaatctcctgtgatgca

SEQ ID NO: 202143 - DNA, 897 bp, Zea Mays
cctgctcctcagccctggtccccttggactggatcttgggatcagcgtgccctcgccaacaccttcagcacaatgactcttcaaccgccggccacaattacggattggattcctgactcgggcgccaccaaccataccacacctcatgctggtaacatctccctctttcgaccacctaatctcactactccttcctccatcattgttggcaatggcgccactctccctgtctcctcagtaggcgacacggttttgccaggacctttatatcttaataatattctccacacacctcatattattcaaaaccttctatctgttcgtcggtttactactgataattgttgctctatggaatttgatccttttggtgtctctgtgaaggatcttcgctccaagaacgtgattatcaggtccaatagtgctggcccactctacaccctgcgcctgcctagttcatccccatcgacaacttgtgccctggctgtaatttctactcctacttggcaccgacgacttggtcaccccggcatcgatgttttgtcccaactcactagctcctccgtcattcagtgctctcatagttcccttgatttatgtcatgcctgtcaattaggccgtcacactagattacctttttctagttcgtccacctgtactgagcaacctttcgatatcatacattgtgatctatggacatcccctattgctagtgtgtcgggttataagtactaccttgtcatccttgatgattttacccattacctgtggacttttcccttgcgtcttaagtctgatacttttgatgctctttcatccttttttgcgtatgtcacaacgcactttggtcgctccattaaacatttgcagtgtgataatgggcgtgaattcgacaac

SEQ ID NO: 202144 - DNA, 704 bp, Zea Mays
gaggcgaggccggcgcccacggcgaggcggcccacggcggtcttggcgatcttgagatcggtggttaggcgggtgaggacgggcgaggcggtgttggcgagcacggcggccaggccgaggaaggagcggagggaccgctcgtggacgacgccggaggtggcctgcatgagcggcatgtggaagagcgtgacgagcacgcaggtggagaggattccggcgtaagcgacgacggagtcgccggtgggggcgtcgaggagcgtggtggggtccatctcgaccccgagcgcaaagaggtagggcgcgaagacgaagccgccgatcttgccgaagacgaggttgatggcgttggtgagggagagcacacggaactgggcaaggatgatgccgagcagcaggtcggagaagacgcgcggctggtaaactttgcggagcagcgcatacaggaccttgctgctcagcaggatgacgccgaactcgaacaggatcgtgttgtagttggccgacaggatgctgctcgtcatggagcagtccatggccgcccaagataggattctatgataggctacctagctgctcgtcgatcatcaatttcttgttcgtttcgattccgccacgaaggacaaggcagcaagagcggacacaggtacggtggtgaggctgcggcagagagcatttcgcgcggttgcttctttttatctagctct

SEQ ID NO: 202145 - DNA, 1680 bp, Zea Mays
gatggttttagggtaattaataatcttataatgcacaattcaattttatattcttaattttctctaagaatgggttctgtgtagatactaaagggtggtcccgaaggatctgcggtgacagtgaggaagcaggatattaagaaaggctgtgtagacaaaatgtttacagctgttgatcatcataaaaagacgatatccattaatgacactgttaatgttgtggaagggccatttcaggtgaaaattgaactattaatctgacatggatctgcttttggcctctcattttgtaagcaatatgggaatttatgtgtcttttttacttttatttcaaggaaaccttcattttttatcttttaaaaaacctggtgtggattctttcactgagtattgccaatgatagttttaacattatgcgtgtattagtagtgctacattgttcttatctgttattgcaataacaggtagcacacttttgaattccagcatatgtgtttttggagtattcaagaatactgtttattccatttagcacacttgtagtttgattaaatatatttgcagggtaagcaagggctcgttaaacacttgtacttgggaatactgtttatttttaatgaaagtgaaagtgagaactgtgggtttttctgtgctcaaagtgggtcatgcgaaaagatacggaagggtctgggaagctctactactgaaaattcggtatgcagatatgggtatctacttgtcaatgaattgaggatgttctttgtgtgactttgctttctatgtatcaggactttccaactcccatgttttctgaacctgcttatgagcaaaatgagcataggaacagtaagtgtttcttgttttcttctgtaatattttctgcatgtaagtacattgttctgatttccttcataatacagctgaagggccttacaggagcaccagagaacaacttttctctattgggcagatgctgcgcattagaaagggtcctttgaagggctacctctgtcgagtagttaggatatttcggaatgatgtgactgttaagctagactctctactgaaaattgttacaggttggttagcttacctattgttggacttgttgtttgtacaatgactgacttctccatgtgtgcagtacaagctgatcttctttcagtcccagctaatagggggtaagcaattgaagcatgttacagttttctttcctttgccgcttatgctgtaaatcctgtaatgcaattgcaccatcattaggccaaagtacggtatcacttccaatcttccatattagcttctcactatgttacatggcctaccagggataacttgtctggtgctccagctagtaaatttggaagtcaagatacacccttcttcggtaagtgtgagataatactttttgtagagttttgggtttgtcttggatcagtttacattgtaaacaggaaaactccaaatattttactgctagcctgctgattgctgtatattaaaaaggcgtttgctccattgagggatgagttactttcttttaatggaaaagctgaatttaggaggtttataccttacaagatttgagttctttgttctcttatactgctggattgatgtttaaatgatcagacttgttactttcattgattattagggtcagaagcaggcaaaacttca

SEQ ID NO: 202146 - DNA, 1082 bp, Zea Mays
ctggaagttggtcctcgtcaatcatcagaatctctagaagcctctagaataatgcattctaatggtacaccccctttgctgaatgtccacttgagattgtggtatcttttcaaaaaacaatcattttgaaattattttaaatcaatttgctgaaaatgtctgtattgggggcataacagaaaatatcttactgcccatttcaatgtaggtgactagattctggagtgcttggtatgtgaatgaaaaggcttagaaatgtgtcctatgttagtatagttcattaaccatttgctactctatttttgtacttactgttagcttgataactaaaacaattctttccattgtcctaaaaagttcacaacaaattttgacccttaacggccttatatagaatttctataatgtatcaaagtcttattcaatgtattatgctgaggagcattgtattatcaggtaatattttttttgaatgcaatcaaaggtggaaaatgtccttaggacatcactttcttaaattgcctgagatgtttggcgaatgaaagaatcattcttgagaagtatcatgccaaaatgaaaaggaagttcctcagccccatatacactacagagaaaaaactagcctatttcttccaccttttaactatggtagtattagattaacagacatcatctgtagttatatttcttatgaaggtgtgttcagatcatgtatagaatagcagtgtagttaggtataaactaatggattaaacatgacaatgccaaatcctgaagtgataaacacatgattcacaaggtcttgagagttatgggcatgttcttctgggctaattgtggttcattaaccttttgttttatttttggtttcttctccaccttttttcttacactttcttatgcaaacgtgtgagcaatggcttgtgctttgctcagctgcagttcatattactgcccgctttgcttagctgcagcttatatcattgtctagcatatatgcatgtgtattttacctcatctagtgtttgtcttactattgttatgtctactaatcattgacccctctgcagatgattcattcc

SEQ ID NO: 202147 - DNA, 867 bp, Zea Mays
ctgtccagatttagtggattgataggttttgtgaatttgtcattctccaactaatctacttacagccagattttacatcagacctgatgaaacactgtttccttgacacgaaactggtggacgctgcctttgcatcaagaatcaagaaattgatttgcgttttatgtctctggtagccccagacacctcatactctcctctgttgcctgtgatgaagcagatgactgtgttctcttcattaatgctggtggtggtgcaatcgaaagctgtgatccctgtgtgaaggtttctggtgattcattctttgaaggaggggatgtgatagaaacaaatgagagcatagccgaaggtggtgattgtccatttatttatcactcagcaagatacggcagtttcagctacaagttcgacggtcttgcccccggagcttattttctagatctgcattttgctgaaattctatacacgtgtgggccaaaaggaattagcatgttcgatgtcctggtgcaggacgagaaggcaaatatgctaacttgttaattaaaacttataactgtctcccatgatttctattcaggttcagctaaaaaatcatcacttttgaatccacagatactgtctcagctcgatgtatatgctgtagttggagggaacagggcccttcaagtgcgtgatattagggttactgttgagatgaatggtgctgttatgatcaatttcaaaggagtaagaggaagtcccatggtttgtggtatctgtattcgcaaagcaccacttttatcaggtaaggagttgatttggtgcaatttacttatttttttctgagtgataatcttggtcttacactcgtggcagcaaactcggtta

SEQ ID NO: 202148 - DNA, 515 bp, Zea Mays
catatttgcaggttcttataatggacaaattcacggtgaagatcatggcttatgcttgtaagatggcggaaattaccgatgcagggatttcgcgtaagttgcccagatcttgatgaatagtcatttagcaggaaaaatatgtggtggtggctgtgttttcttcctactatatttactggggatattcttactctttccagacaattccacttgaccattcaacttatgtttgtgaagtaaagatgttaagtaagtttattataataacttgcagttgtagaagatctgttcaagagaagggagccaatgccttcaatggatgcaatctactttcttcagccactgaaagaaaagtaatttttgacagatttgtgccttctcttttgtcttcttgagtttactatttcccattggtcatattggatttctgccttttaaacatctctatatgaaccaacagtgatttcctggttcacatgacatcaacttttgctggttcttcattgataaaggac

SEQ ID NO: 202149 - DNA, 548 bp, Zea Mays
attccatatggcattcaacaagtgagggaacttattggcatctcatgtgccttcgatcaagtggtgcaggtttgtcaactaagcatgttttaatattaattgttagtcagcagttttgactgcagtgatacggtgataccccaaggacacttattccccacccaaggacttctggggattggtagatctttccttgtttagggtcagtgtctattctagtttgattgggttaattagatattctgaggtgtggttgtgagacaacattttattttgcatccagttggctggtgttgtatagtacttattacagtgagagcacttctcttattcatcttgcatcatttgcattgatgttctaatgcttgcttatttattcagcggctttcaacgactgtaaaaatggttaataaaggagttcttaaagaccatttgatacttgtggcaaacagcatgacatgcactggaaatttgattgggttcaacattgctggctacaaggcaactttccgttcattaaaagttcaagtgcctttcaccgagtccac

SEQ ID NO: 202150 - DNA, 297 bp, Zea Mays
gaacacttgaagatggcatttcatttgcagcaccactcgtcggtgtagctgcacttgaggaacctcctgcaaccacagcactgctctttgtgggaacttgacgactgctcctgctcggcctcgaagcaccttggtcagacatcagactctgcaatttacaaattagagctgctcaagtcaagctgtgcaagggccaagggacatgctcacggctcacctcacctgcaaggataggaacctcgtacgtggtgggagcaggctgcgccgctgcagtcggactccggtggtcctggggag

SEQ ID NO: 202151 - DNA, 346 bp, Zea Mays
aaatttatgaagctgacaaatcaatatttactttattagagttttaaatacgtatttaaaatatggaacctatcgcacgtgtctatacgcaattaaacatacatatgaagagggtagctggtaaaatgttcgtctttttctaccttggttcggcgacggggatggatttatagcggcaataaggagggcaacagggaagtcgacgatgtggtcaagttgcagcgaacagcagcacgaagggcgtggtcgttgcgcggtgatgaaatccgttgaacgacgaatggcgatgacgtcgggtgagcagttacaacagtgtcaagcgacaacaaaccaggtggctgacttc

SEQ ID NO: 202152 - DNA, 513 bp, Zea Mays
gagctgcaaggtttgctcaaatgtggaatgtcattattacaagtttccgtgaagaagacctcatagacaatagggagatggatctgctactggttccatactgtaaagaccgtgagctcgatatatttcaatggccacctttcttacttgctagcaaggttgctcatcttgctctttctgtattttttctacttactatatttgtggattcagcagtttattgtttatctgctggattgtagatcccaatagcactggatatggcagcagacagtggcggaaaagaccgtgatctgacgaagaggataaaatcagatccatacttttcctttgctatcagagaatgctatgcttcattcaagaacatcatcaatactttagtgtttggtcagcgggagaaagagtatgtcttctcttcccaagattgttatttattagggaaatatgggccccggtcacgtggttgtttgtcgtctctggaattgaagcaatatggcacaggcacactaaacc

SEQ ID NO: 202153 - DNA, 352 bp, Zea Mays
cacgattcgtccgagaccccgctcgacaatcgctcaaaactccgtcttgaccgagcccatcatcgggcgaaggcagcgctcggcagaaatcctcgtctcgcccgagggcccctcttcatggaagagttatttccgcctcatcgagcgcgtcttggacaagaggatagccccgagcccagcctcagtcagaggtcacgggaaccgtgcagacgtgcgcattaaatgcgatgatttggacatctatcccacatgatgtcgcagtcaaacagggagcgatgggaccacggtctcatccactttcagcaactacgatgacgcatgcctgagaaaaacaggcgttgctccccccacg

SEQ ID NO: 202154 - DNA, 332 bp, Zea Mays
gtgcccaagttcggtaaggtttagtagcggggagtctgattttgatttgtagtcattgggaagtgaggaattactgagtccattcatcaagatggacgatgagtcttcgaaagacgacttagattttttgtggcgttagatttgtctatggtggagtctatagcggcggagtcttcgtctagggtttccccaattgaggcaaggtgcaagagaaggatcggagtgctgaaacgaagaatgggagcctttggcgagacgttacaaggcaccagaggctcccgaaggtgtcgccatatgggaatggaggggccttgcccacgggcgggaatgtg

SEQ ID NO: 202155 - DNA, 355 bp, Zea Mays
catttttcggtgtcggagtggtttcttccccggcaaaacgaatcaacttcttctcagcttctctgaagtagcccagcttcgtcatcatgggcatatcagcttcataaatggtagattttccaaaatccaagtggctaggttttgacgggatcataatgctataatcttcttcttcttcatcagcaatttcttcctcaacatcttgttcagtttcagcagcaggtgcaccttgttcaatggcttcctctgtcacaactagtctcgattgtctcatcacttcggagatcggggcagtctcggtggcttcgacctgctctccgtcgcgggtcaccctcgcagttgaacgtactctggc

SEQ ID NO: 202156 - DNA, 336 bp, Zea Mays
cacccttgtttcttaatgacccataagcggtcattttattttgcacccgtggtaatctcgttgtttccttgtaactttcttcgataatgaatttttacttcaactcttctatcggaacctcacttatcttatccttaattgttttctccatttcttcactttgcgagtcctgccttaactctatccatggattatgcttttcatcattatcacctttatccttatcacccctatatcttaccttgatgtttatcttataccaacctttaaaatatcctcttttccatctcaatctgagagttgtaacttacctacttttcccttggtcgtatcctc

SEQ ID NO: 202157 - DNA, 442 bp, Zea Mays
gcgaaagcgccgacgaggacccatacgccgcggcgctgttccggacgatcatcggcggcatgtgcctcgccgggatcatcatttctccctctcagaacctctcgaaccctaattcctgccgcctcagtagcttctttccatttgttcactggcacatgcgtagtatctatctcccgcctcacggacaaagaacaggcggcgccaatcctattcctatatggagatgtataccttgcctgccaagtaacaacacgaccaacaacagatctagcgatcgacaaggtagcccagacaaccttcgctgcgagctgacgactggcagtgagatctagcagaagagctacatatgttcgtgtgcctatgcaaaaatagaactccgatcgatctctggctgcatgcagctctcaaggcgtgcgtgcagcaaaaactttgcaagctcaga

SEQ ID NO: 202158 - DNA, 339 bp, Zea Mays
gaaagctggaaatttaccatggcatcatgggtaccagtaccactaccacagcagatgggtcctggcctggcccacgaactctgcaaggttccttctcccttgcgccctgctagaccagaccagaggacgagatgtgagcacgccatttcaattcaattcaagggcgcatgaacgaagcccactcggcgctccaaagaatcgattcccacgaccgatcgatcgatcgccagccagcttttagatttgcccctggcactggcaggcaccgtcgttcgatcgcctttgcacacatatgcacgatccctcgtgctttcctctcgtttgccagcttcccgcgaa

SEQ ID NO: 202159 - DNA, 324 bp, Zea Mays
ttgagttgaggcctgcttcaccgcttgacttgagtgcttgacggcccacttgtcagccacttagcctgcttgcccgtgtatatgaattggcgggtagaaattactcacgggtagacgggtatagatactacgcagccgaacccgacgtacccgcgggtgacaaaatatttccacacccgcctctataccgggtaaaacctatcgagtttgcgggtttcaagtacccattgccatctctacttctggttggttcagtgaccaaaccagtcgactgggcccagtggtcactcaaactacccagggattaggcccatcaggaatcca

SEQ ID NO: 202160 - DNA, 271 bp, Zea Mays
tggtgcggttggaatagaggcgacgaaccaactcgacttggtggttgattgtacttgattcccatgttcacatcacctgttctgcccagtgagtcatagacacggattgtgctctactcccatttgtgacttgttttttcccccactgtcaagaacatcggtctacactacacccaagccaggtgccagaagcctggcttttccaggttccagcaagaggctctgccaacccccgttatcctttcgtttaaggctgcatcaatatcctgat

SEQ ID NO: 202161 - DNA, 663 bp, Zea Mays
aatagataaccataacattggcttgatgtacttacgtcgcaacctaatggaagaattgattggcgatgttgacacatttgatgagaaagttgttggatcatttgtgaggataaaaatacctggtacagggcaaaggcaagacatttatagacttgtacaaattgttggtaagggttgttttacttcctaattggtattgtttgtcttaactgcattatactaaatttccttctatctttttcagggactggaagatctgcagaaaaatataaatatgggaaaaggactactgatataactctagagatactaaacttagacaagcgggaggcagtaactattgacataatctcaaaccaagagttcactgaggtattttttcttctcagtttgaacttagtagttttactagtattacgcagtttactaaaatctagtataaggccgtcttccactttggatactgttaatgttaactgctgttggaagatccctgaccttgctacttgacttcaagggtacaaacatgcacttgatcaataaatttgctactctattttgctcaaatttcatgcctttttttcctgattctcaatagtttttttcttttctaggaggaatgcaaacgcttgcgtcaaagcataaagtatggattcattccaa

SEQ ID NO: 202162 - DNA, 324 bp, Zea Mays
gctgtctgaaggttcgccggatgttgcatctcgacgtcggatgacaagggctgacccaacccggcattgaacaagtcgatttggtgctgccgggtcaggttgtcgcagcggcacaggagagccaagacctggcgctggtattcctccaccgtgccggtacggtggagctccttcaactccccaagcgcgttggagcggatgggcgggccgaagcgcatgttggtgaattcgacaaagcgcggccacatgatgatgccgagatcacgctccaactggtagtaccattgtgccgccgtgccgtcgagatggagagaggccatccac

SEQ ID NO: 202163 - DNA, 346 bp, Zea Mays
cctggcttgcagactgagctagcagagagagacgctaggatagccttgcttgagaaggctagctcagtgagtgcccctgcacctgtgcagtgtgcactttgtgagggtttgcagtctgcccttgagtcctgcagacacgacaagacaaggatcgaggaagaaaacacataccttcgatctgtcttgagctgggtgtcgtgcagtgagccccagttgggcatgatggtcagtcagttcaagaggggaactggcggaccggggttaggctttgctgctaaggatgggagtgtcgctcgctttggaaaggttggtgagtgcagtggtttgacaccttcagagaaacctt

SEQ ID NO: 202164 - DNA, 358 bp, Zea Mays
agatctaactcaaccagtagagtcatgatggattgcataatctgtctttccccacctaacatcaaacaaacttttgacctacatcatatagtccatctcacccataactacttcgaccatatgccccaactctgttgatatatagtaacatcaaattaatgagaccaaggctggaaaaggaaaagatcaacctcgtcaaggaagaagagaagtcgaactcaaccttcagatgcattaccacccaacacggagttcttcctcaccataaactttcttacccctggctattcttgccctaacctatccatcttttatcccacataataagtatttggatacctatgctctcataatcacc

SEQ ID NO: 202165 - DNA, 335 bp, Zea Mays
aaataacatctcacgactcacgtgttcctttgcgtgacctcatgtgaactgggcatgttaatttcttacatatgctcattctccagttcaactctggacgctggatgatagatgcttgttaatgaataatgcaatatttatttggtgctgtttaattaaaatcctgatgtattaattatgctgctgtccttctagtcattgcaaaataaagctgcgaaacaaaacgttgatttattgaacaaagttgaaagtcttataattgagtttaaacatgtaagagacgactatgacagtttactgtcttatattgcaacatgcaacgaaatgactgaaaa

SEQ ID NO: 202166 - DNA, 358 bp, Zea Mays
ccccagatggtgcaaccgaactgagtcaacacccatgcgaagaagtgagataaggtggggaaggtgtcagacttacgacggaggggaagagtccagaggtagtgagagaagtcatccatgatgaccagatagtattggttaccggaaaagctcggtatcaaaggggtgagcattgtgggacatggaagaggtgaagggtaagtgattgtggtgaccaagctgacaagcatggcaaggcgaggtaacgttgccgcggggtggggaatgatcaaggtggacgagagtcgagaaaggacgtcatggctggggtggccaagacggtggttccaagtggaggcagaggcagtggtgacgtggg

SEQ ID NO: 202167 - DNA, 280 bp, Zea Mays
gctggactgttttgatccagaatttgcaagggatcctagaagtgttcgtcttggcttattgacggatggattcactccattcagtagaagttcaactccgtactcatgttggccggttttcatgttggtatgtccgaatactgataggaaactctaattttgcattgaattcaattgaaattaatgtttgacagggtcactatattgaaaatttatgagagaaacatggactaaatgtggaccagatgacaactgactttgacacagcgttagcttatgc

SEQ ID NO: 202168 - DNA, 333 bp, Zea Mays
gtgcgcttttgtcactgaattgagcttctgtttttttgcatgacactctatgggcgcatgtggcatgctggtctttcttgttcattgttgagccggcagcttgctggcatgctgtagtgttacgaaacatgtgaactttagcactgtggatatactatatataattctaacacatattgtgatactgatctcaggctttccctggtaatgatacttctgaagattgtggttgttgttatggacggtggaaatggttggttctgatggttttggtcttttgcggattgttattgtttttttacgaggggcggcgcgatccttttcaatctcgta

SEQ ID NO: 202169 - DNA, 397 bp, Zea Mays
catccacttcgtcgtcccccagcacacacacacccttcctccgctgcctcagctatggcagcgccgagctggatccggctccggcaggcgcgtgcaaccctcctcatcctgctgctcctcgccctcaacatctccctttcctccgccgccaacttcgagggcttcgactccgacgaccttccctccgcggccggtggcctcgatgctgacgatgacgaggaaggtctcgacggcgtcgacctcccgccccctccgcccatctccctctccacctctgcgccatcacctcccgtcacgacgacatccgcgccgaaccctaaccccgctacgcgtacgcctcgggaccccaccccggcgctcgacctctgggacgaggacgagttcgagggcatccccg

SEQ ID NO: 202170 - DNA, 362 bp, Zea Mays
aagctatcgagtcccattctacactcgacagaatggacaacccaggttcacagataccttacacaagttcagttaccttacacaaggtaactactacacagataccttacagaagctaactcttacacaaataacacatccagtgccattcaacaccacccatattactctacttcatctgacgatccgaaagctcttcagaactgacatcatccagtgcccattccccaccacccatatcttcatcttcaccaaattggttgttgaaccactcagataatggtggcgacggaccagcttcgagatcttctaaacgttgtgcttcgtcctcaagtgattgagcaagctcatacacgcgccac

SEQ ID NO: 202171 - DNA, 337 bp, Zea Mays
gagaggccagacaacgccgaagagaatcctcaaaggcgatcctcgaccgaaaatccaacttggccagatccatccagaaggaagcgagaataccaggggcagagaagcgagaggaagtagatcacctcaacgaagaaaccaccggggagacgaggagagcacaggtcaggacgggaaggggacggattccagccatcataggtgctcttgttcttgatacatacttatgttaccccaatatccttttgattatcattatacgatgtttcttataatatgacttccatgttctccgattcttgatatgcctggtaggacatgggcatgtaaaatatgg

SEQ ID NO: 202172 - DNA, 344 bp, Zea Mays
tatgaacctagctggacagaaaggaccatcaaaacagagcccaccttatccatccatctctcctcccagccacacgcaccagttcgcagaactccatcaccgcacgactcttcgtcccttctccactgccacgctactgtctcttccttctccgtcgcggccagcctcatcccttccgtctgactgtcgctgcctctgccgctgccagcctcctctcaaccatgcctatcatatccgctgcattgcagctgcatttcccatctccatcaccgcccatagactgcctttgctgctcgacgtccacatctccctggcacccaccatacatgcctcctcccccgccg

SEQ ID NO: 202173 - DNA, 347 bp, Zea Mays
caaaatctggaatagaaacggaaaaagggaaaaatcacctttgcgcttcagtccctggaacaggccacgactttattccagcaaacaggtccttttggtactattgaagtgggtcacgggatgcgcagttagccccctgcgcttggtcaaatttgtgcccgcggtccatctgtcttctacctccatgtatctccacggggagagcaaaatagccggccagaggctcgccggcggcaagggaaagcgaggggacgtggaccacggcatctccaacatccgccatgctcggtgtcggctccagcccggccagaaacagctcgagcagacgcgaccacggagctgcgagc

SEQ ID NO: 202174 - DNA, 349 bp, Zea Mays
gaagtgtgttaattccttttggagagaggctagtgatgtgcgagaacacttgatatgtgatggatttctaaaaggatacagaatatggactttacatggagaagctagctcctcttttacgaaccatggtagttatgatgttcctgatttcattgagcagcctagtgaagatgatgagatatcagacttgcttagggacttagcttgtggtttagatgacagaggtgatatggaagatgacggatcttttgagccacctaataaagatgaaacaactattcataagctagcagcggataatagtaaagaattgtacctaggttccaagtactcaaagctacgttttcta

SEQ ID NO: 202175 - DNA, 399 bp, Zea Mays
aagaagtggtgcgccaggtgagaggcgaagtgttcttccccagactgatccgagggaggagcacttccagaaggatcctgggggcggagggtaagaggatgattgacccagatccccatgggtagggaggcggggcaaactgctcgcgatcatcgaagtaggtttcttcttcttcttcgtcgtctgctgacataaagggcaccccgtaggcctgctggtgccactcattgatctctaggggaggaggatggagaggcacgtcaggcgagcgaggggcaaagggcatacccatggtggaagcttgatgacgaagattgtcgtcagtctcccgctgacgccttgccagctcatgtacatcagcagaaatgttccggcacatagagaaaaatgccgcaatcc

SEQ ID NO: 202176 - DNA, 374 bp, Zea Mays
caggggcgagtgcgccatgcacggcggccgttggacggtcaaccgaagcgagcatgaagcgggcgagcgagatctccgtggggaggatagacccgacagagagggcccacggtcagcgacccagtgcctgtgagcgcgcgacgcagatgaagtgaaggcatctgacgagttggtcccacctggaagtgtcccaacaggaaaagaaaaggaagaggagccgagtgggctgggcgcgctgaggaaagtggaagcgggccgaaatgggtattcacggcccaattaggtttcttctctttttctttttattttctgtttcatttcatttttaaatctctattttgaattcaaacttgtttgtgagcctcataactgag

SEQ ID NO: 202177 - DNA, 448 bp, Zea Mays
cagagcttgtgcatgtaacaacttttctaagtcaactatcgagggtgatgttgtggttgatgtcatatggttatcggtagtctgctcatgtgctataaattctgctaaatcaacttgttggagtctaactaccacttgagatgttgcttgcagaaactgtgcatgcgccttcttgaactgttccatctgagacttagctggaggagttgctaacaccatgcattctttgcacttagtgacattacttgcaattgacattccattgtctgacatctgtatgggtatggaagaatgggagggacgaaagggttgaacaaagacagattatagagagcagcaaaaacccatctatctaaggtttttcctagctaattgatgtcattgtggacaaaagtcacacaatacaccaacaatcattttaaagaagcaaatcaaacatgaacacaaa

SEQ ID NO: 202178 - DNA, 404 bp, Zea Mays
acgttggagtaccttgtaaggaccaaaatatatgtaggagagcttatggttggcgcgagtagccactgaattctggatataaggctgaagcttaagatacaccatgtcgccgacagcaaagacacgttccgataggcgtttgtccgcttgaggcttcatacgttgctgtgcacatagcagatgatgacggacatcatgggtcataagctccctctgctataaccatgattgcaagtctgacaagggaattgcatctactgtagatatacccaggtggtgtggatgatagccatacaacacctcaaacggagatttacccaaggaggaattgaatgaggagttgtaccaatactctgcaagaggcagccacttgctccattggctcggttgagaactgacaaaac

SEQ ID NO: 202179 - DNA, 344 bp, Zea Mays
caatctgggcccacagacccgtgacttcacccggtccgtgctgtggccatggcttcacacggcttttgcctcctctactactactacgcgaatacctttcagggaggacaggatggtgactagtcggcagggaggaaaaataatccgcgactccgtgtggccagctcggccgtgcccccgaaaaggagaagcacaagcacaattcggtgcccggcctaaacgtccttgccattgccaaaatcggatgcgactggcaagtggcaacaagctcgctcatcctcttcactttgcaggcgacctgtccaccttcccgtgaatcatgtcatgtagggcgagagacgaag

SEQ ID NO: 202180 - DNA, 384 bp, Zea Mays
cgccagtatatattggatattttggagcgtgcagggatgagtgcttgcaagccttgcagcaccccggtcgacttgcactccaaactgtctgcagatggttcccccggttgccgactccacacagtaccgcagccttgctggtgcattgcagtacctgattttcactcgccctgatattgcatatgctgtccaacaaatttgcctttacatgcatgatcctcgggagccacatctcgctgccctcaagcgaatactacggtacctgcagggcactcttgctctcggtttgactatgcgtcgttcaccgccgactgagcttgttgtctacactgatgccgattgggccggctgtcctgacactcgccgatcgacctctggttatgc

SEQ ID NO: 202181 - DNA, 369 bp, Zea Mays
atgaatcgcggtgctaactttcctttcatttggaaccttttgacaccacgcatcggggagaccttgaggtatacgaaatctccttcctcaaatccgagttctctccgtttgttgtctgcataacttttctgtcgactctgagcttcaagtaacctcttgcggatcagggcaactttctcttcggcttctttaacaaagtcgggtccttctagtatcctttcccctacattggaccacattaggggggtttggcactttcgtccatacaatgcttcgaacggtgacattttgatactggtctgatggctgttgttatatgagaattcggcatacggcaaactggactcccaattcctgtcgaacgtcaac

SEQ ID NO: 202182 - DNA, 367 bp, Zea Mays
tctcatcaggtggttgatggataaattggatccacatgacatgaccatacgcctaggggctggcaaggaactgaagataacaaaagagacggttcgtctcattttgggtttgccatgtgctggggggcagggagtttactgattggtacggtgaagtggatgctgctgcaaaactcagacgtgatctcaaagttggtaaagaagaatttgatgttgtcaagcttcaggaaaagatagtgcttggcaatgatgatgagttatcaatcagatgtttttttctgattctattcaatcgacttctttttccatctgcttcatggggcattacaaacaatgaggtactaatgacttcaaacatggcccgaat

SEQ ID NO: 202183 - DNA, 380 bp, Zea Mays
attttgcctgcgtccccgtgaatggctccaggggcgggttgctcgtcgcggttcgtgggctagacatctccatcgccgacatgctggccggttcctactcggtttccgtcaagctctcgggccctaggattggggatccttggtggctatccacggtgtacggaccacaaggggtagccgagaaagagctgttcctggaggaggtcgccgtggcgcgtgacgcctgcgaagggccttgggtcgtcatgggtgacttcaatctcattcttgacgagactgacaagagcaacggcagggttaaccggcggctcatgcaggagttccggcattgcgtcagtgatttggagctccaggacttgcatttgcacggaaggttgttc

SEQ ID NO: 202184 - DNA, 318 bp, Zea Mays
cattttcccaacatgtgtcgtgttgtgcaggaattcgtcaggacgtgccaaacatacaagtcagatcacctgcgaccggctggtctcctatagcccctgccgatcccagctggggtgtggtcggacatcggcatcgacttcatcgaagctctgccccgcgtgcaaggcaaacggtcattctcactgtcatcgaccatttcagcaaatactgccacttcatcctgctggcgcacccatacacggcggaatcagtggcgcaagcattctgcgccgaggtggtgaggctgcacggcatcccgcagtccatcctctcggacc

SEQ ID NO: 202185 - DNA, 461 bp, Zea Mays
ttttgccatcacttagagcaactatacatgtgagaacgattttgtttccatgtttagcacatatcaccaccgtgaaatctgcacatcacatcgtctattaccaggagttggcattaggactaaagagtgaaatacttgacaaaatgttaggcctaaatgtgttaaattttgttatgagtctagtcaaggctagtagccactctgcacatagacagaaacatgatccccattcacctctactgggccgcaccaaagaaacacagcccacgcgacctatgtcgtcgtcacggtttgcacatttttatgaccataccggccagccaacatagcttctaccggcttataagccttccttcttcagagaaagcaatcgtggtcaaatgctcctgccagtgtcaaattgaggcaactttttgcgcgagcagacgtgggtccggtgtgtgcaaaactaaggatggctg

SEQ ID NO: 202186 - DNA, 344 bp, Zea Mays
gctggaagtgactgcttcagagctgacaatggctgggaaggagaatttcctcaggatgtccgtcatctttgggttgagaactgtaaactagacttgattgcccacaagattaccagactgaaaaagctacgcaccctgatcatttctgctggtgagaatgacacgccagttgaggaaaaagccttgttggaaaatattttcacgggtgtgacgacattgcgggtgctccagataacaccctggacagcaggaactctctcattcccagcatctgtcgggcggctaaagcatctacgctatctttctgtcggtaggcatattggcggtactaaggtgattctgcc

SEQ ID NO: 202187 - DNA, 354 bp, Zea Mays
cattgttgttgtcaaacaacaccagatcgtgatgggtcttacttgggtgtcgtcgtcggtcggttgtccatcgttgcatcaaccttctcgtcgttgggtcatgtctcgtcgttcatctggtcccctcggcatagtgtcttgtcttgcccactagcgctgcatagcgcctaactatcttgaggcccacggcagtgtccctctactcgaccatttgggcgaactgaagagcagcgatgtggtccgcctgggtctggcggcgcgcgacgttagctgcatgggcatggtctacctctgtggtgtgggtgcactccgcctcatgatccgcctaggttgcgcaatcgcgctctgcctcga

SEQ ID NO: 202188 - DNA, 445 bp, Zea Mays
tgaacatgcatggtcttgctccactgcggaagctgttcttaacgactcatgtcatattgttgagatccattctgataccctgatgaaaaagagtctctcatcctttacagtgcgagcatggtgttttgattttaaaaagttacaaaggcagatgacgctacacattattgagagagggctgcagagcaatgacaagggctgtttatcatacaagatcagtatcagtgcaaccatggtcaatcctgaggacacggatttggggggattgcactcctcgcccccagatgacgctcatcagccagaagattttgaagatcaggatattggcaacagtatgttccctcgtcctcctcgtctgggtgccccttctgctggtcggcagtcagtccattccaggctgggaccacagccgccacaaggaagaggaggggtctcgcgtgccaac

SEQ ID NO: 202189 - DNA, 311 bp, Zea Mays
caaaagaggagctcatcttcgagatggatttaccatcgtcgctggtgagagggatctgaagaggaggaatgagagaaaatagtcgccggtgagagggaactagagaggaggggcaagagcgaacaaccgccaatgagagggaactagagcgctaggaagcaactgaagggtcatgcattcatgcaaaactggataggtgttagcagcggctattcatatggaactatagctaaaccgaaaataggaggcccaaaaaaacctaacacacttggtcggtttctagtccaaactagacaactaatcgagattag

SEQ ID NO: 202190 - DNA, 510 bp, Zea Mays
cttgtggatgaaggtgcaactcttccagaactccctttgaagtcgccaattattgtagcttttccagacaaaccttccagtgctgatagatctatctcgacaatacctatcataccaatccctagtgcttcaccgccaaacagttgcctgcaagcatttggcttgcaaaatgatgatctgacatttgatggcactaaacgaatggaacaaacagcattgggagttccttatgaacaaacagcatctgttcagatcaatagccaaaatggacatattaccggttttctggatatggtccctcaatcatctgttggtcccttgtttcagcagtcggacattcactgtcctgatggtactggaggtgtgaacagaaaaatgaatttacaaggcagcctacctggaaccactagaaatgtgttggttaatgactttagccatagtgtatctactgctcatccgacaaatttggtgtcagctaagggtgacggttcacttgccaagaatcctgag

SEQ ID NO: 202191 - DNA, 387 bp, Zea Mays
ctgcctccttaatcctgagttggtgataccctgacctgaggtctatcttggagaagtatttggctccttgcagttggtcgaagaggtcatcgatccgagggagagggtacttattcttgattgtaacttcgttcaaggatcgataatcaatacacatcctcatactcccatcctttttggtaacgaaaagaacgggtgctccccagggagacaaactgggacggatgtaccctttttgttgtagttcggaaatctgaagtttcaattctgccaactcagtgggggccatgcggtatggtctctttgcgatgggtgcagtgccgggaatgagatctatatagaactctactcctctttctggcggcatcccgggcaactcttctagaa

SEQ ID NO: 202192 - DNA, 443 bp, Zea Mays
gctatctatttatttgtttataaccgaacaggttgttatctatggatctctctaccccatacttccacggacaccggctgctacaactgatgccaagtactactgcatatatgctgcttgagctagatgctgctgcttcacacctgcttctgctagctggtaccaaacactgcatatatgctgcttcatgcctgcagaactgatggtgaattttatgtgtctgaactgaattgtatgaactcaggtgatgcttttgtgtgaatggaataagtgtgcgaaactgagaagaacagattgtgtgcataatcgtttgggctaaccgtgtgacagtttgtctgcataatacttgtccgaaaaactgattcgactgactaacaattcgaaagattgtctgcataacagttgtctgacacactgagaaactgaaaagcatcacctgagtt

SEQ ID NO: 202193 - DNA, 504 bp, Zea Mays
gcaggcaccaacgcctgtgcccgcgcggagcagggacgtgagggtgctgcacgaggtgctgcccagcttgaggtctgccaggtcgctgccttttgttggtgatgggggtcttgatgcgaggaaggaggaggtggcagcactggactgcatggaggacgggtctccggaggcaaagcactgcacatcagtagaggttaagaagggggacttggtgcgcccagatggggattgcagcacgatggagttcaatgttgttgggcatggagttgaggttgcttcatatgacccacaaaggctcaaacatgtggaaaccagcaatgaggctgatcaaaatgaggatccagggttcaaaattgacgaagaggtatcattcaagcctgtgctagtatgtggtgatgtcgctgaggatcagactgttggagtgaagactgaggtggcagtctgtgatgttgctgttcaaagggagaatgtggaagacaaacatgatggaataatcaaagccaa

SEQ ID NO: 202194 - DNA, 455 bp, Zea Mays
gctgctaaccagcttccatccccagcgtaccagtacatttcgccaccgccttaccagcagcagcagtccatgcttcccaatagctaccagactccaccacctccacagggcacggagtctccagtactacaaccccgcaagtatctaccacctccatactactactacaactctccaccagcaccacaacaccaccagcacagctacgtacctccaccaccgctagcttaccagtaccctccacctccactcatccacaagtcgccgcttcttccatcgtcgtcaccagcggctccataccactacaactctccacctacctaccagtatccaccacctccgtatagctaccaaccttcgccgccacctgccggcctgtactctccaccattattgcctccaaatgctccggaacacctgcatccaaatgtcccccatgcgaaatctccacagcc

SEQ ID NO: 202195 - DNA, 284 bp, Zea Mays
gcaaaaatattttatggctttttagtggataggacgaacacaaaatatatgtagctaagggtaaagaatcctaccgtggcaactaaggctttgataccagatgatgcatcacgatgctcgatcttcacgacgtaggatcgatcttcatataactagcttcgaagaagccaagataacttgctgcaagcagcgataactagtgcaacctgacaaataaaactcgaagccaaccaccgtctttgatcggcaacctgaatcgaggatttgcccaaccacactctcaa

SEQ ID NO: 202196 - DNA, 343 bp, Zea Mays
gtcgtgccagcagcatcaacgacgacaatctggtgaacctcgttttcgggagtcacctcccctcaagctaccgacacccttcttcctcacgcgcgtcagtaggcctcctccccatcccactttagttcactgccttttagagccaccgacgatgaggaacaaccccgtggttggtgccgggctgcctccctagcggtgggcattgtcggatgcgcgcatcaatggggccactcaatccatcgccaccccaccacgtcagattatgtacccttggctgctccgtatgggcagcgacggtgtgtgatggggttggggaccgtggttgtgggttcggcaacactcc

SEQ ID NO: 202197 - DNA, 355 bp, Zea Mays
ctggcgcactagccaccgccacagcctccacaacaaccagacatgctagcagtcgtcgtctccctgtccatgtctagcggcagtgcgtcaacctccacctttcgctccttcaacgccgaccacctccttgcccgcgtcgacgcccaacaacgcctctctctcctcttcaagcttctcccgccgcttgcgtcaaaatccccttgcctggttgaatccggcgtagccccttgcctggttggacctgccctgttgccctcccccttcttcgtcgccgccatcattggatctgttgctgccgcggccttcccggccaaatccaccgttgctgcagccatcccagctggatccgtcgtcc

SEQ ID NO: 202198 - DNA, 442 bp, Zea Mays
aaaggggagtccaaggcagccaggttgtatctagggaggccaagagctgccaggtcaattgttacatccctctgtccatcctgcccaataagatttttgtagaagaggtccactgctgcagctttctcactatgctcagatagaatgtggccgccatcaattaacttggcaacaaaattcctcttcttgcaatgcctagcatgaatgtgaaaaaactttgtattcgcatcaccttctcctaaccatgtgatcctagatctcagccttgccatagtacgtttgaaagaagacagcaacagtgagtgttttttgaggcagttcttgaaccaattttcagctggggagagggctctttcgtcctgtgccatctcaaacctgtgaagcagttcttttgccaaggctaactgcaatctcacatggcccacctgtttgtcactccagc

SEQ ID NO: 202199 - DNA, 338 bp, Zea Mays
tttttgggctggaatgtgtatgacctgccttaaccataagctgcgacacacctgtgccaaggtcttcctctcttatgtgtaaggcctcatatggatcttaaggtgcaatccatgtatttcatgaatgaaatccccaatctcttctcctgccatcctcatccgcacatggtcaaccaaccgtgcaccagcggcagaccttcccaacagccactgctcgtagcctgcatgagagtgctgccaatgcgatatccaccagtctgaaacccgatgctgttggagcccttgtcccgagactccaggtgttagatcgcatgagaggcactgcacgccgctgctgg

SEQ ID NO: 202200 - DNA, 433 bp, Zea Mays
gcgaagtatggaatgagtttgataaacatttgcaaggaacagtggtgccagccacagcgagttattggtcttcgtgcttctgtagatgaagtggaagaggttttaatcaaatggtgtggtcttccttatgatgaatgcacttgggaaagatcagatgaacctaccctgatgaaatatagccatttggtcactcagttcaagaattttgaatgccaggctttggataaagatgtggtaaaagattatgcaaatgcaaggaaccgacatgagcttaatgtgttagttgatcagccaaaagaacttcagggcggcatgctcttccctcatcaattggaagcgttgaactggctgcggaaatgctggtacaagtcaaaaaatgttatccttgctgatgagatgggtcttggaaagacagtgtcagcttgtgcttttc

SEQ ID NO: 202201 - DNA, 280 bp, Zea Mays
atagattcgtagaggttgaaaacgatgatggtttgaccgtggcgacggagattgcacgcaagcagcttcgttacatgcctcttatacctcggttggaacatttgttcttctccaagaatacaggcagacacatggggtggcacaaagaaggggtacgtgagaatccagatgtcatggcacacccagctaatacagatgcatggaaggcactagatgacttagattctagctttgctgttgaagtgcggaatgtccgcttcgttttggtaacagatggttt

SEQ ID NO: 202202 - DNA, 499 bp, Zea Mays
cgagaagtagatcgtccttggcctcagcaaaggtgggaaaaggcttcaggcgggtgaggatgggcgtcacacgatcgaagcgagggctcaaaccgcgaaggaggttgagcatgaggcactcgtcggtgatgggggacccgagggtgcgaagagtgtccgccatcgtcttcatctgacggcagtactcgtccacagagagatcgccctgagtaagctgacggaaggcggtctcgaggtacagaatccgagtctggcggtggccgaggaactgggcctcaagagcaccccagacccggtgagcagtggcgtccggaacgcgaacgatgtcctgaagttcggccgtgagggtgccatgaatccaggagagcaccacctcgtccatcagaagccaatcctctgacgggtcagggaccgctgagaggacgtggtcggcgagggcgtaacggcgaagggtctgcaagacctgatcgtgccaccgggggtactgagtggaggccgg

SEQ ID NO: 202203 - DNA, 397 bp, Zea Mays
tctcaaagaaacgatcatagtcaaaaggtgcagctctttagcactttgctgttggacctgaagatgtggagttcatgcaactatattttgcagaaaaagcttctttcttcacttgcagacatggtttttgcagaatctacttgcatgcgtgatgcaaatgcactgcaaatgcttcttgatgggtgcagaaggtgttactgggtagttcatgaagcagattcaattgataccttcacacttactggaaacgagagacctttgggaaatgtgaatgctctggtcgatgagcttttggttgttattgaactgttgataggagcagcaccttctacattggcttctgatgatgttcgttgtttggttggatttattgtagactgcccacaacctaaccagg

SEQ ID NO: 202204 - DNA, 290 bp, Zea Mays
gcaaacgccggtggttttgggctctccacttggggctgatttaggggtcttataggggtctttttgtaaagttcctttaatgtcttttgtaaacattttggtactcttaaactttggttaaggtttaaattatgaaatgtgcatttgcttgatctttctctcaactaaaggctttaagagagaggacccaaggttcaatcctaccttgcccaaggtgatattgcctaaaagcttgggtaatgctttggcccttagcatttcttaaatcactcatgcttccaaggtcttaa

SEQ ID NO: 202205 - DNA, 427 bp, Zea Mays
caaaggacaacatttcttggagatggacggcagatgggcagtacagtgctagcagtgcatacaaaatacaattcgcttccaatttcaacagaatgaatctctgccccatttggaaggctaaagtggaaccgaagtgccgtttttttgcttggacgttactgcataagagaattctgactgctgataaccttcaaaaaagaggctggccttgtaacccaatctgttgtctctgcaactcagccccggaaacaattttgtacttatgcaaggattgcccctttagtagagaggtatggaacaaagttttgtctagggccaaccttcctttcctgactggactccctagtggcacttccttgtacgattggtggacagatctgcgtagtctttgcagcagacagataagaagggacttcgacggtctgct

SEQ ID NO: 202206 - DNA, 272 bp, Zea Mays
ctcggctgtgatggagacttggagaagaaaagaggtagagacagaggagcacgaaggcttctcgatagagttctgatatttctgcttttgatgtcctttacagatggctcagcatgtatttatatctccttaagctctcataacctatagcctctctagtacacatgaccatagtctaacacaactccatccatggcgagatccctcgagagctatgcaactgctccagcctcgcccacctcagcctgggggtcaaccagctggagggtgag

SEQ ID NO: 202207 - DNA, 1600 bp, Zea Mays
cccattcctaagtactttggtgacatcttctgtgatttgtgtcttcaagatacgttttgtgaatttttttgttgcttccaatgccctgacctgttaacaatttatctgcttgttttctttctaggactatgatgtcgaggatacagctttacctcttcaaccatcgttgaactatactgcaccagaattggtccaaagtagagattctaaagttggctctgcttgtgatatgtttagctttggatgtttggcttacaatctggttgctcgtagaccacttctggactgccataacaatgttaaaatggtatgttttaaaatctgaatgttgacatttacccaatgtagatttgttcttttagcctcagtggtctgaactgtatattttacactttctctgcttcagttttgcaagtagaccatcttgttcaggctttatccacattctacagcacctatctgatgggattctctgccccctctattcttgcagtacatgaatgccttgacatatttaacaagtgaagccttttctaatattccttctgatttggtattggatttgcaaaggatgctatcgatggatgcactatcacgtcctagtgctatggcctttacaggtgtctaacacctttatttccctcatttaagggaatatcaatggagattttgtgtccctcactggtgggataaatcatgaccaccactgatactttcatgaaatgacttttaaaataatacatttttctgcaggttcttctttcttccgggatgatacgaggttgcgcgctcttcgtttccttgaccatttgcttgtatgtatttattattcccctggataagttaaaaggttgcaatctcttgtttttgtatcagtctttcttctttgctgtctgagaatcacctttgactagaattgttttcagttgtacctgtcaactcagcagcaagagtcttgcctgtttgactagacaatgaaacgacacaatttagtacctgacaatggccctaaattttaaggcaccattcctttcaggagagagataatatgcagaagacagagtttttgaaggcattatcagatatgtggaaggattttgattcccgagttcttcgatataaagtatgttcaatactgtgatccattatatcttcttctgatcaaggcaccattcttttatttatttgagcatcattttgttttactacatatcatatcattgaagctattggaacctgcatatgttcaattaaaccgacacatctacccagatcccataatgtttggttgctatcagcatgtggcacttcctgtatggaaagttggaaataaataaaagaatatctaaaccttgatttctagatttgaacttgtcacagtacgaatcaattctctggttgacccattcttacgatgtgattccgttttttctgtctgtgcctttcaaactgttttgtccaggaaaaataacagacgtatatttatttgatccattggttattccaaagctgactctctttgcaaccaggtgcttcctcctctttgtgctgagttacgcaacatggttatgcagccaatgattttgcctatggttctaac

SEQ ID NO: 202208 - DNA, 302 bp, Zea Mays
ccaaagaatttttatgaggctaagaaagtaatttctaaatttggactgggatatgaaactattgatgcatgtcgaaataattgccaattgtaccggaaggacaaaaaatgatgatttttgcacaacctgtaaggcttcaaggtggaaggataaggaacccaattgcatactaacaaagaaggaaaggaagaaagaaactccttgcaaagtactacgatacttccctattaaagataggctcaaaagaatgtttatgtgtagagaaacaacacctctcctaagatggcatgacgaggagcgca

SEQ ID NO: 202209 - DNA, 375 bp, Zea Mays
ttgtcatcaacctttacgcttaggcatccagtgtccagaacatccggtcgctagtcctggttgttcttgatctgacctcccccaactacgctcattggtgtgaccttgtcttcctcaccttacatcgctatgcccttgactccgatgtcctcactgacgactgcctgtctgtgccttcctgacgtcgtatggatagtgtgatcctatattggatccttggtgctctcactgtcgagctgcaggacatcgtctgtgagcgtggtggcactgctccctaggcctggattgccatcgaggatcagttcctcagcaatcgtgagacttgtgccttctaccttgccgtcaccttctagatctttgtccatgcgacctctc

SEQ ID NO: 202210 - DNA, 400 bp, Zea Mays
tttctatctcatcagtttgtcgcatatttctcgctgcgtgccgcgtgctgcggtgagtgattctccaagaattctggggacgctgatctgagtccgcacagaacgcagcggcagcaatgatgatgtcggacgatgacgatgctgagccccagctcaacgcggtggagggctactacttcgttgactccaagaacgagaaggagcctgtctgcttctccaccctgcctttctggttcggggacactgatgatcttcctgacggcaagaagaagctggtgctgcgcgggactggtgacccgggcgtcaaggtgtacgatgaggtggtggcctgcaggctgggtctcgaggggaaacaacccgagtttgcagtgctcacagcaaaaggcagacgttggatacg

SEQ ID NO: 202211 - DNA, 1177 bp, Zea Mays
gaggaaatttctaagttaaatgagcttctgtcaagcaagaaacttatcttccaggttagacatttcttgatattatgttcataattcatgtgacactagtccatgttatgttcttatgaactcctttcctaaaaattggaggattgctaatgatttaacatgggtctataatttgtgcaatgttggtaaaaaattgctataacttgacaggacatggttaaaattggttcttttcccactacctccgactgtagactgtaaccgccaggctctggatacatgggcaaatcatacttgtcccatcaaattttgtccaaacttttagctttctcctattagaattccaactctgcacaaggagcatgcggcatcattgctacacatttgggaaatagtaattaaataaattaaataattgcacagtaggtttcatgaaactgtgttacttccaactgttcattttttgtatgagataatgcaatcaatgttattagtgcttatttcgtttgcaatccattttatggtaatatgtttcttcctcactcagatatcactgcagcgcttttatagagaataatgggtgatgaaccaatgcttttgctgctatgtctggattgtttagttttttttcttattaaatatagttggagcatatctgacgatcttgatgtcaacaatactttcctagttttaatgtttaagtgcttgaaatctcacacttgtgatatatccttgttagtttcctttgcatttcttatcttattgtgctgccagttactaattattccttctgactttttagcttatacaacaagaagccgccgatttgaaaagcaagttttctacaccgaggcgttctgtgatagatgattcaataagcagtgaagttgatgacatcgatattatccctaacgaggaaatgcttttggtgcgggcaattatctattcctactatatccaatatggttttatcctcactcagttacctcattttttctgcctctctttacatgtctaaacatctagaagattcttagtgagaaaggctatgctaagcgaatgaaccccgacacattcagtttacaacatcggggaaccataggaaagtctgttggaaagatgcgaatgaatgacagcacgtcagatttcattgtttgccagacgcatgaccatgttc

SEQ ID NO: 202212 - DNA, 326 bp, Zea Mays
aacgcggtgttcgccaagctccgccagacagcgtcgtcggaatggaacatcagcggcgacccctgcaccggcatcgccacggacggcaccgtcatcgaagacaacggcaacttcaacccgggcatcaagtgcgagtgctccgaccagaacaacatcaccgtctgccacgtcaccaagctgtaagtgcttgtgctcctctctagacgcgcgccaggtgctcgatgaaatgctcgccttagccttggccgctcgcgttgggcctgtcgcatgccgtgaatgcgcatatctttccaccttttgcgaatgaacactggtctctgcaaaag

SEQ ID NO: 202213 - DNA, 439 bp, Zea Mays
tgatgatcgggagtatggagagcaggagtttcgtgtggatgatcagccggaaggaagtagagagcgtcgtgagcatcggggaggaaatatgaggaaccgggtgaatgacccacaaggagggagaagagattatcggccttcagatttgccgaagatggcatttcccaagtttcagggtgctgaacctaaggtttggttcgataagtgcttggagtattaccatatttaccaggtgcctgagttcttgtggccgtcctcagcttatctgcacatggaaggaaatgcagcacgctgggtgcgggaatacaagagaagtcaagggctgggaaattgggtccagtttactcaggcagtacaggagaagtttggggcagaagaggattcccaagcaatgaggggtttgttgcagctgacgcagaggtccagtttagaggagtac

SEQ ID NO: 202214 - DNA, 276 bp, Zea Mays
atctaatcgcatccgctcgttcgaggatcaacggcgcacaaagcccccgagcaatcggacactctacgcacgatctccaccgttcatcgcgagataaccgacccaaagatcgtcccctaccttccgctgctaaattcgcccagaaggccccaaccgagatgtccccgacggtggtcaaggttccgcctccctggcgagcaggcgaccaacagtgctaggctacggattggtgcgtggataattcctgcgcataacgcaaacaatggcgaatctgca

SEQ ID NO: 202215 - DNA, 357 bp, Zea Mays
tttatatttaaaatatgtaatcacaaggtatatatctaacttttcctatcaatatggccggatagaaaaaactaaatttgtgaacgcgacaatgcaattatcaaaccacctcggatacagctgcaaaatcatataggtgcgcacaaattctattgtgtcgtgctggatagagccgtcacccaactaccttccaccaagcctttttgacttcctgatgtaaatggacactagcactcatcgattagcccttgtcttgcgttcgttgcagccagtgcagtgcaggacgaactcgacatgggcactctcccctacctcttacttgtcgtgctgtcctctctgtcgctcgtcccccgcgcc

SEQ ID NO: 202216 - DNA, 624 bp, Zea Mays
cccacctgcaacaacagtagagcaaggcaccgaaaccatatcgtcgtcgaggagaaagtcatgggaggcgtgggaggaggcgtctgaggtggctgcaaaggggaaagcggactcgtcgaatatgacatggcgagagatgatgcgacgtgtcgataggtcgaggcagcggtaacctttgtgtgaggggggatatccgaggaagacgcatgccgtggagcgaggggcgagcttatgtttggaggttgcttgcatgttggggtaatagaggcacccaaaaacacgcagatggttataggttggcggctgattatgcagatgagtgtatggaatgtcatgctgaatggaggaggatgggcgcctattatggaggtagcaggccgtcaggagtccctcggcccaatatgcggggggtagggaggcatggagaagcatggtgcgaatggaattgttgagtgtgcggatgatgcgttcggctttgccattttggggtgatgtgtagggacaggaggagcggaggtgagtgccttgagcagcgaagaatttggtggtggcagtgttgatgaattcagccccgttgtcagcttgaaaacattttatgggagagctgaattgtgttttggcgag

SEQ ID NO: 202217 - DNA, 346 bp, Zea Mays
ttggtgtttagtaccacataggaagggttgtttatacttgcgagcattatatttagttacaaaagggtaggatcgataacaaaaggtggtgcaatgcatacaatggttgaatctcagttagtttcgtgtggttgcatatatcattcctcgtcttttggtctgtggaatctttgattatgaatgatccttgtttgaacctattaaatgaaaggtaggattttaataatcttgtcaatcattatgtagtgaagtacaattatgcagtgtgtaaaaatatatgcacgtgcagttaacatgcttgatggatatgaggaacctatgtagaagcttacctctttggaggaga

SEQ ID NO: 202218 - DNA, 301 bp, Zea Mays
cgaaggaccctcacaacattggttcgttcagcgaacctcaggtaccaacatgtcaggacctggaagaaagcatgtccctgaacgaacatgaggatgcggctggaggtctcaacgaccatccgtactcgttcagcgagcctcaacctcaaacatcagcattcataactccgagcaagaacaaggcatcgatccagtccaagaaagggaaggcctctcccagcatcagtgaggagtgggagaagctcatcatcatcgacgacctcgacgacgactttgccagccccgcacatcccagaaccgc

SEQ ID NO: 202219 - DNA, 464 bp, Zea Mays
gaggaagagctggactagagacggaaatggaatgcgggcaaaagaatctggaaaggttggaaattcaagagatgagggtacaggaagaagaaacgcatgtaagaaaatgaagaaacccccggatggtgagtatgctggcaagctgagagttgagctggacatgtgctccaagagaggagatgtgatgggggcgatcactctgtatgattccgcagtcgaggaggggatcaagttggggcagcatcactacaatgtgctcctttatctgtgttcttcagcttctcttggttttgtgcaaccagcaaaaagtggtaatatgggtagtggtatcgccagtattggtcctgcacagaaacttgatccatcacccagcagaagcttgggaggttcagagggagacaatgcatatgcatctgaaagtcatgttcaagatcagggaaaaaacaaggccgatttgattccag

SEQ ID NO: 202220 - DNA, 345 bp, Zea Mays
ccagactccatgcagggagagagagagagagtaagaaggaaagagagagatctgtggtgccgctgctgttgccggcctctgtctggcgttggtgttggcgtgaggaagaagagaaccaacacatgcactctgcaatgcaatcttaattttttgtgataggtgacaaattttggaggcgcgaaaagagggagagcagatagaaactggggggtgtggctacatttatagccgatgaggacactgccgatttccaccttccatagttccatcaatagagaaagttggaaaggaaagagatccacacattcaaggaaacatagcagagaaaaatataggaagggatcc

SEQ ID NO: 202221 - DNA, 296 bp, Zea Mays
ttttgggtgctactcagaaagttgatatgcgctacactaggaaaatgggggtggttcgtattttggtggcagtgactaatgtaaatcatattccggagtctgctgaaatagtagttggtgaagggttatatgagatttttttcaaagttgacaaggttctcatagcggggaagtggacggatacagataacaggggtaatcgagacggagatgataaggagcaaggagaggatgaagattactctgagaaacatggaaatgattcttttcagctagagaagctagcggaagatact

SEQ ID NO: 202222 - DNA, 280 bp, Zea Mays
gccgattcgaagtgacttgctatcccaaatcttagttcagtctagcttcatgattgtctttgtgatctgatacctttttgcaagctttttccccctttgtgattgtctttgtgattctgattctgacgtagtttctttctttctacagaagtgtccgtgagaccgtgacgtgctctcttgtagagagtgtactgccacagtggacgaggtgacatgaggcgatgtactgcacagtggacgaggtgacatgaggcgctgttgttgtactatatagctagcc

SEQ ID NO: 202223 - DNA, 373 bp, Zea Mays
aataatgcaaatatattctaagctctatacgggaaggcataaaaggaagcttcagcccagcaaccttcggaatgtgctttggattattaaccttcggcaccgccatcctgcagacaaacaatggtataaggtaaaagtgatgataaaaatcaaggcaaacaacaggtacaagttgtgtgccgatttaagcagattttgagtttcgtctccatccaactctcgtccgcctttagcccaaatttgagtaatgaatctatttccgatacttcgggcctcaccaggaatattaatcaagtctgatggcgacatgctgaagtttggcttgtttactgtttttgcatgcgtgcatccgaccttcaagaatgcagcagcc

SEQ ID NO: 202224 - DNA, 390 bp, Zea Mays
gaataagactgaacattatgccgtgctggttagtttttttgataattcctgtattgaagaaccagtggtcttgggtgccctgttccttacatgagtgcacaacaggttactgttctaagttgcttggagacagctttttcaaaagtgccacctactttggatgtctttgcggttctcactgaggattgctgtgctggttagcccttattcctgaattttaaataatgttctttcgtagttttctcatttttcattatttacatactgcacaagtctactgtattatcttcttaaaaggcaagaaaagctgtccttattcaaatggaaagtattatgctatcacattttgtatcaatatgggcttttcaggaccatcacatgagcaggaag

SEQ ID NO: 202225 - DNA, 365 bp, Zea Mays
cttaatccacgggctaagcatcgccgtttcgctaggcgtcaaaaggctaatggtgtacgacgacttgctagtagtcatcagccaggtaaacaaggactaggactgctcaaccgactcaatgaacaaatactgcactgcagtgcggaagctggaagacaaattcgagggtttagaatttcaccacgtggaaagggatcacaatgcagcagcaaatgcattgtcataattggggtccaatcgggcccaggttccaccagtgattttcgtccaagaagtacagcaaccaagcgtcaccgcagagcatgctgaagaatgcaacaccatagaccaagcagaaatagatcccaacgactggagggagccaa

SEQ ID NO: 202226 - DNA, 301 bp, Zea Mays
taaggttgagccgatgtagggtgtggcgccctcgcgcgtatatgtgtaaaggcttgtacgatgaagttgtgtgccctcgcctgcctgtgcctgcggaggcgttgtgtactttgtctggtatgttttgttatgctgtgctggtgtggttatagtcggtcttaacgcggacggtttgatgctgtcgtttctgcttttgttgtactagttcggctgcgccttttaggcggcttctgcgtggatggtcttcgcggtagacttcggggtttttcgcacttgtgctattccggctgcacccttaggc

SEQ ID NO: 202227 - DNA, 273 bp, Zea Mays
aattgaaagtaaggaatgagtttagttggcatggaggtaaagagactgacccttctgctgtaaggcttgatgttctccatgcagaagtaagcaatgggatgcgatatcaatcttctgattatatccattgcatttcgcttacatgacattttcattcacgcaaatagataaatggaatcaacatggcggttggggtaaatggaactctgggaaagtgtatgattcgtgatggtcgcggcatcaatatagaggtgcgacgtagcctacgggatg

SEQ ID NO: 202228 - DNA, 469 bp, Zea Mays
atacaacaacctgactgtttgcgcatctgagctctctgcggaggcgtttgccactgcatttgctcagtccaggaatgactgcccaattgctgtgaatccagacagtatcgtgaaaagtagagggaaacataagggaatgaagttggttctggctgttgtgctctccttgttcttctctgttcttgggttgctttgcttggcagcggcatgtcgaagggggaggaagaggtgtgatgagctgcctgtggttaagcaggtgtcgtcgttcgatgagcctgctgtatcagggccattttctttccagaccgattcaactacatgggttgctgatgtgaaggttgcaacttcggtgccggttgtcatctttgagaagcccttgctgagcctcacatttgctgacctcttggcggcgacatcaaacttcgacaggggcaccttgttggcagaaggcaggtttgggccagtgtac

SEQ ID NO: 202229 - DNA, 326 bp, Zea Mays
catttctaggactttgctcagggttcggatcacgtccctggaggaggtcccacagttcattgttttctcagacgctgatggctttcttggagattcgtggacggtgcagtgtgagatcatccagcaatctttgttgggaggtcagcctcaagatgaggacccagtgccagcggccccggcggacgggcaacagcttccctttgagttttttggcctgggtcaacctgtgccggcggcgggctgggatcttaattttcctcctgatgacaacgttcaagctcaacctgcagacaacattcaaggtgactgggaccagtggattgtca

SEQ ID NO: 202230 - DNA, 328 bp, Zea Mays
gatggtgagagtcatacatgttgtcgttaaaacttcctaatctattttgtatgcactcaattctctgatgccatgttttcttgcagctgagaataaaggtgccaaccagactggtgacacggtcgctacctcctcctggtcgccggacgtctctccttcctagccttcgcatgtccctcctcccctgcccgctacccccgcatacaggcacgttgctacctcctccacgccctaggaaaagtcgcagggcccgccacccctaaccatgttcggtgttgacggccaggaatttgagccatgaatgatctatcctaggtacacctccaac

SEQ ID NO: 202231 - DNA, 499 bp, Zea Mays
ccatgcatcgtaaagaactggattacaaacaactcatatattacattcaaaactgtaaaatattacacactttgttcagcaaatattacatcaatattccgaatattcttataacaacagctattcttctcttaaaactgcttccgcagcttcgtttaatagttgattcacagcctcgtccataatagctttggccatcttagtaatttcatcttccttttttgcttcggggtcggccaatgactcgaagggctccgggggaggagatagttcagctgcgatacaaaacatagataagttcgaagtcacaaaaataaaacataaagttaaaaacaatcaggcaatacctatccgtttctcgagttccgcagctttctcagccgccttcgctgcttctctcgtatcgtgagtatctttttcgctcttttttattatctcatgggccatcccccggccgccattttcccaaacgtcagtaaagaattttccgccagctaag

SEQ ID NO: 202232 - DNA, 787 bp, Zea Mays
gtagggaaaaggggaggttacaaagctgctggaaagagtttggtattcaaggaggccggcagtagcacgccatctaaggtagctgctgcgccccggcctcgattcaaacggctatcaccggaagaactagcagcgaagcgtgcaaagggggaatgctatcactgcacagagaagtactcagtggaccacaaatgtgctgctcgaggggttttcttgctggaattagaagatgacactggagaagaggaggcagtgactgagctgggcatatcattgcacgccctgacaggaattgatgtgggggagactatgaagcttatagttctaatcaaaggagtgccactcacagccctggtagacaccggttccacacacacattcatcacagaagcaaaggtgtctgagctgcagcttccactggaaaggcgccaaggagcagtaagggtcgccaatggggacaaggtcaccagcccaggattctgcacaggattattcgtacaaattgctgaagagcggtttgccctgacttgctatgctctaccactagaaggctttgatgtggtgttgggagtccagtggttgcgttccttaggcccgatcctatgggacttcgaacgtctatcaatgacgttctggaaacaaggacgcaaggtgtgctggacagggatgggtagctcaaaaccccgctgttgtgtagtttcagagggcaaggaattattggacaacttgctgcaatcatacgaagatctgtttgaagaacctcgtggcctaccaccagcccgacgcc

SEQ ID NO: 202233 - DNA, 279 bp, Zea Mays
ctcaacacgctgggcgcggcggccgtgctcgccttctccaccacggtcccgctctcggagactgccttcgcggtgctcctcccccctacctcctcgtcctcgcctggctcgccttcccgcagcgcccaggccgctcgagacccggatcccgcctctacccctcggcaccatcgtcagtgtcttcgatggccacaacggccccgacgcccccaccccgacagacactgagccctcttccgctcgcgtgactggtgccccctcaaccctcgactctcctcc

SEQ ID NO: 202234 - DNA, 359 bp, Zea Mays
aaaggctatcgatgttatgattcatcttctcgtcgcatgcgtatttctcgagatgtgagcttcaatgaaaatcgtcctttcttttacaattctttcactcattcttctttttattccacagagtctacctccttcatgagccttcctccaatttctgaaacttcatcagtatcaccacctactgtttctaccccagatgtccttattcccatcacaccaccttccacttccacaccatctcagtcttactcttgcaaaccacctgtctctcagacttacattcgtcgtcctcgctctactcccacggccagtcctgatgacgatcctgttgctgatacttgtactaacaatgatgactc

SEQ ID NO: 202235 - DNA, 518 bp, Zea Mays
cagtccgcacaaacagtactaaaatatctgaaaagagccggtggccctcgtgtttcgcagttcgcccgagttcgacgacaccatcacctctccagctgaagatctccgcataggtttccctttaatcagcgtaatctcggcccagagaggggggtggggggataacggaaaggcgttcgtctttgctcaccataaaagggccttttcgggaagctcccactactttttgttaggacaagactcacccccatgccgtgtcatgccattgccacccatccttgggagctgcagctgcctatataataccaacagtgccgaagcaagaacatccaccctgcaccaccaccaccgggcaccagcgtcgtcgaagctgctcactccatcgccgctccaagctgtgagtccgagcatcagcacaagaagatgcgctatccagctcgtccgagaaatctccgcgctcttctgtccatcgctctgctgctcgcttgtgctctgcagcagcggccggcctcagctac

SEQ ID NO: 202236 - DNA, 788 bp, Zea Mays
gggaaattggtgtcttctttcctctgatagttttaaggtctttggatagctctgatagctccctcagccagaaggctagtgttcttaggtgactattcttttcccttatggaatcccagctgtatgcataatgtgcgaacagacacagtttggtcattcgagacatctggtacatttttgtttgatgttattggactgatttcgaatcaggatgttggagaaagtttgcaaagatccccaaatgcttgcagatgtgtttgtgaactatgactgtgatcttgagggaccaaatctttttgaacgcacggtaatcatattttttaaatgtccagaaaacatagcttctgaatttctcataaaatgtgtttttttctttggcttgcaacacatctgactgataatctatctcctaccaggttagtgcactctcaagaatagcacaagggtctcaaattgctgatactaactccattgtgtcatcccagacagtttctgtaaaaggctcgtctctccaggttactatgatttaggttacaatggcctcctttataatatcttgtttattgttagttttacatgaagattttggattgcagtgtttggtgagtattctgaagtcattggctgtttgggagcaacttcgaagatattccttaaagcaagggagcattgttgaatctcatgaaggggatgcttcaaggagcgtgacaactgatgagatgaagagccaagaggatgttcggaatcagtttgagagagccaaagctcataagtcgacactggaggct

SEQ ID NO: 202237 - DNA, 352 bp, Zea Mays
cgccgattaccgccgtagcccctcagctggtgagtgccacggtaaaacgcgccggtgactcatcccttgtttccggccgccgcacgtctccatcaaattcactggccaccgctcaaacacactataaattgatgtcacggtctgttgcgttgggtcatcaccaagcctgagcacccgctcctaccgccgattagccaccacaactctccaattccccatttcccccaattcgatttccgccgccgtggtagagccctcaccgtggtcagcgtattccaggtctgttcatgctccctgctctcttgtttcagcatccttaggttctcctgatgctccccgaccccgccaattg

SEQ ID NO: 202238 - DNA, 577 bp, Zea Mays
ttcaacatctactagtaacagcagcaagagtgttactgattctaagactgacactgccaagatgaggcgttcaagaggaagcaaaaaagaagttgatggagttatgaaagataaggaagtacataccaagaaaaagagaatatcttctagaacttgtatagctgcaacaaagacgactgagagttctagtgcgaagcaagaaaacaagaagactgataattgtaaactgaaaaagggtactgatagtcctaaagagaaaaaagtgaataataggtcaaagtcaaaagcaaaggtttctgcttcttctgtatcttctgaagctgagatttgtatgaaatcctctatcgatggttctggtattgagaaaaagccactggtgccattgtatcctccgagagccaaatcagtcgtggttgtggaatcagccacgaaagcaaaagttattcagaattatcttggggacatgtatgaagtgttaccaagctatggtcatgtgagagatttagcaggtagatcaaaatctgtccgccctaatgatgacttcagcatggtctgggaggtgcctgctgctgcctgg

SEQ ID NO: 202239 - DNA, 553 bp, Zea Mays
tgggaaacaccacacacccttaggtggggtgaccatatatatagggccaatatcgcttggggtacaaggcgattacgaatctaaaagatatgcctagatataatcctatacaatctctaacacctgcctgcaatcgcagtgggctaatcagggacacaaagactcgaccgaaaatcagtaaataactgaacaggcaagcccttggtcgtgatgcggtgaaacgtgcagcacctgaacttggcccaaggcgaccttctcgcagacgaagtacatgtcgagctcaatatgcttattgcgacaatgatgcactaggttgaccggagatgtgaagttcccgtattagttgtcgtaaccagcagtacttgatgatggcatgggcgatgacacggagctctgcctcgacactagagcaggaggcacccgtttgacgttttgagtaccaagagatgagattatcacaaaggtagacacaataaccggaggtagaacaccgggaatcaggacaaccagcctagtccgcatctgtgtaagcagtcaaggtttggacttggcc

SEQ ID NO: 202240 - DNA, 308 bp, Zea Mays
ggaattcctactcctccaggacaaggctagtaggctacggtggctcatgtgtccaacagggggcagcaggtgattgctccatctttccggttgcacttggctaaatggtcccgtttttcaggctgtcgatgtcaagatcaggggcatccctgcctatgcctgggataaagagacgacagacaggatagctcttctcctacgacacgtgcctgatcagtgaggattattagaccagggattgatgctcagcgtgatgtgttccagtttcgtgcttggtgccatggcgtgagctcatccctagtgctatg

SEQ ID NO: 202241 - DNA, 312 bp, Zea Mays
atttgttagtaagaacaaaggatgcaccaaaggttttaaatgacatgctatgttcatttgatgcatcaacaatcttattcttagacatcttaatataagttgtatgcctagaactagagacctcattactgtaaatataagcatgatgagcaacatgatgagatttcttagcatgaattcttctaatcttatgctcaggatagttttcaggatataaaatgtaaccttctctatcttgcaccattggagccttgcccttaacaaagttggaaatcttgtttctatgagcattaagtttgatgttgttttggc

SEQ ID NO: 202242 - DNA, 555 bp, Zea Mays
ccggactaagcacaacaagtgcgcgaaaatccgaagtctatcgcgaagactatccgcgcagaagtcgcccaagggtgcagccggactaagcacaacaagtgcgcgaaaatccgaagtctatcgcgaagactatccgtgcagaagtcgcctaagggtgcagccggactaagcacaacaagtgcgcgaaaatccgaagtctatcgcgaagactatccgcgcagaagtcgcccaagggtgcagccggactaagcacaacaagtgcgcgaaaatccgaagtctatcgcgaagactatccgcgcagaagtcgcccaagggtgcagccggactaagcacaacaagtgcgcgaaaatccaaagtctatcgcgaagactccacgcagaagtcgcctaagggcgcagccggactagcacaagtgcgaaaaaatccgaagtctatcgcaaagaccccgcgcaagagccgcccaagggcgcagccgacctagtacaacgaaagcagaaacgacagcaagaccaactgtaatcacaccggcacagcataatcaaccataccagacaa

SEQ ID NO: 202243 - DNA, 306 bp, Zea Mays
gcgaaataaaaaaagctatagcattacatcgattaaaaataatcttcatatgtgtcagggttagcatgatcataactctcatcatcactatcaaccatttcatagtcaacaccatctgaaggcacaagttcgtcattaatgtcattgccttcaaggattactaagccattctcattttgcacctcatcatcctcctcattaacaaccatttcaatatctacgtccattccgatagcttcggttaagtctatctcaaatcgccttctagcccatcttcttggaagaactctccatcatatgtgtccg

SEQ ID NO: 202244 - DNA, 1150 bp, Zea Mays
aagaagaaatccagaagcttaaagatgaaatcaatgatttaactaactacatcgagtctcggaaaagcgaatcaagtaagttagaggaaacacttgcgaaaagacataatgactataacgatttgaggaagcagagagatgtgcttcaagaagaaaggaagtatgtaaatttcttttgaatggtcatggcattgccattgaatggatgatgtgttgcattaaattttatatacttagtagaaggaaagttttgcaggtcatattggaaggaggaatctgaggtgacagctgaacttgataggctacaagaagatcttataaaggcacagaaaagcttggaccaagcaactcctggggtattaaattctacatctctcttattttaaatgttcttttgttcatattaccgattgttactgaaaattttctttcttgggatttgcacttttattcctgtgtgtgctatatattggcaccttaaatatgtgattatgcgcccataaattattggtgatcatgatatggaagcatagataaaatatctgtgttcatttgattatgtatcatctgtttttcctttttcatgtcaagttctcttaaagcttcttggtcaacgttttattgttgctttgagcaactacaatggagcttttatgacttgtctgtaatgtaattacttagaaattctggtttgtgttagtcacaacatgtttgctatgtaataaaatatttcctccagaacggatcagtggctcttaagtttcaacctcttctggtggttgcaatgttgtggataaaattaaatttgcaccaaaagttgggtacgtcttgtcttctgttgtgcaatcagttgacatagatgatggcaaatttgtcttagatctctaccctgtaaaatgtctgcattacagaactgatatccctgccatgcccttccatctgcctccctctcttcaatctcacactatccatattcagtttgatatgtgtagcattcacttattttattttgccaagatagtgcttgaagcaatctttgctggtgctaattttgttcccttcctcaggatatcaggagaggcctgaattctgttagcagaatcattaaggaccatggtattactggtgtttttggtcctgtattagaact

SEQ ID NO: 202245 - DNA, 354 bp, Zea Mays
ctgttcttcacctcatccaccctcctaccccttcaaacagcctgtattcatccgccctgccactgcccccacttcaacaacttagccgagtgcccctggtgctcgtttccccgcactcccgagctcagcaactggctgctacaattgtgggaagtctggacatatcatcaaagactgcccatatccgaggcggaacaactccaataattagcagaacccggggagttccagccaaggtaagggtaacacgacaaataatgcagcgggcaagaatatgaagaaaactgggcgaatctactatacacaagtggccactacaccggagggagagccggttatgatgggtacgtttct

SEQ ID NO: 202246 - DNA, 458 bp, Zea Mays
cctttgagattgtgaaacagatgaaaggcctgggtttaaagccaaagttgcgctcatatggtcctgctttaacagcattttgcaacagtggtaatgttgaaaaagcatttgaagtagaagcccatatgttggaatctgggatcacacccgaagaagctgagttggagacacttctcagggctagtgtggttggccgacgcggagacaaggtatattatttgctgcataaatttaggactgctgtcagacaggtatcccattccacagctgaattgtttgaggcttggtttcggagcccaacagcatctaaagttggaaagagaaagtgggatgcaggtgctatagcgaaggctattgagaataatggagggggttggcatgggtttggttggttggggagagggaaatggacagtggcacactcaaatatcaacgagaatggtgtctgccttgcttgt

SEQ ID NO: 202247 - DNA, 642 bp, Zea Mays
ctctagattcctcaactgtttcttcttcctcaggatgtgtttgcttcttgatggcatattccattgtaaacacatcatggtcttcattggctgagatggtgtcgccgtgggtttcgcagacccactgggcctgctcatcgaagatggcgtcccttgaaacatggacgcgctcggtgatggggtcgtaggcgtggtacgccttcgtgccttcttcatagccgatgaagatcatcttccttccttgatcctccagcttcttcagatgaggtacggcgttgcggacgtagacgatgcagccgaacgtcttgaggtggtgcactgccggcttcttgtcgtgccacgcctcaaatggagtcatcacatctacactcttggttgggcacctgttcaaaacatacacagctatttttaccacctctccccaaaaccaaccagggagtttcttcgccttgagcatactcgttgttgctacaacagtcccattccagcgctccactacgccattctgttgaggactgtacggcgcagtgtgttgtcggtgaacatcaccagccgcacaatactccgcgaactcatccgaggtgaactctccacctcgatcagttcggagtgtcttcagcttgagtccagactctccttcaa

SEQ ID NO: 202248 - DNA, 478 bp, Zea Mays
gtttaaacacattgatacgcttttatagatgcgcatataacatgtgtctattattgttgttacgtcatatagtaacgtttcattatgtgtgaaaaaatatagatacgatattatagatacattcataattcatgtgtattactagtcacgttttatagtgacgctttattgcgcattaaggagtatagagacgatatagtaggtgacacgaatgatgacatggcaggtgatgtggataggtgacatggcaggtgatgtggaaaaatgacgtggcaggtgatgtggaaaggtgacgtgtcagctgaactggcgagtgacacattttatagtaatgccaaaacgcgtgttaacaaaagtagaaacaatactatagccacatttgtattgtgtgcctacgcatatcaatacgttatatagtaacgtcaaagtgtgtattaagacctgtagaaacgattttgtacatacatctatatttgtt

SEQ ID NO: 202249 - DNA, 340 bp, Zea Mays
gcaaatactgccatttcatccccctagcgcacccgtacacggcggagtctgtggcacaggctttcttcaccgacatcgtccgcctccacgggataccgcagtccatcgtctccgaccgcgacccgttgttcacctcgtcgttctggagcgagctgatgcgcctcatgggcaccaagctcctcatgtcatcggcgttccacccgcagacggatgaccagactgaggcggccaaccgtgtcatcgtcatgtacctacgctgcctcacgggggatcgtcctcgccagtggcttcgctggcttccctgggcggagtacgtctacaacacggcctaccagtcatc

SEQ ID NO: 202250 - DNA, 473 bp, Zea Mays
gttaaggcttgttacttctttcttcctaaccatcccatgcctaacacatcacctttggcaattagccaactactaacaccaccataaaacaacatgatggttaggccatctcccagcatttatcttcttcattttcacatagtaggaacaaacaaacacattggaatcaagacatggggccaagttccagaccaaactatcagacatatttccctgccatctttttgctcccattacctacaccctattttcccagcctaggccaacacaacttgatgtgcctgctagagtgctggagccacaagcatcgtatcccataatgtggagtggagcattgatgttatgacttctaaagcattttgagaaggtacaatttccaaatttggagtattttattttattgtttagtcaaaaggagcactttatttatcttaaatttgtacttctcaatactgggcacatttcagtagtaa

SEQ ID NO: 202251 - DNA, 448 bp, Zea Mays
tgagtgggagccacaagttctattgtggacttcgtgaaggatttgaatgccttcagtttcgatcatgcactttagcatgggctgactgatctttttgtacagctggccctcgactagtgcgaagtcccaacttcggtgcttgaggcgtttggcctcattgatgtcacttgggtggtaatgtccttgcagatacaaagttattggggctcgccaatcttcagtcatgatgaggttgacaatgcgatggccttcggcgtcattagttacttgtaagccttctgggttgcggacagctggtgtgccgatgacatggtagaacacttcggagggcaaggtctcgccattggccgctgccttagccaacgtgtcggcctcttcattcctggcgcggtccacatgctgtagggtgaagcccttgaactgtttctcgagactgcgaacagccgtg

SEQ ID NO: 202252 - DNA, 494 bp, Zea Mays
attgattgtctcttagccattgatgcctcgtcccaaataatgagcgacgctttctgtagcaactttgatgtcccactttgtttcgtgaaggtacatatagcaccatcatcaatagtgagtggtatcttgaagcgtgaatgggcagttctcccaccaggcattatggaatcggcaaccctagatgtagctattgcaactgcaatcttgtcctgactacgtagcaccgcaagcaatgccttatacagataagtctttccagtcccaccaggcccatccacaaagaacacatcgccattactagtgtcaacaatagataagatcttttcataggcagacttatgctcctcatttagggtttcttgcaaagcaacatcttctatcatcgcctcgatactttcctcctcgtaaatctctctatcaataccttgtgaatcatcatatctatcgatgatagaagggagggggaatgtctttatgtctttacccattgactg

SEQ ID NO: 202253 - DNA, 816 bp, Zea Mays
gaagccgcaggacaagagcgcggcggcatctggagccgccgggaagccctcggggtcggcggctgagaagaagcccgtgctcagcattccggagaagaagtcggcgccccccgcattggtaggattctgctctgtgttcgtaattgttgccttgttagccgtagatttggttttgacctactagttactagttagattagattattgacaaggcttttgagtttcctcagcattgcatcgatggtatctatggcattatgtaacaaatgagcaccaccttgtttggtttgtttggtcaaagctaacagcagttcttctctattttttcattattgttctacaatgtttggtgctgcccaagttctgacattattaatgccacatcttgagtcaatcaggcgtcctgtgaccatgatacttccgctagaaggaagacaagcaaatattttgggtcaaaagcagaaaaggactcagatgtccaaatggcagacgcctctggggggaagagtgcggctaaaagaaaacttcagaaatgcaacgatgaagtcaaggaggacagcaagccttttccagcaaagaaaatgtttgatgatgaagaagatgacgattttgtggcacctgcaaagaagaaaactccagtgaagccaccaccttcaaaaaagcttaaagttgaatctaatgttgaagcccctgcaaagactactggtgttgatgatgctgaggatgaggacaggatggatgaagatgccaagaccccctctaaaggagctggaaggggaaggggaagaggaggaagaggaggagcaggagctgccc

SEQ ID NO: 202254 - DNA, 490 bp, Zea Mays
taatatttgaagagttatgactgaaacaagtagctactgtgctgctgtcctaattttgttatgtttggtggattgctctactctgtggtgtatttcttgagtcgactgtttcctcgttttggttttggttgaacacgcagtaatgataatataactaatacaattgagcctaagtatataggtaattagtacacgtttcgctaaattagtaaactaattggttaagtctaataagtgtttgcctagtaaataattgtaaagcacaaataagtgtctagttcctttcaactaagtctatctacatatcagtcatagcaaacttaggtacttaactaacttgatgattaagtaactaatggacgagtaaagtgaacgtggtaaatgcgtgtacttgtgatgttgtagttgtgttgcgtaaatatacaaaaatgtttgtcgccttttagtggtgttaatgttgtgcgctcgatgatatgtagttagctaacgc

SEQ ID NO: 202255 - DNA, 498 bp, Zea Mays
gaggaaacactctacaatcaaggaacagataggatctatgaacttgaatttggaatctctacaagcactagcacaagagctgagggatggcaatgttgagctgaaagagattgtcaagaaccatgagagcattgaacttgtgcatatcgataacctaagaaagttggagaggatgtcagagacaaatgcacatttagagaagtctttgtcagctgcaacaactgagcttgagggactgagggagagcaaggtggcattagaagaatcatgcatgcacttcagatccacgattaacactcatcagtctgagcgagctgtgcttgtagcgcagattgaggtaatttctcagaccatggaggagctactggagaagaatgttttcttggagaattccttatctgacgctaatgctgaacttgagagtttaagaatgaagttcaaagaactaaaagaatcttcagaagcactccaaaatcagaattctgtacttcaatctga

SEQ ID NO: 202256 - DNA, 310 bp, Zea Mays
ggcgtggccctgtgcccctacctggcatcttctcttctggtgggcgtggtttcgtacccccatccggcgcttcggatgctcctactccgggcgggtgtggtctcgtgccaccgtcaggatctctcgacgacacaggggtcgttgctcccagcggctctggatcaggggcttcgccgtcgacgccagcacccagtgcagtcggcgccccctgctcctcccagccacctccggtccccgcccgcgaccactacatcgtctacagcaggcgaccaccgcctccagcgcctcaggctccagctgggcccccacc

SEQ ID NO: 202257 - DNA, 285 bp, Zea Mays
gttaccttttatatttaattactatctaatttgcactcttgtaggtacataatcatggtgctagttctcctgcagaactcgcgaaacaatatatgagctctcgttatttgagggaaccccaatccagtagtctgcggagccgattgtttcttgagaataaaggtgaagcaagcaacactgtcaatgataggaggtctgtaccaccaattgttcagacaccacttgaacttcggaatgaaaaccctggtctccctgtaaatggctatgtgacttcgggattacgtg

SEQ ID NO: 202258 - DNA, 349 bp, Zea Mays
tggaaattccagagtggaagtgggagcatatcaccatggattttgtggtgggcttacctcgttctcttcagggcagggatgctatatgggtggtagtggatcgcttgactaagtctgcgcactttattcccatgaagaccacaaattcagcttcagagttggttcccttgtatatgaaggaagtaatcaggcttcacgtggtttctaagtccattgttttttatcgagactccaaatttatatccaaatcctgggtgagtcttcacagtgcattgagtactaagctctcgcttagtgtcgcttttcaccctcagactgatggtcagtcggagcgaactatccaatcctt

SEQ ID NO: 202259 - DNA, 378 bp, Zea Mays
gatgaacctgaggcggtgtatgtatgtggcaaagcactggtaccatgctcgaggagcctgcttcaaactatagagagatttatacaacacacaaacatgattaggagcggagggggcgacgaagccagacgactgctgaaaatagaccatctccttgagatggcaatgaaggaacacattcttgatgtctagttgatggctgcgtcaggcccgagaggtggcaatgctaaggatgacacacatggtggcaggtttaaccaccagactgaaggtcccatcgtaaccaacgccgtgctgttgtgaaaagccttggatcacccaacgtgccttgtggtgggcaagcataccactctagtggaacttgtgcttgaagatcca

SEQ ID NO: 202260 - DNA, 305 bp, Zea Mays
attatcttgaccatgttttcggattttttttcgagaaccttcaaaacgtttcttcaagtactaaaatatgaattttagtttttctaataataattaaatacctaaaattcagtatttgcgaaaactacaaaatcttggtaaaactcgattatatatgtgtgtgttcctttcgtcgaactcgttctatgatttgtgtcattttcgtgaggtcgtcaaaccgcatttcctcctcgtgaacgtttgctgctcgcacacctgttacccctttatttcatctaccatcgcctacctctgcctaactcggt

SEQ ID NO: 202261 - DNA, 297 bp, Zea Mays
gtatgtttcatctttggtggaccatgatcaggaaagtgagtttcattatggacaaattaaggccctcctttcaatcttcgcaaagccctttgctgacctggaatcgctggaccatatgctatcatcatctggcatgtttcctcacatagacaatcccatttccaatattaaagatgctttgtctttgggctcttcattgtctgacgtggtgtggcctttagctggcatattgaaggatcatgctttttttgtttgggaactcaatcttcttgattcggttcttgttttatgcatgcg

SEQ ID NO: 202262 - DNA, 370 bp, Zea Mays
aaaatggttttttattaattatcattacaatttctagtttcaggttattattacttacttacttctaattgtcggtgtataaattatgtgtacttgtgtagcatcttttggcctgatctagctaggtgtagtcagtattccttccttccagacctcgctcgtgtgttgtcctataaggtgtgatgttctcaaataattcttatatatgagagtcatgctaattgatgctgttttgaatttaaacaatagacataaaatgctctcaagaaccatcgttaagttcctgtatgtcacagtagcagcatcagctgtaacacatgttaatcaagagcttagtgttaccagaaaattggagatcaataaataaagg

SEQ ID NO: 202263 - DNA, 1009 bp, Zea Mays
ctttgttctgcgctttttcctggtgactcagaggtctctggagctctatgtgtcagattacggttcatgccaatttgctcaccactctgactagtgaccatctggtaatgatcctgtgtcatcattggcatgcttgagctcatcatgctaatatttttaccatctgaactttcattagtagcgcttacatcagacctcctctgctgaaatctctggactgaattggcattacctccagttgacttccaagagttctcattgctattaaagatattttggctattgcacatgtcttgtccaagtgcattgttagctttccagtcattttgattattactggactctctgttgatattgtgatcagttgcaatttgttgtgacatcccaaatccatgtccaccaggtggtgtagcatgtacaccagttgactgcaaattacttctgagcagttcagtcttttgatgcggccaggttccatttactaggtgcgcttgtccttgccttgcatcagagtgaatttgttttatgccttgctgaaagtaccccttgttgacttcagaagttgattgatgattgttaacaggagcattagaagattcatgagacatatggtcccttcgctcggatggaggccttatgacatgctgaaaactggcaaggtttgggttattcattgttccatcagcatagctggacgctggcgaaggacgtgcattttctaggtttgcaccacttaatccagtaaacttactaccattgcggcctgataaatttgcattgctagccatcacctgctcagttttatggaaactcaagccactccactcttctttgggactttcactggttgtagactggagagcttcctgcataagggcactccagctaccgctctgtagagatgagtagccaccaccatagttgtcattgtccaaagaattgacattgtcattgtcacccctcaacaaagctccccagttgctatcctcgtcactcccaaataagattt

SEQ ID NO: 202264 - DNA, 283 bp, Zea Mays
agaccagatcgtgtgtcatacagttcataatgcaatgaatggatagttttagttcaaacgtctgtttagatgaggctccaacacccgcatccgagagagatgcccctgtttctccagatagagaattcgatatttttctcgttttttacagggttcctgtagacctccatcgtctctataccctgaccctgttttctctctttcgtcgatccatccccatttcccgtgatgcgtttgcctagagtcactaatcgcaactgccaaagtggtggatccgcggatg

SEQ ID NO: 202265 - DNA, 325 bp, Zea Mays
acgtcgtcctcggcacgcactggatggccacgctcgggccatgtatggacttcaccgccccgaaccatggcattccagtgggaggagcgggacgtctgctggcgcggcgtggcacctccatccgcgccgactctcctagccgccacaaccgacgacaccctcatcgacgggctgctacacgccttcgccgatgtattcaccgagccgatcggactacctccagcacggggccacgagcaccacatagtcctcaagccaggctcctccccggtggcggtgcgaccgtacaggtaccctgcggcgcacaaggacgaacttgagcggc

SEQ ID NO: 202266 - DNA, 345 bp, Zea Mays
tgcttatatgttccaacaattccccaccgatttttcgctgcctgctgtagcagtatgcttgcatgtacttatctacacgcgattccacctacttactcgtgctatgttagtagagcagtgttatgttaatagagtagatgctctcgctcgtgcacaactagtttgatggctgcccttatccattgcttcaggcgtttgcttcccaatcgaatgaatctgaccatatgtacgcattcctcaccgtgtatatagttgtattcttggtttaatcatcctaaggttttatcctggctttcctgcaattgatgcatgcatatagatagatttatgcctctgctatgctcc

SEQ ID NO: 202267 - DNA, 652 bp, Zea Mays
ggccgccgacgtcgccctgaactcgccgccgccggacgccaacatcaccgatatcatcgccctgtttgctaaaaagttcaacctcaccgccaaggacgtcgccgtcctctccggtatgtattattatcgttatatggttaaactgaattacataccattatcatctgtctcttttattaatttgcgttgcttacgaaattcttgaggcgcacacacaatcgggaaggcgcggtgctccacggtgtcgccgcggctgtacaacttcggcgggcagaacggcgcgtccgaccccacgctggacgccaactacacggccacccttcgcggccagtgcaagcccggcgacaacgccaccctcgtctacctcgaccctcccacgcccaccaccttcgacgccgactactacaccctcgtcgccggcaacaagggcctgctctccacagacgccgccctcctcctcgacaccaccactagcgcctacgtcgcgagccaggccaacgccaccgcgccggcgaccgagttcttcgccgacttcgccacgtccttcgtcgccatgagcaagctgggcgcgctcacgcaccacaatggagagatcaggcaggtctgctccaaggtcaacccgccgacgtcgtcccagctgtccaacgcagcc

SEQ ID NO: 202268 - DNA, 336 bp, Zea Mays
ctcgccctacccgacggcgctccccggcgatggttcaccggagtaggcgcaattccggccgaccaagtccccaatcccgaattcactcaacctacgtgagattcgcaacggcccgcacccatgtcgcccctcaattccagccgcgacacagcgcaaataccctgcccacggcacagccaagctcacggcggagatggttactccgatgagcgattcgacgaggtccggtcaccaaataggccagccaaggggtccacacacaccagaggttaatgcgaacacgatagaagcgaatttaccgtggattatgtaccgatgatcacgggtcacgagcaa

SEQ ID NO: 202269 - DNA, 344 bp, Zea Mays
tgtcacctactcaggtgatgggcagagttgccctattactggcaatgatggaggaatggaaggtagtgctatggggcatgtgataaagagacactatcgaggttaggagtgatgtggtacgaggcaccaaagtcagcgtcctagtcggtaagagtagaagtggtatctgtgatgacatgtggtacgaagagagagcaggggagccccccatagagtctccaagatgggcgctggggccaccagtggcaagcaggctgacaacgagcatgggcggtggggatgacaaggcctctatcgtcatggagacaatcccggcatcccggaacacaaatggtaatggaacg

SEQ ID NO: 202270 - DNA, 307 bp, Zea Mays
tgctcctgaggtggctaaagaaggggatcaattggtggatgagtggttggcagaaaggcaagattatactgctttacttaagcaaaagtcggcttctgctcagaacagaatgaaaatacagactgacaagaagaggactgacagagaattccaagttggtgagtttgtgttggtaaaacttcagccatatgtgcaaactatagttgttagtcgaccttgccctaaattggctttgaaatattttggtcctttcaagattattcggaagattggattggtggcttataaactagaacttccaccttcc

SEQ ID NO: 202271 - DNA, 278 bp, Zea Mays
gccacctactaaactagctgctccacctactactttatcttaactacatgtccctaattcggataacaacttcaagaacgaagaatcgaagatgatcaacttcatcaagaaaggatgagcaccaactcaagtcttcaaggatcaagtgagatcaccaagattagtcaagatccacaatcttggatggagtctttccttaccccactttttcttacccagacctatctatgctttaaagacattttttaccttacataataaagtggatatacataaat

SEQ ID NO: 202272 - DNA, 1541 bp, Zea Mays
ctcgccgcgggagtcacgcaaccgccgtctcctcgccggcacgcttcgccgccgccgcctctctcctcctcgtctcaaccgccgcctgcacacgcagaaaaggagggagaataagaggatcagcaaaccccaagccctccactcgtcgccccctgctgcaatcgccccacccgcctccgcccgccgccgcttctcctcaccgttctcttccttcccaggccgttcatagcaagcgaccgcagacgttttgacttttgagcgttgttgatacggtcactctttccccagttcctctcccgcgacatctcagttcttcatcaccaaaagatggtcggcggcggcaacgagttccgtttcttcttgtcctgcgacatcagccacccgcttgccttccgtgttctccacgcaggtacgtcactactatctctcttctccacctcaatttgcttgccaattcggccctgatgtgctcgccgtgctaccaccggctacaaaaactcatcgttttccaatgcttttcactcaacaaattcgcccccaacagcgatctgaatccaatattcctatattctcatttgcagatttgtaactgctaccatcacaggatttaactgtttgtactgttattacactgcgctgatctcttttcggttctaagtgcttatttggataccaagggctaattgttagagcaactccaaatgaacgtgtaaactaaccccaaaacagatattagtcaagaatagtggtttttcttactccaacagctccctcattcttcccccaaaaaattagcgtcccgcatccatagcctcctctccctcatattttggtgtgttccatccctccccaatccattcctcaacgcatcggatcatccacagcatctcgacgactgtacagattgtgccacatgtcacatttaaaggaactgttggagtacccatcataattcactcttaatattttttagcatgctcttaataatcaatttttggggtaaaatttttaacatccttttggagttgctcttagctagctaaaaattagccaaaattagctctagccatccaaacaggggctaataagtgggttattatttagcctagcctccaactaattgttagctggctaatttggccaaatttttagtctcagctaataactagctctagctgatccaaacatgccttaattcaatgtttatcttcgttcctccacactacctgttttcttctccttaatgcatctcaatcctccacactacctgttttcttctcaatgcaatggtacacagctttcatgcttatttgagaataccggtcagcattttatcccataggagaagcaaaattttttatttctttgttctatactgctgtaaaaaaactttcttgagttcgctagtatgcatcaccataattaaaatgattaatatgttgttcgtctttgtcttacacacacaaatacacatatatatttcacaatcgtcaaaatttcctgtttccagaacatatcttgttgaccgaccaaaaagtccc

SEQ ID NO: 202273 - DNA, 357 bp, Zea Mays
aggtttatagccgtcaatcccacaatgagcggtcacgattagatctagaaaacattaaaccacgaccgttcgatgctagttgaacgtttggaaatggaactcgcataccccttcgcttaaaagatctgagccgtaggagcccgatccatcgatcaggattgtttactgattcttataaagcgtgggctaatcctggcggtccgttctgagtgaaggatacccgttcggcttggatttttgcataagagacctctggtttcctttaaaataacccgtcatcccgttctgctgtgcaccgagtcttaggactttttgcaccgagcccctgcgtttctgtttaatatacgcgcagcccag

SEQ ID NO: 202274 - DNA, 341 bp, Zea Mays
ccccaacataatcaatctactacttcccagccatacctttcttcatggtatcacgagaccgtgtcctctcctgatcccccttccgcttctgcttcccctagatcgccaccatgacctcgcctttccctgcttcgacgctcctcgctgcatcacccatggttgggaatccctccccctccccgcgtcctcccagatggaggaggtcccttaggtcaccgcggtcgctgagacgcagtgcgaggatcacgtcttggcggcaaggtccctcgtgtggctgccatcgtgcgtgctgtcgagaccgaatgcaagaccaatattgcgaccaaggagcgtgacaccgc

SEQ ID NO: 202275 - DNA, 457 bp, Zea Mays
aaaatctttggtggagcagattgactagcatacaatacctaggaactcatattacaagacattggtatgcacttctgttctcagagtctgtagacacttcagaatcagcgtgcttgcagcttgctcatcggttctattgccgctcttgctgccttttttctcgtagagacacaactgcgttaccttcccttccatacgaccacgaccctattagttttgtatccatgtttttgtgtgcactgctaatgatggatggggacactcgtgagagcatggcgtactgccgttaaagcccgagtgctcagcgttctgcgattttgtgaggtatgtactggtatagctaccttctttaggtttaatatggcccctggttatgccagtctagctctttccctttcgcctacacaaatatagaaccgtttcgtcttcgaacgactgctgtcgagcacattagctg

SEQ ID NO: 202276 - DNA, 399 bp, Zea Mays
gaaaatatggagggttcatctgttgcaaacaaacatgatgccgatggagataccaaagaggaagatgacgcatctgatgatgaagatggtacggatcaagatgactccaacagtgatagtgatgaactagacgatgactctgatgtggatgtgggtactgatatatctgatgaagacgaaggtgacgacggtgaactgaaagaaagcataaatggttcagaggatgaagctttagaccagaatgaagacagcgaagaggaagacaagtcaaaaggcagtggctctaaagcgcagaagaggaagttaaatgattatattggacagctaaattctgctgatgcaagccttcgagctctgaagaggttagcaactgccaagaaggctgaagaaccatctgat

SEQ ID NO: 202277 - DNA, 495 bp, Zea Mays
gttggtcaagctcattcacagattgcactcttcagccttgtcgtcttgggcagcctgggtgcgctcgaatgttaaactagcaacaatggagggcgagatcagggggtgccattgggatactctgagagcgttgctgcccatctatcaagcgatcagttcgtctcaggttggggatggctgcagcactgatttttggcatgacgcttggtctgggcctgacgacctgtctacagccttcccagccctgtactcacactgcatcaggcaaaatgtctgcgtgagggaggtggtgctgcagggtttgcacctagtcccgcgcctcacgccacaagcccgggaggaactagaagctgtgctaacaatagtaaacaacacaagcctcgccgatcgaccagataccagacattgcttccttgcggatcacactggtaattttcagacctctactctctacaacctgcttaaagggtccttggggcatggtgatgttagcac

SEQ ID NO: 202278 - DNA, 271 bp, Zea Mays
cttcatgggatcagtctctatttcagccactatcccagggtgtggaaaacccgggccccacctaaatgcagattttttgtttggctcgctgcgcataacaggtgctggacagctaacaggttggccaaaagaggatttgatcaccctccaaaatgccccttgtgtgatcaagaggatgaaaccttaggtcatctcctcatctcctgtgctttctcaacggatttctcatttctggtttcagctgctgtggactttcgaccttcaagtgcta

SEQ ID NO: 202279 - DNA, 481 bp, Zea Mays
ggtttatcccttccccaggccccactcgtgggcgcctccagcactgggtctgcccttttgatgctatctaattgagtaattatagtgtcttgttctgaattctgaacttcattaaatctacactgtagacgcgaatggttcctggaatggtagatgggactgtcactgctgttcatcagaggagacaactttactccgcttcactctcaaaactgcggatgctgatgatttgtcgaatggcaaagcctgaggaagtacttattgttgaagacgaaaatggcaatattgtacgtgagacaatgaaagacaacgatgttcttgttcagtacaaggttagaaaaaggattgcccaatatcctagcaccctgcaatttatatgttctgcgcttcataagctttgtaatcttctgactgacgtgaaattgccattattttggtattatcagatcatgagggaaacactgatctatttatctcatct

SEQ ID NO: 202280 - DNA, 1709 bp, Zea Mays
acgtttttattgctgtttgtttcaacttttttttttggcatcgaactactatatttcaggatgacgcttcttctgggccctccgtcatccgggaaaaccacacttatgcgagctctaaccgggaagcctgctaagaatctcaaggttgcatgtttattcatgtggcataatatagcttcttatgattatgcacgcaggccatatgcctcatcacttgtttgctgctacaggtgtctgggaaaatcacgtactgtggccatgagttttccgagttctatcctgagaggactagtgcatatgtcagtcagtatgatctacacaacggggagatgactgtaagagagacaatggacttctccagaagatgtctaggcattggtgccagatatgatatgttgtcagaattagctagacgggaacgaaatgctggcattaagcctgaccccgagattgatgctttcatgaaggcaactgcagttgaaggaaaggagaccaatgtcataacagatcttatactcaaggtgtgtccccgtatcttcttaagttcactttcacgagcagattcttttaacctagcctaaaattcactctcatgagagtcgaactcaggacctgaggggtgctaaccaactcagttagaggtctttcgcttctaactactctttttatgaagtgctttcataacaactatttcataactactcttttatgaagaaattgttatgaaagcacgtttccttaatatatacaactttcttataacaggaactaggcttatcactgtgacagttacacataaatttaatcttgatatcacccatggtttgttccatgatgattgagtttataaatgaccacaggttcttgggcttgacatttgtgctgatattattgttggtgatgagatgaaaagaggcatttctggtggccaaaagaaacgtgtgactactggtatgcctgcatcatgccattttatcaatataaataaatgatttgtaatttctccaagaaactctcaaactattcactacatgtataatcatagctattacagccgttaaatagaggatagagggccgtccatgaaatgcagcatagctatcagttattttctgaaattgcagagcttatgtttattgttcttttctgtagtagcagacctaggtaccctttggggtctagttacaaacacagagccccatggactctaattcgtcacatattttaattgatcggaagcttaatcagtatgattagttaactaggaattctaaaataaacctatggattggtttaagtgatgactctggcactgctttcctctgttatttatacattgtttctgtcatatccagcataaagaatcctgatgttaacttccttggacttcaataattggtttggctgtaggtgagatgctaactggacctgcaaaggctttgttcatggatgaaatatctactgggcttgatagcaacagcacatttcagattgtcaagtacatcagacagacggttcatgtgatgaattatacagtgatgatttcccttctccagcctccacctgagacctataatttgtttgacgacatcattttactgtcagaaggttacatagtctaccatgggccacgggaagacatccttgaattctttgagagtgttggtttccggtgccctgaacggaaaggagtggcggatttccttcaa

SEQ ID NO: 202281 - DNA, 658 bp, Zea Mays
attcggaatagccatctataacattgtaggcatcgtgttcaatgtaatgtatacacaagatcagtaataatacaaagatgtcaccaaagaactgaaccattaacgagggaggaaagtaaacatcctattacccagctctagcgaactcagaacaaaaagctctagaactaaaaacaaccagtggaaggaatttctactggttttactaagaccttctaaactatactttgaactagggtaccaaagcattggaataatcaaaggcaaagctgaatggaaacaaaaaggaaaacagtagcactatggggtgcacaactacttgactagaggtggatcaacactaggtgagtccaggcatgccataaaaacctagcggatttgttacatttgccatggtgtagatgatcaacatctacctacgacgaagccattcactccattccattgggcataagtaaatctagctctgcatagattgtcgcccaataaccattcttaggttcttgcaatcattgacaaaattgaccatcatgccacacatctattcaggtggcggcaacaagaatacaaagccagagttctctcggatcaatggaggtggctcgatgtcagatatgtcaatctgctgcatcgatttggatatgtcatcgacagagaa

SEQ ID NO: 202282 - DNA, 752 bp, Zea Mays
cgctgatgttaatattgagttgtccataagaggttcctcacagtcagatcttggagttgtgctagaacattcacgctcaacatattgattatcagaagatacattgaaaatgtgacaacgagaatactgattaagtgaagcatttgatgcatccacttcaattggtctttgctgattcacaaactcctccattttgcatttatcagaagcagaagatgttgctagaatttcaggcaccgctgatgttaatactgagttgtccataagaggttccttacagtcagaccttggagttgggctagaacattcacattcaatatcttgtttatcggaaggtacagcggaaatgtgaggctgattaagtgaagcgtttgatgcatctgcttcaactgctttttgctgattcacaaactcctccgttttgcatgtatcagagacagaagttgtcgctagcatttcaggccctactgatgttaatactgagttgtccacaagaggttccttactgtcagattttggagttgggctaggatattcatgctgaatgtcttgattatcaaatgatacaggaagaacgtgagaatgaggatgatgattaagtggagcattcaatgcatctgcttcaagcgttttttgctgattcactgagtcctccattttgcatgtatcagaggccgcagaggttgttgttagaatttcagacgctgctaatgttaacactgagttgttcagaagaggttccttagtgtcag

SEQ ID NO: 202283 - DNA, 283 bp, Zea Mays
aatcaatgtctatctatcctaggtgagatcatgcagatggtccaagccttcgctctcggccggtctatgacttgcgctaaaattcattctccaacttgtcacctttgggttgatctagttttgaacacgcatacggtcagcgaattatagtcggacgatccgcgcggggagatggatggtacgtgacttggatctagacagtccgtagtacaaatccatgaatcaacataattcctaactggtttctaaaagatgtactacaaatggtccaccctttgtgccg

SEQ ID NO: 202284 - DNA, 467 bp, Zea Mays
gtctggtctgagcgctgggcgtaggcggcgaagggcggttgcgaagcgtagagtgagtgaggtggatgggtgtcagcttcgtgtgggtagggctggcaagcaggaattgttgtcctcgccggccgttgcgagtgtaggtgagggggagttgcgaagtctttttgagggtgaggagcttaggataatgctatttaactatagggatatgggaatcattccgaaggttgaaccgatgtaaggtgtgatgccctcgctgtacatatgtaactatagtttgtatgatgaggctgtgcgcctgcgcgcatccggctatgctcataaaggcgttgcgcacttggtctagtacgtttattatgtcggtccggcgcgcctgtagtcggtctttgcgaggacagtttggtgtagggcttagcacgggtagtcttttgaggaagacttcgattttttgcacttgttgtgctagtccg

SEQ ID NO: 202285 - DNA, 306 bp, Zea Mays
cctagggttagggtttccaataattgtcccaggctgccagcattgtttcaatttacatagctgatgttgcttgctataaactcaatttcaatgtgtgtaactttggtgtttgttgatgccatccctttaggtctcggcattccttttgcaccatttctctgaggttgctgattacagctttacagctaacatggagacagaggtagtaaacatttctcagttcatggtttctttgtgctttgttttcagtttatgccatagttttagaaacctgcttaagctggctcgttagttgttactgctatg

SEQ ID NO: 202286 - DNA, 445 bp, Zea Mays
cggcagtgcagagggtgaactccggcgaagttgtactggcggatttacgctacgaccggtgctcccgagcgacatacaccggattaaaccctccccgaatgatttccctaaaccaatttcacacttggtaagctctcgagctctgttcacgtaaaccgcggacgatgaagacaattggtacgtgttcccattgatctaaagctactccgtacgaattggggtttcgtcaagcatcacagagcgtcaagagtgcttgaacaagtgagagtgagggatgaactgaccggtaaagggctggccgcggcgaacggatcttcacggtggcggagaaaggatttgggggaaacaaggaattcgggcacactggtgatcgattgctagcaattcttggtggctgggtagctgatgaccttgcggagctaggcacaggctcaatttataggga

SEQ ID NO: 202287 - DNA, 316 bp, Zea Mays
cggagcgcaccaatccggacctcaactacattaccaacttaaacatttaggctattattggcctaccatgttcgatgattgcatgaaattcgcgaaaaggtgccatgagtgtcaaatacatggcaactttatacatcaaccacatgaaccattacatcccactagcatgtcctggacatttgaaatgtgggggatggatgtagttggaacgattcacccaccatcatccaaaggacatagatttattttagccgccacggactatttctccaaatgggcagaagttgtgacattaaaagaggtaaaagctgaaaat

SEQ ID NO: 202288 - DNA, 2175 bp, Zea Mays
caggtctccatcaaggctgtgccaatgtcgcttgttctcgaggggggaaacggtaagtcatacctgtgcaatatcatggacacgcccgggcatgtcaacttctctgatgagatgactgcggcacttcgacttgcggatggggctgtgctcattgttgatgctgccgagggagtaatggtaatgcactgactttttgttttgtagtcatttttttgctataatgatgcattatgctgaaattactattgttaacacacattttagagaaaatagtggatcatgaggacatgaatctgtatgtagtacaatctggtcaacctaattcacttcagcaaagactcaacatcccattgtatcccatccaacttagggcacttcactctatttcgattggaagggagcaaagttttctttcagcgtaacagaaatttctccagatgtccgacccatacattctaaatgagcaatgggtgacattgctgaaaatactaagatagaggtctcagctgttggcatattccaggcagagcatttgttttcacccacagatcaaatcagatagcgattagactaatttaatctctgtgtctactgttttgagtgtgattggtaaatggtgataacttgcttgctagatttgtctaaatacaccttattgtgtgcttgggaacagtgtactaatgcttcatgatgttcacaaacttgcttcatatgcaaggtttacacatgtgctaactttatagactcggtttaggcagatgtcattatattgggatttgtattgtaagctgtgtttagcttgggtttaagatgtcagcgcatttgtggattttaagttgtcagcgcatttgtggattccgatgcattgagcacgttgattatcatatggttacatctgttggattaaaggccatgttcttatttgtaatgattcgatttatggaacgtcgtgtgaacctatagtagcgaatgagctttaagttgaacgtgtaggttttcagccattatgggcagagtaaattagccacatgtgaaccaacactctcagaatttgaaatacccagataacatgaatacatgattttgtcatactgcaaattgcaagtttggtgattttttggtaaagtaagtagcttatgatgttcatgtttgtgttgaaaggtgagaacatgagatttagattaccaatggttttagaaattacaagatgtggggatattgaaaataattttttgtactttcagtttacatgcatggtagacagctagagtgtacttacctctgttggttattaggttaatactgagagggcaattcgtcatgcaatccaagaaaggcttcccatagttgttgtgattaacaaggtacgtttttgctgccccttttctattatgttccagtaactacatgaaattgaagtttatgcttactgtgtgctattacaggttgacagattgataacagaactaaagctgcccccaaatgatgcatatttcaagctgcggcatactctagaggcaattaacgatcttatctcatcgtgttctactacagtaggtggcactcagctggtggatcctattgctggaaacgtatgttttgcaagtggtgctgctggctggtcttttaccttacagtcttttgcgcatctttacttaaagattcatggggttcaatttgaccatgagaaatttgcatctcgcctatggggagacctgtattttcaccctgattctagaacctttaaaaagaagccgccaaaggaaggagctaacagatcatttgttgagtttatccttgagcctctgtacaaaatttatagtctggttgttggtgagcaaaaggggaatgtggaatcaaagcttgctgaattgggtgtcacactgagcaatgcagcttataagctaaatgttagacctttgctgcggttagcttgccgctcaatttttggcactggtactggttttactgatatgttagtgaaacatatcccctcggtgaaggatgctgctgcaaggaagatagaccacatatacactggaccacaagattcctctattgtagatgccatgaaaaaatgtgatcccaatggaccccttatggttaacgtaacaaaactatatccaaagtctgattgcagtgtctttgatgtcttcggacgagtttatagtagca

SEQ ID NO: 202289 - DNA, 278 bp, Zea Mays
cccaacctgactgcacttgaagcatttagggcatatcctctgtcctgtaggtcttatcggggtgctagttgtaacaccccaggtgttacttagggtttcactcaagactacactagtgaacctatcatcacatgtggtttagtttgagcaaaagacaccaaacttggggtcaagatcctaagtaggtgtaacccatcttagaagtcatgccttggccttatcatgcacctaaagaggagagaatggctcaaaccctaattcaaatccctttaggcaaa

SEQ ID NO: 202290 - DNA, 462 bp, Zea Mays
cgcactgaccgtcacacatggtgactcgtccagtgctgttcctccatctacatcttctggcaccagggacaactcttcctcctccaacacgccacgccgcgacaatcgcttcaacgctggtggcacctcccgttctaccaaccgatctgatcgcaggtgcggtcgcggcaacagcggtcgtggatgcttcaacaaccagtctggaccatggacagcaggtctcaatccatggcaaggcatggttcaggcatggcaaatgcctttccgagcacccggagtaggcgttctggggccacgcccgccgttccaaccttagcaagccatgacagcctatcatcagccacctcctgcatctgtcggcaccttcgacaacagcgctctttatgcggcactacaggctgccgcagttccaactcatccgcccaacacttctgactggtacttcgacagcggtgcgacgtc

SEQ ID NO: 202291 - DNA, 285 bp, Zea Mays
gaagcggtagcccgttgtctcctgctccagtgcttaggccgagtatcgcactgtgggccaacggtgtggccgagacttcttggcttcgtcagctgctccatgtgctccacagccccctcacatgcgccaccctcgtctattgcgataacgccagcgcggtctattctccaacctcatgcaacaccaacacatgaagcatgtgtagatcgacctccacttcgtccgcgagcgagtcgctatcggccatgtccgctcctaaccacttcgcagttcgttgacatcttc

SEQ ID NO: 202292 - DNA, 339 bp, Zea Mays
catatatcgtcgtagacacgttagaagtgcttcttgtatgccacttttgtgcagcttcgcagaggtcgttaaaaattaagtggcaccagtctgtctcatggaaacggtccatttcttccgtcaataacacctcatggttagatatcccccagctggaagtggggaacaacaatctattgaacaatatcaaaaagaagcatctgatagagaggtcatcatcgtttccttttctcaatcggtcctgaagagatgcaacaacgaactcatccttagacaatccaagttcagccctcaagttattgcccgccacttcttcatcgattcctagtggcttaccac

SEQ ID NO: 202293 - DNA, 432 bp, Zea Mays
gcgacgaggacgagctgccgcagttcgacccacacttcacgatcctcggccatgcccagtgagtgtgagtgtgagtacaggtgcagctggctggttggtcatctcagtcggtgtactggacatgcgtcgtaatctctgtcgttcattcgacgcgagaggaattgaatgggcatgtatatgatggtaatctgttcactgttcaaacttgaaagcgcactgattcaagggcaaaaactgtgacgttgcagctcctgctgacaccattttttagatttgtttgagcagtttaacattatgtatgtttggttagatcgtttgtagatctatatatatattcacttaaatccacatgtgttggagtggtttggtataaaatttaaactaaatgtgacaccaaaccactccaactgtccaacacacatatactaagat

SEQ ID NO: 202294 - DNA, 1025 bp, Zea Mays
gaattttgaaaaaacaggtggtaaaccaataccgccgagcgacgatttcggtaaaccgagtggttgaccgccggttttgtaattcttggccccgtctttctcatatctcgacctcactgctctggtgttctgccacatctggatccatgtcgtggcctctggtccccttcccttctccgagactagccccttcctttgtcgtgggtgcatacctcatcatatatgctcgacaagctgcacctgggtgtggtctccgccttcgactgcttcatcttgccagcacccacaacctccctcattgacaaaggcgctggcaaggcctcctccaagcggcgtaggtcgctaagggagatgaggagtggtctggaggggagcgagtgcagctccagcacggccaaggtccaaggtctaggaggaggaagacaaatgcagaccacagtgttgggggaggttcggtgacgggctacactgccgtgtgtggcatgaccgcgagaggcttgggtgaggggctacatcgccatgcacgagagaggtatgagagggctatgctgccatgaaggtagaggtgtggtctaggggatgcaccgccatgcgaggagaggtgctgccatgcaatgatttgagaagagataggagagaggaaatatttatgtgctgctcttgcttgcagcaataaagaaggtaatcgttttattgtattacgtatgaagtcgctgaaatccaacatagccataggaaggaagcaatagggaggaaggattagggtggggccacatgacaagggcacaatcatagtacatgaggtcaatgccgtcgagtcgagtgccatgaggtggaataggagacaggacatcacatgctactcattggcagtggtgcaagcttagaaagagtagggagagggacacaacagatgggcctgcgtgcaagcatgggtactcaggccagtgttgtgggatatggtgtctaaacagccatacaaaaccagggggggcatttgaacattattatatgctttgagggct

SEQ ID NO: 202295 - DNA, 526 bp, Zea Mays
gcctgcaagaaaccaacatacagaatatttctagaggaactgtctttgctattcttggagtgacttttgaagaattcctctttttaccttcctctggggctagcggtggtattcttttagcctggaaaaggcatgtgcaagcaacagggcataacagagtgggctcttattctgtccaattccagcagtcaaatggccaaccttggtggttatccggtgtctatgggcttcgggacattgatgacaagattccattcctccaaaagcaattgctatggtaaaaaaggtttcattttgagtatttttggccaaaattggagggattccaggaagcgtgggcatcgggtggtggtagctcctaccccttcctgactcttgagatgaagttgaaagccactgcacgtgcccttcagaggtggagtgataaaagatgccgaggtaagggttgtaatttgtgtgatcgttttaatcactctttttatcgaattgttacatccagagtcatcactgtactctaagtcccgtt

SEQ ID NO: 202296 - DNA, 454 bp, Zea Mays
ctggtctgtgttggcccagcattttattgctgctggaagccaccacgaggagaaagttgcaatgtatgccattgattcgctaagacaacttggtatgaagtacttggagcgtgctgaattaaacaacttcacatttcagagcgacatactgaaaccctttgtcattttaatgaggaatagtcacaactcaaaaatccgaggtttaattgttgattgcattgttcaggtatgtccatatgcatgaattttgacacatctataaatctatgaaatgtaatgatctggtgtttcttatcaaatgatgctacatataaaaactttgctggatgtacatgtagttgatcaagtcaaaagttggcagcataaagtcagggtggcgttgtgtattcatgatatttactgcagcggctgatgacgaggatgaatcaattgttgagagtgcttttgaaaatgt

SEQ ID NO: 202297 - DNA, 315 bp, Zea Mays
ctccccccgtcgccgccctcgcgcctcctccgcccgcagctcaagccgagcgtcaccccgtcggctaccttccattctcgccgcacttctcccactgggcacctcgcgccctcgtgacggtataaatagcccctagtcactcctcggcgctcctcaaacccaccaaaccctagcccacttagcggcggcggcgctagaggtggaacgagaccttggcggaggtagcgagggtagcgctgctcgctcgctcgttgggtttccatcccctactgcctagagcgagctctacgcgacgatgagcagccttgtcgagcg

SEQ ID NO: 202298 - DNA, 557 bp, Zea Mays
gttttctaaatggataaaagtccataacccaagcctggagcgtgcagccatgcagctgatagtgaactccgaggagatcattgaccaatgcaaaactgtaactgatgtatgtgaactcacattctcaagcaaatctccagaggttaactcaactgagactagatttggtttctcgttaggtgatgcagcaatcaccgaggcctatgtcgatccttcagagactgctttgcttggtcctattgtcttccgtccctcgaatcactgtatgtggtcaagcatggttttgatcagaaacaacctgtcgggtgtggagatgctgcctctccgggcatatggtgggcgacaatctattgtccttctagaggaatctgagcctgcttggaagctagagttcagccttgggtccaatgttcataataaatcaacgatgaccaaacaagagatcccaagctctttgtgcagtcaacagctaaccaaagagatacatgttaaaaacagcggtgaccttcctctacaagtgacaaaggttaaagtttcaggagctgattgtggtgtgg

SEQ ID NO: 202299 - DNA, 845 bp, Zea Mays
ccatagggaaaggcagcgatgcaccaccagaaccagtactgattatttctagcacccagtactttactaaggtaatgtatcatctaactacacaataatgatatataatagacttgactaactaaatcaacaaaacaataacatactacttattttgattctgacctgccaagatgttgcaggcctgttacccttcaaaggagactcttgggtattgatttccttgttatcttgatcagactgggtagaaatatagaataataactctcctagtgttgccatacagaatcgcctgagtttatcatgtttatcccttaacccatctgatagtgcattaaaaattcctgaacttgccagctccacatcaagagcagtggaatagcgtatcagcaaccccatgagtgaggcaatttggacacgcaagactgaagtttttgacagtcgaagcatttttattagtagcaacataattggtccattagttattttgttcgcagcatctgagttcatgcttaacatctccaggtatctgatagtattttgtttttgtgaaacctgataagttccacttaaactctgaagtatctgactgttgaatgcattcatctgttcctttggtaacttagtataatcacctgctgtaagagcttcaaaaggaagtgtggggatcatgtccacagctttatctgctttcctaataggcataactggtttaactgcaagatctgttggatgccagaatgcttcaaagatgttagatggctcagaaccagttgcaggacatggagttacctttgcacgatgtgcttttcgcatgctactaggtggacttgccgccacatcca

SEQ ID NO: 202300 - DNA, 396 bp, Zea Mays
tgcaggagcattggaactacggagtgcctgggtgtgtgaggagcgggggcacgcacagagctcagatcctcctacttaggttgtgtttggttgaagagcggacgagaatggagcggttacattactgtttttttaatgtttggtttccaacgaaagaggattggagcagctcctagagtctatatatggtaattatttatgatgcttccacttcactgaaactacttgatacgagcgttttcctcccctccacacatcattaaggaccgagggacatgggatggcaccgacaggcgggcccagcgtgacagcaaggtagaggacacgggtgagattgtgagaaggtggtttgggtgaggaggtgggtcgtagaccgatcaaggaggtaggtgaggg

SEQ ID NO: 202301 - DNA, 662 bp, Zea Mays
gaatattccccaggctcgggtgtctggttggcatgtggagccacaagctatatcaagggtctgttttctgtcctgcatcgcgaggctgtgtcggtcactcccgaaagcgccacaatgaaggctcccgcgagtccaccactctaacagccctggacctgcattcggaggaagccatgagaaggtggatccagagaatgctcattgtgacagcaatatccattgcctctgaggggataaaaagaaccatattatgtgcatagagggatatacgatggagagctcaagatgatagttggctactgttagacagggtgcggcagcccttgctgggcctgcacgcctctatttgggcataatgtctttatggctaggatatatagattgatctctattagacaatgatctccattgattggttcttatgctataaaccctcggccatccttgcctatatatgtgtaacaccatatctcctataatctatctactattctttgtgcctaatcttacatggtatcatttgcccaggtttctcccggcccttcttccgcttcctagtcatgtgaccgagctgcaccgtcttctccggttgccatcatgccagccaactgtactcccccctccactcctctctaagagcgagtgttccgccaccaccgccg

SEQ ID NO: 202302 - DNA, 1018 bp, Zea Mays
aataaaagttatccatgtgagatttgagaaggcaaaggaagaggtaaattcagatttggcagtttttgcaggagacttggttagcgtaatggaaaagtatgcagactctcatcctgagtggaaagatgccctggaggacttgctaatacttgcacgtacctgctgtgtcatgacacctggggaattctggcttcagtgtgaaggtatagtgcaagatttggatgaccatcgtcaggaactctcaatgggtgtgctgaagaaactatacacccggatgctttttatccttacaagatgcacaaggctgctccagttccacaaagaaagtggttttgctgaggatgaagttgttattgatcagcgtgataagattatacaatctgcagataggcagattttaactcaatcaggtgtgggtgacacaacatccagagccagtaaaagtgaggcaagaaaatcatacagtcaggagcagcataatttgaaatggaagcgtagccaggagataaagcctgttaaccttcttccaccacttgatacggatgttaagaaagtggctgattctccaaccaaagaacgaatatcttcctggaaaccttttccatctcctgttacgaaggtcccaaaagaatctactcctactaaattggaatcacctaataagaaaacagatgcacactctacagttagtagccatgttgaattaagcagtccagttgaatctttaccacaacaacagcttcctgtcaagcatcaacataaaacttcatggggccactggtctgaccagccaaatatttctgaagagggttcaataatgtgtcgcatatgtgaagagtatgttccaacacagtatgtagaagaccattcaagggtctgtgcaattgctgacaggtgcgataaaaaaggtgttagtgttgatgaacgcttaatcagagttgcggaaatgctagaaaagatggtagaatcttattcaccgaaagacctgccaaatgctgcagtcagcccagatgttgca

SEQ ID NO: 202303 - DNA, 445 bp, Zea Mays
aacttaatcatgaagtggaattatctggtcccaactccaaatcaacacttgatatttaagtgaaccttttgtcccggacaatcactagatgaaattctaatagtttgatcattttctagcaagacacttcaagatggcacagagtcagcaacattcaagatatatgtttttgtaatcagtgcatatgtgggcattaagataattttcagcctacttatgagtgtcccttgttgccatggtttggctgaggcttgctatcgctggtctgctgtacgccttgttaagtggatgcatcaggttttgtcctttagcagattctgacttcttatcttatcatttgaaatctttgtatgcgatgtcttctgctaataatatctgtcatttatttgaaggagaataattatgttggaagaggcatgcatgagagtccccttgactatatcaa

SEQ ID NO: 202304 - DNA, 371 bp, Zea Mays
cgaaggcccgtccgtgaaaggctgggtgttgccccggtctctgttcgacatgtggaggctggattgtccgtgaaagactcggcgccttccgttgccttggttactggggacacgcatacagaagctatggagccggtgattggctgcatggatgctgggttgagtctgcccctggagaatgttcatgggcctggcactgtgactttgggtgtggcggtttctagcctgtctccttctagttctgggagctcagtgggtcttatgccatcatcagagattccaggtgcttgcgatggcccgggtggcaaggtcttcttgtccataaccgatgttgacgttgactcttctgttccggcggtggagactttgag

SEQ ID NO: 202305 - DNA, 601 bp, Zea Mays
tattgtgtaagcaagcagtggattaaatgagccaaatacagcagcaccaattgtacctaaaagagcataaggccactcagcaatactaagtgttgcaagacgccaaaaagatggcggtttctggtgctgaacctcatcgagttcactgtgttcagaactcgtatcatcccgttcactctggggtctgctaaaagtctgtgaatgtgaacgctcgtttttaggatcagaagtcaaaagaggagatatgggtgagtcaggatctgaattcttagatgactgccgctgtatacgatggacatcaactttaggaaggtcaggtaacttcatttcaaaactatcttgtctcttaatggatggtgtcctttctgtttcaattgcaaccatcggtatcccgttgtctatagtttgttcagaaggtggacttggatcctttggtgaatcatgagagtttctgttggtatctgatcgccaaaattgaagcatgccgtgtgtcctttgtagtgaaggtgattttgccatcttaggagaggacgattcttgaaagtattggctcaccgatgtgtcctccgcttgaagcgacttacgctccctgctattcttg

SEQ ID NO: 202306 - DNA, 526 bp, Zea Mays
atccatccttgatgaaatgagggatatttctttgcgtactaattcattttcaaataagcaaagggatgcacagccacaaaattgctacacacgtactagggttccatctctgcggaagtcaagaagttcattaagtctggaatcaagaaaggctcaaggttctggtaatttttttgatcataccaatttggcttctattaatttggttcctggtgaacataaggaaccttctcatcataggcatgaagatgacaaagctaactcaagttctgtttctacatcagataatgtctggttgcattctggtgaaggcacttccaaccaacctgtaactttgggggctagtaacggcaacagaatgttgaatactcctgctgaagtggatagtactagtaaccgtgaagcatctgaaaatggaactacagagacagaactgaaatcaaatggcacatcagatcttcccatgaacacagcagtaaatttcaagagaaaaagaaaatcagatagaaaacctggacctcattat

SEQ ID NO: 202307 - DNA, 348 bp, Zea Mays
cacctttcccatcataaaacgatcatacgccgatttggacgagtaagagcctgaggaggaaagtgtccatatgtgctgatctggaacatctgataatagtcgaacctcccgaacaagatcccagatctggaagaattcggagaaagccatagaggagaaatttcccctaatgtcaagaacccaactgctaccattaattgcttcctggacagttcttgacctcacagccttggtgaacagcagcaaacagtgaaggagcccaatctgcaattcttttgccgtgcagccagcgatcagtccaaaatttggtgtcagttccactgcccactactgactgaaccgatgcag

SEQ ID NO: 202308 - DNA, 378 bp, Zea Mays
cgcagagccatggccgatcgataaaaaatcgatggacaagataaaactatcccacccatgaaccggtatccactggtgaccacaagatccaaaatcagcggccacgatccaaaatctccaagatctaatcctacgccttcaccagacatcctacggtttggatctaacgtggctagaaggatgtgatgatatgatctcgatccccggtgtcccgatcaacggctcatatttggttacccctagatctaatccagtgcgcacaacatggatctgacgaccagaggggcttcttccccaacctagtcgaggcgaagcagcggtccgcatcagcacggtggcgcagcgctgactcgtggcggtgccatggccggaaaagcc

SEQ ID NO: 202309 - DNA, 423 bp, Zea Mays
tctccggtctccattgtgtggtggtgggctaatcgttggccacagctctccttcattcacctgcagtgtgggctaatcgatcatgcatatagcatgcccaatctacacaagacaaacaggttgatattaatttattgctgatcgctttgatagataacaagttgacatggaggcgtagacgctcaggctcagcgtcggcgagctcagcatccgacaaggacgccaccgtcgccatcggatggggtcggcgcctcccgcccggaggccggactactacacatacacatgcacttgtgtacaacaacttgcagtgcagtgcagtactacagagggaatcctcgtcctccacacgcggtttcatgttccacgacggccggcgacgccacctgacaccaaccctctgagatctgtggctgcttgcct

SEQ ID NO: 202310 - DNA, 277 bp, Zea Mays
atggcccaaggcatggatggaggagtggttttacgttaaaaatgatttaaagacaagggaagacatcaaagaaatcattcagcgccccatctggtctcgctttggcctccgaaggccgaaggtggaaattgacgacaatgttgaagcatgtcagaaggcctttagcactgtgtgtgctttcattagcacgagggatttgattcaagagcatatagcctttagggtatggccacttgtggagagctaggatatgccgaaggagaccaccaccgattcc

SEQ ID NO: 202311 - DNA, 274 bp, Zea Mays
gtcaagcccaaattctctaacatctctagcttgtatgctttgattcttagctcatggatattgtatcaactagttggagttgtatttataggctcccaaaccccataaacctgtttgaactccactcacaaaactgtaatatatggtcataccggatatgacactgttcacctgcccggtcagtagctgttctgaaaagctattagagtcagactactacatacggcactacacaagtccgatgtgccaccaaacctaccacgtttcaacaaac

SEQ ID NO: 202312 - DNA, 498 bp, Zea Mays
gaggcacaggacttgttgcgaagtcaagctgatagtgccagggcattgatgttcaaggatgaagagttcaagtcactgcagattcaggtgcaattcaattgttgggattagttgatcacatagctatgtcgcattgctatgttgctttgacctggttattgagtgtattttagccttattaccttatttattgttttttatttgaaatgaccgacctcaggtcagagaaattaacttgcttcgtgaaagcaacatacaacttagggaggagaacaggcacaattttgaagaatgccaggtaatatattaaattggtaatgtttaattgctggttcatatctggatgtgcataattttttattttaattttgtgcgttcagaaattccgtgaagaagctcaaaaggctaaaatggaatctgagaggttgcagaaccttctactggagaaggaggtagacgctgaaatgtgcaaaagagaactggaaatgcagaaggcag

SEQ ID NO: 202313 - DNA, 300 bp, Zea Mays
gttcatatggttatatcgatttaaaacacatgtctcattctactgctgctgtctaaggaaccataatttcacccatacaacaaacatagaagacaggtgtagattccatatagtataatcctatcggcacaaaaatacaactggacaacaactccctgatgcatcttatacaagaataactcaagacagatggaaagttatatgaaacctagcttggaaactatgcctatttagaaagaaaaaaccggaaaggacaatgtaatgtgactcccagattaagcaagaaacatgaactgtaat

SEQ ID NO: 202314 - DNA, 299 bp, Zea Mays
cttccctgtatgatgacttgctgctagtggatcctccatcgccttctggtattcttcttcgcgtgaatggcgccccgcgggcagatctcaaccaccagccacgcgaatctcctcattctgcgatgccgacctgtgggcccttattgccagcaacgaaccctcgcgccgtgtttcatctactcggtctctggttgctcggccccgctgtcagcacggatcaggctcaacggtgagagcgctaatgccggcactattggctcaactgcttccgcgagcctatataaccatagagccctgcc

SEQ ID NO: 202315 - DNA, 314 bp, Zea Mays
gtggacacaggtccagcggaggagccctcaacagcttccgagcgcagcacagggtcgacctcagcctcgggcagcaccgggttgacctcggcctcgggtcgcgcgccgttcagacccccaagatcttcgacatcctcagcatgcgccatctgcagcaacagcacactcattcagcaaacccacacgtacctacagtcaaccacacgaaacaaaagacaagccttacctgctctctcgcccgatcagaccgctccctaacagcctcccggccatgaggaccccacatccgatcgaagagtgcccccgcggaatcc

SEQ ID NO: 202316 - DNA, 452 bp, Zea Mays
tcttgaggaagaatttaccgatgaattcaagttcaagtttgctcttctggttagagtccaagttgcctcagcaactcccagtcagtgatagctatgatcacctctcgaggatttcacagctttcaaacagtgagaatatggaggcattgtttaatattttgtgggaaatatctgttaatcctgtggatgtttgtaatgcctttgtgagtgaaggagttaattgtttttccttaagcaacacgaatgtcactagatcttggaaggacataagatgtcctgtggttgagtgtgataaaattattactgaaagaagtggagaggaacatgaacacagacttggctccaagagattgggacagggattcgctgaaaaagcctcttataatggtgaagtgttgtatgaaactaaaaggagggagttgatcatacaaaaagagtttcagagcccaagg

SEQ ID NO: 202317 - DNA, 282 bp, Zea Mays
tagccatcctttttctcttgggggttgctgctagatctttttgtgccttctgcgcctccactcctgccgaagggcttagaacttctgatgttttcgtcccttcggttctcggttcttcaattttgtcagccttcggcattgcagtcggctcttcaatcctctgcataagagcaggtcctttggcttcagtagccgaagaggtctcaccgccaaattcaggcactatggccggttcaatgtagcgcggtcggtgagtaagaaccttcacctttttcctcttcg

SEQ ID NO: 202318 - DNA, 562 bp, Zea Mays
cttgctactaccacatgcatactccttgtatctatttatattgtgtaagtcttgcaagtacattcttgtactcatggtgctatgttggataagtttgcaggtgggccagatgttgtatatggctacttccttcttgtcgttccttcgacgggagaggagtgagccattatggtccttgttgcttttgtggctaataagcaatgctttgtggacagccatattgcttattgaccattttgctataataaagatgttgtgcgaggagttggtgtcaccgtatagtagagggctatgtcgttgaagaagatgaaacattgaacttctatttatgttgggaacaaatgtatcttagcttgatgtaatattgcactttaaaattttgctctcttggttgtatggtaatgtgcaacttgtgaggtacatgtgtcaatcctggtgtgacatgtactgggacgataagatttgccttcgttttaaatgggttgttgtgcgaccatgtaccttttgatgtggtgactcatgttaatagccaaggcgtgggcacatgtcttctctaatcatg

SEQ ID NO: 202319 - DNA, 275 bp, Zea Mays
gtcattcaaccgaagcaccgtccgcgctgcacatgctgaagcccctgtcctcaattaaatggtgcatgggtataaatggagaccactgacaccctctgctccctcaactcaaaccccagccacccaagcaccctctcctcgccaccagtgctgccattgtcgcttagaagcctcagtgcccgtgttcaggtcacactagagtctccctaaccttcccaccgatgtcaccagacctgccagagctagaggagtctacaacacaacttcttcagagc

SEQ ID NO: 202320 - DNA, 609 bp, Zea Mays
ggcaaatggcatgagggtgatcggtgaaggagtggcgatgaaggtcgtcggagcaacaacagggcagtggcaatcatgttgagctcctctagaacaagatcatctgggtcgaccttgaggaaggacgggaagggagagtagcgtcggatgatagccctgatgtgctcaaacttcttatttaggccttgaggacaaggatctagtcgttgacagagtgcccaggtcaaccaaggagtcagtcgtccccttcaacttgcaacagtagtcatcgacgggtaggtcaccctggacgaggtgcagaaggtagcgtcgaactagagggtgcgagtctcatgattctcgactgattctcaaaaacgagtcagaggtggcgtgtcatgccattgcagctccctagcaattcagcggagatggtgccgaagatccagcagatgacgatgttgtccattcgatcccagaatgaaccgttgtctgagggacaaataagatgtggtcgacaaggcgtacagcttgagcacaagcaacacttgatcacaccaacaggagtaattgtcagaggacgcgagaacgaccatcaccaacgatacgaagtcgggaccaacagctgcc

SEQ ID NO: 202321 - DNA, 414 bp, Zea Mays
caacagtgaatcatcccagcggccatcagccttcttcacgttcgtctcctcctcgccatgaatcccaccgtccacttgcgtgcggaattaaacgcgaagtcgacgtttaacggcgatgtctcgctgccgtgccgtggagggagatgagcaggccacttcgctttgccgtggagggagatgagccgtttgtggaatcagcgagaaagtgacgggagagggcaatgcagagaggccaggccaagaaccccgaataaaggaaggtgcgacaggtggctggcactgtggcgcaagcggatgttgcgtcgtctctccgttgctctcgctcaaggaggccgcgggggcgggccaactagttttcggattccagcgtcgtttggagttgtcctgtcgtgtcttccggtaaacaacaagcta

SEQ ID NO: 202322 - DNA, 458 bp, Zea Mays
gaaagtggatcacataaggatgaaactaataataatgagcaaagttatacagcagattggcacagtctaccttacagatgaacttgtgaagagttggattggggaggtccggaaggtggcttaccgtgttgaggatgtagtagacaaatactcataccatcttcttcaactggaggaagaagggtttctgaagaaatttttcgtcaagggtacccattatgccattgttttcagtgaaattgctgatgaggtagctgagatagaagaggagattcagcaagttattcagatgaaggatcagtggttgcagccatcccagcttgtccctcaccctgagcaactcgctgaaatcgaaagacagcgttcccaagacagtttcccagaatttgtcaaagatgaagatctagtaggaattgaagaaaatagaaaattgctgactggatggatttactcagaag

SEQ ID NO: 202323 - DNA, 319 bp, Zea Mays
cagaagttgcaccctttcttttctgcccccgtggcaggtagcgatagtcagggtacacaaatccaatagcatcaaaaaccctatttaatcttttcttttttcggctcccgaaggccgcatatagtgcattatcttcggacttggaataagctccaagtaactcattgctagtattttcaatgcacttcagccagtcatcatctggttccacaaacttgtccccaaacctgaaggtgtatttcaatcgaaccaggccgccatcgctaggattagtgatggtctctttcggcatttcccagctgtctataagtggccatat

SEQ ID NO: 202324 - DNA, 309 bp, Zea Mays
tgataacgtgcaggaactggattatgaaatcgagtgcgttctaaacgtgatgttctattttggtttttggaacaaagttccaaaataggtagcgattaacttggcttggttgtttttcttgtgtcggagaaggcgaatcgtgacattttaaaaattcactgtcgatatagggtttgagtctgattcggacatagagatattagacagagtcagataagaattgattagagaccgacacaacagagcattccgtttgggagtatggatccggataaaatagtcggacatagatcgaaggtcgagtaatcg

SEQ ID NO: 202325 - DNA, 292 bp, Zea Mays
cggcaggttccctaggaaggagctacagtgtcgtggtaaaatggggcgttctatcttggtaaagctgcgtttgtccgtatgtgcctcagtcgtctaggcttacctagtcgcactctttatggagggcgatgtgggtggcgaagagctccagcatcatcattaccatctctgtggcacgccgaccctaccttcgtagtctgggtctcggcgtggctcgtcgtgttgtgggtcctataggtggaaaatgcacttaggcctaggctagataggtcatgagtgggtcgtaggccta

SEQ ID NO: 202326 - DNA, 271 bp, Zea Mays
ggatcatccacagggatataaagtccgccaacatcctgcttgactattcgttccaagcacaggcatggctgacgaggactattattattcattaaataaagtagtagaatgctagctagctgctgctgctgtctcacggtcacggtctcacctctgcggtccgggccgtgttgagatgtggtgcgcaggttgcagatttcggcctggccaagctcaccaacgacacgaacacgcatgtctccactcgcatcatggggacgtttgggtgcgt

SEQ ID NO: 202327 - DNA, 465 bp, Zea Mays
gcgattggagtactccacggtgcccgtgcattgacactccgtcatctcgaacaggggcaccgaatgcaaaggcggcctgaagcgcagactgaggaggtccttgaaacgcccccacgacggcgtgccctcgtcttcctagagctggatgaaccagagctgggcgacgtcctcaagattgtacgacgccatccagacgcgctcctcggccatggtgcgctgctgcctgaaatatgactcacacttgttgatgaagagcatggggtctgccttgccgtcgtagcgagggaagtcaagtttgtggaactttgggggacgatcgaggtcgcggggcacctcagaatggctaccgccgccctccgacgtcgtggcggccttatccttcaggccctccatgtcggccttcatagccgtcatatccgtggtgagggactccaactgcttcatgatatcagtgaaggtgggctg

SEQ ID NO: 202328 - DNA, 328 bp, Zea Mays
gccgtgtatggagtgctggttggtggcttgaggcctagggttttgtgaaattgatgagtagcacgatgatggctcggaggaaggatggctcgcgggactggaggtagcgaaagatctgttgaggatggtgggcggggggcgaggactgatattgggggtgcaggcgcgttgtccgatttaggagtaggagaaatggccgacctagggggaagagaaccaggtggtgccaaccaccacacacgtcgggggactccatcaccactgcggtgcagaggagtggaggggaacccagagaggtggaggcgctgttgggtgtgtgttgatgagg

SEQ ID NO: 202329 - DNA, 281 bp, Zea Mays
cgaagatgacattgacctctctgtcgacgcgcgggaaggctccacctcctccctcctcctgctgctgaggttttcgcggttctcctggtcctcctcgcggcgggggaggaggtagaggttggaagggtcgaccgtgcccgacggaatgcttgaaatccctgtagttccggagggtgtggcacatgtccttgtggtacgggcactgggcaacgaggatgtcgtctagcatgcgttcgcctccacgaggtcctcctcgggcgcgagaggcaggtggtccggcg

SEQ ID NO: 202330 - DNA, 671 bp, Zea Mays
tgaagctcaccaagaactaacctttgctgaagatcaaagatggccacccgatcttcagctttgcaaagcaggttaccggtcccagcataatatattgcatcagtcgcaatgggaagggggcttttcttcacaatttcattcttaagattcttcaccaaaacttgattgctactcttctcaaggactgcaaacctgttacgcgctacaaaaacagcagaactacccgcccctttctttgcctcttgtaagtaatcagacctgccagcagaatccttgggaacaatgtagagttcatatgaacccccgtcagcatcagagcaaatcaagacagcattctcggttgggctgtaggacagcatcctgggtgactggttcaagctgaccgatccaggtcttcttattggagccacttgaacttccttctgggtggagtactcaaagaaacggagaaatcgatctttcacatagaaaacagtgtcaccactaacgcagaaggccgggcgttccctctccaatttgaacacaatcatgccactgtcatggccagcagcaagaaggttcatttcagggtgagcagcaagaatccagaaacggtcgtgctcccgtctaaatgtctggataccagttctctttgtggcatcccaaatgcgaatgcttttgtcttctgagtt

SEQ ID NO: 202331 - DNA, 545 bp, Zea Mays
gtgaaattagagtaggggattgtgctctttttcgggctgtcggtgctcctccgttcattggattgatacgttggattgagaaaaaggaagaagcacatcccaaattacgtgttagttggctttatagacctaccgacgtgaagcttaacaaggatatacaactcagcgctgccccaaacgagatcttctactctttccaccaggacgaagcatctgctgtttctctactgcatccttgcaaagttgcctttttacgtaaaggtgttgaactaccagctggaatttcatcatttgtatgttggcgcgtgtacgatatagacaacaagtgcttatggtggcttactgacaaggactatattaatgtaagttcatcatttatttcttgttttgttcattatatatctattattcacatatgaaattgaaaaccagaaacggcaggaagaagtaaatcgacttctacacagaacaaggctagaaatgcgtgccgcattgcaatcaggtggacgctctccaaagcgtttaaatggtccatcagcttccca

SEQ ID NO: 202332 - DNA, 401 bp, Zea Mays
tttgttggaggtagcaagatctctcatgtttcagatgaatgtgcccaagtatctgtggagtgaggcagtaatgacagccacatacctcatcaatcgaatgccctcaagaatacttgatatgaaatcacctactgagcttctgttgggaaagagtgactttcgagttccacccaaggtctttggttgtgtctgctttgtaaaagatcatcgacctatggtgagcaagttggatcctcaagcagtcaagtgcatttttgtgggttatgcatctactcagaaaggatacaagtgttgggatcctattggtaggcgactatttgtgagtatggatgtgacatttcgagaggaagacccatactacacaaagaaagttaatctagaacaaatcatggatgacttct

SEQ ID NO: 202333 - DNA, 389 bp, Zea Mays
catccaaccgcggagatgtgggagcccaggaggtcgtagcgaggggtttccttgattggtgaatcttcgatcaaggatggagcaccgggctttgctgctcggcgtggcgctggcctttctgctggcctctggctcccagggcttgaaccatgaaggttggcttctcctagcgctgaagagccagatgaacgacactctccaccacctcgacaactgggacgcgagggatctaacaccatgcatctggaagggcgtcagctgctcgtcgacgcccaacccagtggtggtgtctctcgacctcagcaacatgaacctgtcaggcacagttgcgcctagcattggtagcctgtctgagctgaccctccttgatctgtcctttaatgggttct

SEQ ID NO: 202334 - DNA, 344 bp, Zea Mays
cgcgagagcgcgacagggctcttggatccccccagagggccacagagcccacacaacagcaggtacgccgagtatgttttggtcctcttcccgtccccggttggcgatctcttcgtctttcgtcgtggcatccagttccgtccatctccccaccaccaccagcagcaacttagatttggcacgagttcccgtcacgtttggattcgatcgctcctttgtgtattctagtccacgctctgatgatcgctggcgtctgacgagggcaacagtcacagatcatgaatccagtgcagtcctcttcatttttttgttttgttttgttttgtttcgtttgtgcattctag

SEQ ID NO: 202335 - DNA, 1242 bp, Zea Mays
cttattcacgttgcattaatccttgccttactgcctgcagggcgaaagagtacagcgtgaccataaaagatgctgccaaattagatctttacagccttaggcagttcttggctggtaggcagagggaactgccacaggatactgtccaagccctcgatattgctatgcgagaatgcccaactgaaaagtactagttatgatgcatccatgcaaatttaatatccattgaattcatgtcgccctatatatatttgtttggcggactgactattgtatatgatccttctgcggttccatcagttctgactttttttcttttcaaactgtgacaggtatgtatccatctcaaggtcatttttctctcagtcatttggacatggtggtgatattggcagtggtgtggaatgctggagggggtactaccaaagtctacgtgctacacaaatgggattgtctttaaatattggtatagttgtggctaattcttttgccttattaaatcacacataccacactatctattctcctagacatttacttggcatgcagtagcatctatatgtactatctgtatgtccaccaaattaaagagtaacaagctcaatttaaagcttctgccgtgggcatgatgtatattacacattcgtggtgccctttgttactcttgtcatcaatgaataagttaggtcactgtacagtcttacaggactactgttctgtatcatgcaagtgtactttgtactatgtattaagaatacttgtatatattgtatatgccattgtgccacttcatcttgattttatatacaagtattaaagaactatagtattcttttcgtcccaaaatataagtattcctaaatttgtccttaggagcttctccaacaactgacttgggttttcgccatgggacatgagagccaaaaaagctatgagctagtgtaggaataagagcttttgcaacaattggtgttttagggcctgtttggaagggatccgtgtggctccagctctacattgtagtagtactataggtgtggtggggccaggagccctagaatgatggcttctccggctcctccactcttgtagttgtatttttctggagacagccatccagctctgtgccatagtgttgcatattgcacatgcgcaggaagtcggataaatttcaatgttaaccagtaggggtgataaaatttgtttattttcctttcagatatttcagcaactgcattttac

SEQ ID NO: 202336 - DNA, 282 bp, Zea Mays
tgatgaggcgatcgggtaggaggctattgctaaaggtacctccactactgaagctgaacagatcgtggctgaaggaggaagtgagaccgaaggtgaagaggacaacactattccgagcccaatgaaacctagccacattgattttggtaaatctactgtgacggcatacgacatggttatgatgaaaaaattgggctattttggggaaggagagagcaagcttgtccggtttgctcgggaggaggtggttccacaaccaagggaggatgaagtcgttgtttt

SEQ ID NO: 202337 - DNA, 407 bp, Zea Mays
gttgattgcaagcaaacggtttggaggacgggagacagagagatcacagcggcagcatgcaattaagaatccaagaacagcagacgctaggggggttgtggggaggcaacgtggatgctcacacagtgagcagagctgctaggccaggcgcggccgggcggctgcagcgagcggtggcttgagctttataacgggcggaggagtggaggacacggatggatggatggatacaggaagcaaggagcaaccccgcgggtggggtccgagaaaaggcgggcggcgaaggaagaggaagagaaggcagcagggtaagtggtggttggagacagcacaggaagaggacgatggcggaggtgggggacaatttactgacaataattgccgggaggcgagctgctgtccactgc

SEQ ID NO: 202338 - DNA, 508 bp, Zea Mays
atttaccgagcttctgttgatgacccttatgaggaatttctcattacacaaactgaaaataagggtgctcaaggaatctcttcagacataacagatgatttcatcctcttccccttaaaggtaaaatgttactttgttggggaagcttcaaatataaaaaaccatatgtaatttttcctctgttaatagaatatactgttgcatcaggaattgaactatgctataaattgttctgcgtaaaaaaagtacataattactgttatttaatttattatacttgttttgaattatgtctaaggctattttatcatatctgctgtcagcagggaagaaaccatgtatctgctccatgttttctaaaggagatatgtcatcctcttttgcgtactgggcagcagcttcaagtgctcatgaaccttctaaagtattgcaatctggctgctactgaaggagatgtttatccctctcgtaatatcattcatatggagggggttctcccgtggtttga

SEQ ID NO: 202339 - DNA, 729 bp, Zea Mays
ctgagctgatctttgtttgtgtgctaagaattgcaggaggaagcacacgtattatcttcaatatggttcgatctttgagcgtgtcatgccaaactgatgctaagcagcaactgcttgatgaaaaggctggtggagcaatagcagagccaacattgacatggtagctgtcaacctgatcaaaatttggacctgagaaaatgtgcactcctccacggaggaaagcaacagcaacttcaccaccatgagcagaataaactatttgagctagttgtcgaacatcatttggaagatcgtaagggtcaaagctgagtctgttcgccctgtcaacactgcactcagaggagctccgttcatctgatgtcgttggcatcggaacatatgtttgaggatttttaagatcctccgttggtggaatgcttttattaactctagtggaccaaacagtttgcatgggaggctgcccacctaagctagtagggcttccaaatattggatgaagaacaacaggttggcacgaagattcccagcattgcaccctccatccggtgatagaaggtccttcatcagggtcataaggagacatgtactgccctgcaagaagtaatctaaaatcatcaaaaagtaaataaacaccggctatcacaactgatgcacaaaaggttagtgctaagaatgtaaattgaatagttgctggttgagaaatcatgttctagaatatggcacatattg

SEQ ID NO: 202340 - DNA, 379 bp, Zea Mays
ctaaggaaagccatggtactgataagtgctttgagcttccttctatgagtggagcctccacaaagctggatgtcttcaaggatgtgtcaggttcatttccggaggctcgctcatcagtaaatgccagcgatcttggagaccatggtaatattagtccaaacttaagtccattagcaggaacatcacaagaggacacaaccagtaaactggtatcagaagtatcttgcgatggtgggatgcaacacacttctcgtagtaatgaaaagctacaggaatcctcagatgtatctgatgttgctatttcccagggaagtaacattaaatcattcattttagaagaacttaaagaatctgatgtatgtgatgctttcatgagggg

SEQ ID NO: 202341 - DNA, 289 bp, Zea Mays
atctgagtgaggccatggttccttctgcaagatccaagcgcggggttcgcaggggaccgtcctcatactcccaggcacccactcatatatttgtcgactccgttcgaccggacccgacgccttgctacctctcttcacaataaaccatgagtcagacttttctatgactcgaacacgagctagtgacgcccttagcgcttcgcgcatcagggtcttggctgctagtgtacccatcaccagctgcccctcgctcttattttccttgggcagtcacgagccctttacggac

SEQ ID NO: 202342 - DNA, 296 bp, Zea Mays
ccacgtcattggcacaccagccgtccgcaacccagagggattacaagtaaccaatgacgccgaaggccatcgcattgtcaacctcatcatgactgaagattggcaggccccaataacactgtttctgcaagtatattaccacccgagcgacatcaatgaggccaaacgcctcaagcaccgaagccaggacttcgcactagtcagtggccagctatacaagaaggggatcagtcaacccatgctaaaatgcgtcaccgaaaccgaaggcattcagatcctacgcggagtccacatcg

SEQ ID NO: 202343 - DNA, 445 bp, Zea Mays
gttggccccaataggaacaacacaatatacaataacgacatcaccatcgccattagaatcagcatctacatctccggaacatcacccacctcagggaggcggtacatggcggccatgttgcctgagcccatgtcgaccccacagggactagctccccagccttctgttcctccggcgacgagctccatcccggtgacctccgaggcagcagccgccaccagcacgtcgccaactgcgcccttgtcgcaggactccttcatggcattccagtgcaggactcccagacgttgatcatcaaccacctgtcagtgttgaccgcctgattaggggcgatcgatgctattaaatttgctctcaagtcatttaccaaaccattttgaacccatgcatatttaaattcgctctcatggtgaatcgaattcaacaaagtgctaatatggctcct

SEQ ID NO: 202344 - DNA, 906 bp, Zea Mays
ttctacactaaatttatgtcgctatgtgttgcttatggtaaagtgcttggataatgggtgttttcttgtagcatggtggttcaacgaatgctttcacatcttctgaacacacaaacttctattttgatgtgaacagtgatagcctgcacgatgctttagataggtacgtcctgttgcattctttattttttaaccttattttccttgtgagaaatttcacttatgcttgtgccatctaatcttaggtttgcccaattttttatcaagccattgatgtccccagatgctacacttagggaaataaaagctgttgactctggtatgtgatatctttttgttttttctgttgctgttactggaatgacactttaattttctaacttccatttttcatttttagaaaatcagaaaaacctcttgtcagatccttggcgaatgagtcaggtacttgcattttccaagctcatgttaaataatcagacaagttaattatagagatctgattttatttgtatctgttctttcttgttttcagcttcagaagcatctttgtgcagagaatcatccttatcataagtttagcactggttgttttctgaacattttttccctttcctttctgttcttacattacatacgattaatgacatttagaatacactgctcatttcctatctaattttatatttctttgaatgacatgacatctctttattttagcattcatactggttgtttacagaaaccttttatttcagtttttgatagtgatagaaataaaattggacacaaggcttgagcttattaaatttcattttgacatgatatctctttgcttcaacaataaatgatgtttcaatgtaataaagagttcttttatgatatatgcttcactgcttgcttgaa

SEQ ID NO: 202345 - DNA, 354 bp, Zea Mays
caggctagtgtcaagatcaagtgtcgcacgtcgacaccatcagagttgctcatgccaccaccgctgtgcctcctccaccgccgctgctgccggagatgcccaacatggcagacaccactcaccccatcacaacaggtaaagaagcagcactcctgggactgtgtggatagaccttagcagcaactatgtggctcgattttagcttccaggaggcgacagcacaaaagcagatgaacaagggaagagaggaggggaggagggaggccactatcatatatggcgtgagtcccgtgagaagataaagacaattgagaaaatgttaatcctcccccaccgcctctctcctcaaatcag

SEQ ID NO: 202346 - DNA, 567 bp, Zea Mays
ttaaacatgctggaggaaggcctcataaaccatccagttgttggatttggggagttaggtcgaaaagtcaatgagataaggagcctttttagaaagattgaagaatccgaggttttattcatacgcagcaaaagtattgcttgacctcttataacccttacacggaatctccactaattaaggattatccttgtgtattttttctagtccttgccaccatctgctgcagaggttcaacggacagaatgcttaagatcactgagagaagttgccacttctctatctgaaaggcctgcccggggtgatcttactggtgaggtttgtcactgggctgatggataccatctgaatgtagcattgtatgagaagatgcttggcagtgtttttgacatcttggatgagggaaaacttacagaggtcacttcaaatccatgatatttgcagttttccactgactaatttcaccattagtcatgatgtttctcttacgtttttttctttaatccaccaggaggcagaggaaatccttgaactcttaaggtcaacttggcggacactaggaatcac

SEQ ID NO: 202347 - DNA, 532 bp, Zea Mays
ctttaacctttctgggggatcaacaactgcagtctgacctacaaaggaaggcaatggctagattgatgggtctgcagttccaaattgtatacaaaaagggcaaagaaaatttggtggctgatgctctctccagggtgggaactgtgatggcattagctgctgtttcggaagtgcaaccaatctgggtgcaagaggtgatcaactcatatgtcacagatgcagaagcccaagagctcatcacacaactgttgattaagagtccgaatgaggaagggttcagtttgcagcaaggcattatcaggagggaggggaagatctggattgggtctaattctgccctgagaactaagttgattgctgctcttcatgacagtgctgcagggggtcactcagggatgcatgcaacataccaaagggtcaaaggagtgttctggtggaaaggaatgaagacagatgtcattctgtttgtgcagcagtgtgcaacttgccagcaggccaaggctgagagaactcatccagcaggacttctcca

SEQ ID NO: 202348 - DNA, 292 bp, Zea Mays
atgatattgtacgcgatgcctgggactcagttggaacaacgaactgtcctttcctcactcttcactataaactaaagaagacagccaggaggttgcaagcttggagtgacaggcaggttggtcacattagatctcaactagctttggcaaaagaaatttcacataagctggaaattgctcaggatgaaagggtgttgactccggatgaattttggctgaaaggcaagcttaaaaaacattctttgtttttatcctccctgaagcgtactatggctaggatgagatcaaggat

SEQ ID NO: 202349 - DNA, 543 bp, Zea Mays
cccaatcagagtgcattcatcaagggaagaagtattcatgacaattttatgatggttagagaaacagcaaaagcgattcacaggcagaaaattcctagaatcttgctgaagttagacattggcaaggccttcgactcagtttcgtggcctttcctccttgaagttctggaacatgtgggatttggtctattctggcataatttaattgctaagctattgtgttcctcctctactcgagtgctagttaatggggaaccaggagatctcatttgtcaccagcaaggcctgcggcagggagatcctctctccccaatgctctttatattagtaatggatgtgctgaactctctttttcagaaagcaaatgaggttgggctcttgggacctttattaagaaggggagggggtcagcgggtctctctttacgcagatgatgttgtattatttattcagcctaacagaaatgagctgagtgtggtcaaggagctgttgagggtgtttggcaaggcatcagggctgatcacaaacataaataaatgcagt

SEQ ID NO: 202350 - DNA, 385 bp, Zea Mays
ccggtactacttataattaattaatccatgcttcgtttcgtacaattactctatccacctccggtcgtcgagcgacggtttcccaatcgctttatataattcccctcccttacctcaagaaacagttctagagcgctccatatttctcctcccctttcccttcgtacgtgagttacccagacgatgtttttcatctctgtagcaaccgaggaggagttggaacagtcccttttgtgctacgcctcgctgcatcctcaaccgttctgctactgccatccgctaactgcttgtgcccacgatgtgcctctctctctcgcccaaaaaaacacgccaactctgcctatagccaggctcagtaccgtacgtgtgtagagctcattcaagc

SEQ ID NO: 202351 - DNA, 545 bp, Zea Mays
ggcaagactgcggtaatctgacgggtcagtgactggagcgccagagtcggcatagatcttgggactggtgtcaacgggcgtggtacaaggtttgcattccgccatgccagcacggtccaagatgtccaacatatactgccgctgagagagaaccataccatcagaagtgcgctggacctgcatccccaagaagtgatgaagtgctcccaaatccttcatagcaaattcccgctggagagccaggatgaccttccgcagcagatgtgtcgaagaggcagtgagaacaatatcatcgacgtaaagtagtaggtaggcagtgtctgaaccttggtggaagacgaacaacgaagtgtctgacttggcttctacgaagttcagggataccaggtatgtggcgaagcggctgtaccaagcacgaggagcctgttttaacccatacagtgacttgttcaggtggcagacaaagtccgggtgagcagggtcctcgaatccggagggttgagcagcgaacactgtctctgtcagggtgccgtggaggaatgcat

SEQ ID NO: 202352 - DNA, 398 bp, Zea Mays
ctctgatgatgtggggcatttggatgcgttgatggctaatagtgatgttttggcggcgcctgtctcttcggattcgttggcaggaccagttgatgcccctaccctcccgtgtgttgcggttgaggagctggcggcgcctggtgttctggccttgtgtgatgctgtggttcccgattattctcctgatggtgccactgctattttggctgctggattgagggaggattcgattttggctgtgtgttgatagtgtttcttctgctagatggaatttgaagccacctgttttcaaggtctactccaggaggttgagaccatctattttggatgatcaggatggcacgttggttcagtcgagtcttgataattctatggtgatttcttcgcccttgtgcgag

SEQ ID NO: 202353 - DNA, 583 bp, Zea Mays
cgggaccggaggcgctgccgcggcggtggtcgctacgagttgccgcaaggaagggtggtgtaccgcgactcctgcagcggcacggcgtggccgatgctggacaagacgaattactacgagtggagccagactatgaagctgaggatgcaggcgcgcgatctctgggacgccattgaaggcggtcctgtcgagttccgcgatgacagacgcgcactggaggtgatcgtcggggctgtacccaaggagatgggtctcccactgctcgacaaggctacggcgaaggaggcgtgggacgccatcgctgcgacccgcatcggcgtggacagggtccgtcgagcaacgttgcagcgcctacgccgtgattgggagaacatcagcgtcaatcctggtgagcaagtggatgactttgctgtgcggttgtcaactctgcaccagcagcttgccatccatggtgatagggacatcactgaggagcgcgtggtggagaaattcctgcgcacggtgccggccaagtactcgcagatcgtcgtcgccattgagcagttccttgattttgaggcactgactcttgaggaggtgactg

SEQ ID NO: 202354 - DNA, 283 bp, Zea Mays
gacacatgcaacaaggctcagaatgcattgttttcttgactcccgctctctaaatttgaaagagttggatatttgagtgaggtttatgggatctggactaccctggagaatgtttatgaggagtaacgatcatgtgaaaaccatactctctttaagacccactgtcgagagtacgaacactttacacatagttgggtgaagaggcaatcgattctatgttttctcggttctgatcattaagatgtacgcaaacaaggtgtagcttccctacgacgatcacgag

SEQ ID NO: 202355 - DNA, 289 bp, Zea Mays
cccgaaatcaccctcatccgcacgatctgacctgaacggtcctgattcccttgcctccaatcgttacgccaggatccaattacagctgtcgatgaacaatcctatggtacacacgacttcttccctccccagcgctacggacaaaggcgccatgcccgcatggcggcggatcacaccggcaacatggtacgaccgcacccaccgagactatacctagatctgatagcgtctaatcgaagcggaggttaaagcggattcatggatgcactacataccgccactaatgccg

SEQ ID NO: 202356 - DNA, 468 bp, Zea Mays
tcttatctcttcccttctctgcctcgcttcgcttcctacccacgccacgcgtgtgttcttggcagccacccaatccccgcctcgcgaaatcagacgccaaatccccttatcttatcatcaaatcgatcgccaacgggcatgatctgatggctccctcatcatagcctctgctgctgcaccgcagcaaaatggccctggtttagtttagtcctcaagatcccgcctttctggtgctctgtttggctagtgtcgtgccgccgcgcgaggacccggagattcgattccggtccggtgtatctctaggctgcttggtttgggttaggatttagtgggcagggttgtgcagctggtgtctcgtggaggaagaatttcgtgggaggattttgaccgggtttgggcaaagagcgcgccgttcgggaggaggtgattctcgcgtggttgcgtgctttgctgggagtctgctgcggc

SEQ ID NO: 202357 - DNA, 525 bp, Zea Mays
gcgcagcgacacattatcaagaactatgctgttgataatcttgaggagttcatgactccatatatctctattgctaatgaacctgctgaaaatcctttgataatcgtagaagacccaagttcttcacagctatgtggtgctaaatgtttcagtgaatcaactggagaaatgaggcaatcctccaagaaatcaaggagatattctgaaatccctcaagatctttatgccagaattcctgataacgctgcttcatccaaggacaactcaaaggccaccgatgtcttcaatccagggaccccaaatcacctgctacctgtacttggcctttgtgctccaaatgctgatcaggtgaactcatacaaaaactcaatttgtgcaccaagcataaaggagcataaaagggccagtggtgacgtagtcaacaaacaactgtcaactcccgctgaccattctaatgagcttagaaacgaagttcaatcagcttctgataaggtcatctttcctggtgcatctgaggaagctttg

SEQ ID NO: 202358 - DNA, 739 bp, Zea Mays
gcaaaatattatattagtgaacctatgagcagttgagcatactcaatctcatgcctcatctgatctttgtggaccaagtgcggtttgaaattccctcacctatcttgggctgacttaaagacaatcagatttagcatttagtcaaatgaaaagatggataatagggatgatcccacttggatcctaggcacaagattgagtgtgcaattgtgcatttttcattataatcgtatgcacctggtacttcctattattaacattatcaaatactgttcatgtagtgtcttgcactcttgcccgttcctgaatagacagttagggaacagggtaaagatggtgtctgtagactttttggctgggaatacaaatgttaagatgtaaccgcataaggatatgtcatgtgcccaagattctcgaacagaagttacctcaataatcgatagttcaataaatagattagtttgtatgattaatttactatgttgttcttacacaactggtacataaattcagctacatctaaacttagtcaatgacatatgctaacttttgttgtttttcacagtggcacagaacacttctttgcatgaattccttgatagttatctacaattcaggcacaggtggtatgatttgccacaccgaggcccaaagggaactgtagcaggtttggttgttggggagcttgagctttgccgtcgtgtatttatggtcctctatcgcatgtgagatttctatc

SEQ ID NO: 202359 - DNA, 354 bp, Zea Mays
gaggtgtggcatgtgcttgctgcgatctgctcccgaagctctagcttcctggcgagactcatggcgatggacatggactgtggattgtggatctcgatgtcgaggctaaggggtggttggagtcccgccgtgaagagatgtacactctgggtttccgtgaggtggccgacacgtggtagcagggcttggaagcggtcctgatattccaccactaagctcatgcgatgacatgctgccggtttgcccaatgggttggaccgcaggggtggtctgaatcgctggtgcaggagttcggtgaagcaacaccattgtggagtgccctcgtcttgttgaatttggatgaaccacaactgc

SEQ ID NO: 202360 - DNA, 1193 bp, Zea Mays
agatgtcgggcatagctgttgtagggagagattactatggtgtatttcctctcaggggaaaactattgaatgtcagagaggcaaaccacaagcagataatggacaacgctgaaattcagaacataaagcaaatccttggtttgcagcatggaaagcagtatgatagcaccaaaggtttgagatacggccatctcatgataatgacagatcaggtttggcatatagctccaattctatatcaaccaatcaaactcaagttttgtctgctcatgctttgacaaacaaacttcaggatcacgatggttcccacatcaaagggttgctgatcaatttcattcactcattctggccatcacttcttaaagttccatctttcttggttgagttcattactccaattatcaaggtatataacagttggggtttatctttgggcatatttttatgcatttttaacttttattcttgatcctttagtaatgagcaccgcaggcattttttccctgacagatttgtaatttttgtaaaacatgtgtttgactgccatgatgatacttgaattcatactcatttgtccaggcaaccagaggccaaactactaagtcattctacacgttgccagagtatgaagaatggagaaataatttaggagcaagtgcaagttcatggactataaaatactacaaggtctgcttgtccccgcttgttcctattgtttactcttctgtgggcatttgctgaggatgtcatcattattatgttgtcaatcatttaaacggatcattattggtacaggggttaggaacaagcacagccaaagaaggccgaaagtacttcgaagatattactgaacataaaaaagattttctctgggtagatgaccaagatggcaatcatattgaattagcattcagcaagaaacggattgctgataggaaacagtggcttacaaattttcaggtttagcacttgcatcttttcccagtttgtcatgtttttttatgctggatccacactaaacggcgcaaactgattttcagcctgggacatacattgaccaacgtgacaaacatgtcaagtatagcgatttcatcaacaaagagctgatactcttctcaatggcagacctgcagcgatcaataccttcaatggttgacggccttaaaccaggccagaggaaaattctgttttgc

SEQ ID NO: 202361 - DNA, 363 bp, Zea Mays
agatgttccacactcctctgtctgttgaagcttttgagcagtttcatgctttacaagacttattggcaaatcttccgcaacatgatcagagaggcaaatggctctgcaatggttcctctagcttgttttcctcacagaaggcctatactcacatgtctggcaaccagtggacccacatgtctggcaaccagtggacccacctcatcttctcctggttgtggaaaacaaaatgtcagcctaaacacaaggtcttttctagttactgcttaaagatagattaaatactcgttcattcctcagacagcgatctatgccactagactcctacacttgcgacaactgtatcctccagctcgaagagat

SEQ ID NO: 202362 - DNA, 1499 bp, Zea Mays
ggagctggccaccgtggtgcgcaaccacgatgccaaggccctgaggcaccacatgggcgtcgacggcgtcgcgcggaaggtgaacgtgtccctcgccgacggcgtcaagtccgacgaggtgggcgtccgggccgaggtctacggcgccaaccagtacaccgagaagccgccgaggacgttctggatgttcctgtgggacgcctgccaggacatgacgctcctgctgctcgccttctgcgcgttcgtctccgtcgccatcgggctcgccaccgaggggtggcccagcgggatgtacgacggcctcggcatcgtgctcaccatcctcctcgtggtcatgatcaccgcggccagcgactacaaccagtcgctgcagttccgggacctggacagggagaagaagaagatcgacatgcaggtcacccgcgacggctaccgccagaaagtgtccatatatgacattgtcgtcggggatatcgtccacctgtccatcggcgaccaggtgccagcggacggcctgtacatcgacggctactcgttagtggtcgacgagtcgagcctctccggcgagagtgagccagtgcatatgtccagtgcaaaacctttcctgctcggcggtaccaaggtgcatgacgggtcggccaggatgctggtcaccgcggtcgggatgcgaactgagtggggaaacctcatggaaacgctgagccaaggcggtgaggacgagacgccgctgcaggtcaagctcaacggcgtggccaccatcatcggcaagatcggtctggtattcgcggtgctcacgttcaccgttctcatggcacggtttctcgtgggcaaggcgcacgcgcccggcgggctcttgcggtggaggggagcagatgcgctctccatactcaacttcttcgccgtcgcggtcaccatcatcgtagtcgccgtgcccgaggggctgccgctcgccgtcacgctcagcctggcgttcgccatgaagaagctcatggaggagcgcgcgctcgtgcggcacctctcggcgtgcgagaccatggggtcggcgagctgcatctgcacggacaagaccggcacgctcaccacgaaccacatggtcgtcgagaaggtctgggcgtccggggcggcgcagacggtgagcaccgccaagggcttcgacgagctcaggtcgtcggtgtcggagaacttcacgagggtgctcctggagggagtcttccactgctccggctcggaggtcgtcacgagcaaggacggaaggactagcgtcatgggcacgcccaccgagacggccatcctggagttcggcctcgaggtggagaagtacaccaaggtggagcacgcggacgccaagaagctcaaggtggagccgttcaactcggtgaagaagaccatggccgtggttatcgcgtccccgaacgcggccggccacccgcgcgcgttcctcaagggcgcgtccgaggtcgtcctgagccggtgcggctccgtcttggacggcaccgggg

SEQ ID NO: 202363 - DNA, 1215 bp, Zea Mays
ggcgtggcaagggcaggggcggcggcggcagaggcggcgacaggaggaagaaggaagagaaaggtacgggcgttgttctgcgcaccacctacgcaacctactacctcctcagtctccacctcctttctcgttgtatgcacgcacgtacgtacgtgcatggtgaagactgaagaacccttgttgttctgcttgacaccatggatggatggacggacacgacagacactgtgttgccgatcgcagtagcacttgcatgattgtagttttggctgcttttaattagcatgtgaatggaaaggggaaaaaagaaaagaagaaggttcttcgtttctttatacacgctgccttcctccctagctactaccgatcactgcaagcagcggatttcgtccgtctctgatgaaggatcctgtctctttccccttggagcgagcctggctggcgttgttgccacccaatccatggttattactactccttgtccttggccgctccttcacgagcgccccccgttcattcccgtgttcagaattcagttaggaggtagatgcagaagggtagcagtattaagcagctagtactactaccggcagtctggttgggtcatgcggtttgcaagggcggagtgaattgcgctgccgtacctggtttcagggactgggagaagctgtacgtttcgctcacctatagaacactggttgatagttgatactgagaactttggtttgcttcttgtcctttgcatgcagtggtgcccagcgtggtggacgtcacggtcgtcaccccctacgaatcccaggtgacactcaaggtatgtgttgtgttgtgcgccatcaccgtatcatcagttgcattccttcctaatccttcttctcccacacttgattgagcgcgttaacgctagctgattgatcagagagacgagtgactgtgctgtgctgctgcgcactgattgattgtgcaggggatatcgacggaccgtgtgctggacgtgcggaggctgctggggtcgaacgtggaaacgtgccacctgacaaactattcactctcccatgtggtaataatgctcgcctctcgcactctcgttccctcaactgcctacagtactagcagcaggcacggctaattctctggctgcgcggtatggtcgtgttgcaattgcattgcaggcgcgcgggcaccggctggaggacggcgtggaggtcgtggcgctca

SEQ ID NO: 202364 - DNA, 316 bp, Zea Mays
aagaaagggttttagaaatcagatcaagaacttgtggtggagaaaaagagatgatgtcccagaagctccaaatgggccaatgcaagtgattattctagattttgctgcttttcactgtatatatctgtaatttctaatattctgtaactttattttctccatcaggtatacattcacctccatagaatcacagatcagagtacttggtgatttcgccttcatgttacgggactacgagcttgccttgtcaaactacagactactcgctactgattataagcttgataaggcttggaagcgatttgctggtgtacag

SEQ ID NO: 202365 - DNA, 438 bp, Zea Mays
caaggaggattggacgagtgtaggcagagcagattagaacaaagaagcgagacggagagccggagaggcacgcacagtcgcacagattcggggaggcacaaaccctaaaccctaagcgaagaagcgagacggagaaggcgagaggaaacaagagatctaagaacaaatcgcaagagcaagagcaccgaaaagtcaccgacgaccaccactcaccagtttaggtttagggttaggagaagccgagaagtagtcgaacttacagacaggggctatgtcggctcaccggagcaagaggaacacgacagtcgacggccgacgagcgcaaagcacggatccacggagccactccacgaaggagatccagagagggcgagtccgcgagtgtgacagagacggagagggcgagggcgagagaggagacgaaaatgtggaagactg

SEQ ID NO: 202366 - DNA, 378 bp, Zea Mays
ttactgacccgtctgactaccggagtcttgtcggtgccttgcagtatctgaccttcacacggcccgacatcgcctacgtcgtgcagcaggtttgccttcacatgaacgaccctcgtgagccccacctggctgctctcaagcgcatccttcgctacattcggggtactctacacctgggtcttcatcttcgaccgtcgaccaaagatgacttggtggtttattctgatgctgactgggctggctatcccgatacgcgcaagtccacctcgggctatgctgtgttccttggtgacaacctggtctcctggtcctccaagcgtcagaacaccgtatcccgctccagcgctgaggccgagtaccgcgtcgtcgccaatggtg

SEQ ID NO: 202367 - DNA, 297 bp, Zea Mays
ctgctactgaagctgagcagattgatgttgaagaaggtgaaactgaagatgagtacaacgccatgccatctaaacccagccacctagagtttgggaagtctactattaccgaaggtgatatgcctaagttgataaagctaggttatatcagtgaagccaagaagaagctagttcgttttggtggagaggaaattactccgaagccagaaaaggatgaggtggtagtatttaaaagcttctttaaagcaggattgagatttcctttgcatgagatgattgcggatgtgttggagaagt

SEQ ID NO: 202368 - DNA, 375 bp, Zea Mays
aagggactgaattctttgattattcttggtttttggacaatctagaaccacaaaatggttgtgtttttgacagacactctccaagattagtgcttgcttttaaaaggctagatgatgagagagtgctttttcagccactattccagggtgtggcggacttgggccccgcctaaatgcagattttttctttggcttgtggcgcacaacaggtgctggaccgctgacagattagctagaagagggctggaccaccctgcgttatgccctctgtgtgatcaagagaaggaaaccttagaccatctcctggtttcctgtgttttctcaaggattttctggtttcagcttctgaggactttcaaccttcataggctcgct

SEQ ID NO: 202369 - DNA, 451 bp, Zea Mays
ttcttactggagggccttgaggaggaggaagatgaggctgtcgaggatgccgggactgaggagaccccggtattctccctccaagctcttgcgggcgtggcgctcaccaacatgatgcagctgcagatcacgctgggggccacctccctcgtcgccatgctggattcgggcagcacccacaacttcatatcggaagccgcggctgcacgcacgggcctgcccctcgaacaccggccacgcctcacggccatggccacgcctcacggccatggtcgaggagtgtactggtcgcttgtgtgagcgtcatccgcaacgcaccactggacatcgacggccactgcttccctgctgacctatacgtcatgcctttggcgggctacgacgtggtcctgggcacccgatggctggcagcgctgggaccgatcatgtgggatttcagcaaccacacgat

SEQ ID NO: 202370 - DNA, 2256 bp, Zea Mays
ggagggggcggaggggccggaagttttccggccgaggagcccagcgggaggatcgaagaggaggcactggtccggggctgtccactgcatcgggttcttcgaagttggggggaccacgggactcgaagggagcgcccgatctgctccgccggcgaggtgagcttctggaggggtatgtggctgttctgcgttcgcgttccgctctcctgcgtgccgaaatgtgggtcgtgttgtggagagcctcgcgggtaatttcacctgaggagctcgctcctgtttttcctttttttccttctctctctctctgggtctttggattcgtccgggaggcgtttttgggtgggcgaatcgcttttttttttggtccgcctgggggtctattttgggatcggtttcccaacactccgcagaggcgcgtgagaacaggggaggcgtcaggtaaggtttagagacgtgcgaagacttttgggtttccgatcgaatgcagctccgccgtgctgttgtctaggcatttcttcttcttctgatgaatcgctcttctagttgcgtgaaagagtgtcgccatgtctatgttgtttggatttggagtactgatggtgcatgtggctgccgcttttgacgtttgaagagtttagtcttaatagaacatgggcactgtgtactatttacaatgatttttgtgtaagtttagcttgggacaggagccttggttgtgccatgcttgtcacagtttatttttgagcttaattttgaatccgggacatttatgcaagctgcattacccaagatgatagagggtctgtggcatgcctcgtcaggacagcttctgataataaaatgaataatcctgcaccattgcccacaatcacaacaaaatcatgatgtttctggtttgcttccaagtagtatgttacggaaaaccactactataaatatgtgacttcctgttttattatttactcattaatttgttcgaaattaatgcagattgcactagtcctttgattatgaacaagatcttcacatattttatcagatttaagtgtatagttagtagagtattcacgtatcttttaaatgctaatatcatgcgcgtttggtttgatgtgatatcatttttcattgtaccaaataaaatttggaaaaataagatgttttttattcaactcgcgtttggcatcttttttttatatgtaataatttatgaaattgacacattattttctgtacaaatcacataattaatctgctattattggaataaaggaaatgactgaattggctttgacaactcataaatgtcctggatagttgtgatataattaaggctagcctttataggtgaatgtgataaatgggttacattcaaaactcaagttacatccacaccaagaaaaaaaaatctgaagaacaactggagaagccatcctttacttcattcccttgcaactctggcgagtgaggcagcagaaggtcaggcaatgcctcactttggttgggttatttaggttcttcagtttcacttttgaggaaacaaattccagttctcccgtatttttggttggattgatttgctcactcgggtttcaagttgagtaatcatgttagttttctctttgatatatagacctaaattttgtggagaaaatatgctttattttgatattaactaaatcatgtcacaccagtcagttagcttgccagcaagctaaacaaaacttgaggaccgctgatattatttagagtctcttgcattgatgtttcaaattgtaacgagtgcactgactcactgtacttcttttccataatataaactgtgaccttttgaatattatgtgactgtattgtgtcttcattacttttacaggtgaagtcagctgatatgatgtacctcatttggataacaatttgactggcaccagattttacagaaatatgcaggaggggctagggcaaaggatgcatgtacctcatggtatcaatctgtgtatcgcaacttcttccatgccctttcaggcgcaatctttcattgagcccagtaccggacaagtgaaccctcctgtaacatctgaaaacttatctgctaactcacaagctgttaatgatgctggagcagttgaaggtactgacatgaacgaaaaatcggttcaaaaacctaagaggaaaaaacataggccaaaggtcattaaagaaggacaatcagcaaagctgcagaagcctaaaactcccaagcctcccaaggaaaatgggaatcag

SEQ ID NO: 202371 - DNA, 392 bp, Zea Mays
gtttgggatgtagtggtgtgctgcagcgatggccgtcgtgggctccttgccacgcagagagggagtgcttcgatgccgctgacaccgctatcgccatgcgctgggttacaggtgtaccggaggcgcatgctgcggctgggtcaacgcactgcgcaatcaagggtaatgaccttatcctcgtattcctcatcttatttgctctgtgtggctatgtcgaattggggagggatcaccagagcaggtggattgggatcgcctgggagggcgccactgtcgaagcaagcgccgccgtggtcagctcggtagaggaagaagagccgataaccgttggatgggaaaaggacgtctaggattagatctggtatgtgttggtcctcgaccgtcgatcttac

SEQ ID NO: 202372 - DNA, 614 bp, Zea Mays
aactgacctcaaaagattctacgttatccttagggacttatcttgccctaattagcgtatttatcccactctagaataaccaccatgagctaacccaaccaatagattcttgatggattgcataatctgtctaccctcacttgacaacaaacaagcttttgacctacatcatgcactctatctcatccataactatcttaaccacatttccccaactccaatgatatacactgacctcgaatcaatgagaccaagaccagaaaaggacaagatcaacctcgtcaagaaaggagagaagtcaaacttgatctttagatgcattaccatccaacacggagttcttctcaccataaactgtcttaccctaggctattcttgccctaaccttcctatcttttatcttacataataatgtggttatactcatgcatacccatgctctcctaatcacccaccaatgattacgaaagaaaatacccttcattcttgatctaattaaaaattaaaagctaaaatcacaaaccaattcttttgtatcccttcttctaacaaatctcaaggacgagatttttgttaaggggggtagaatttgtaacacctcaaaataatgtttt

SEQ ID NO: 202373 - DNA, 355 bp, Zea Mays
cggtgtgctctggagactctcctcgaccatcaaccaagcccagagtaaagctcctgacgagatgcccatgcgagcggacatacatctccccatggtgctttgaaacgacatcttcttgcacacagcgggcagcaccagttccaagggatcccggggatggagaccaaattatataggctccgggtccaacagaaacgacccgagaaaaagggggagagatacgagccagcgatttcggagtccgcgctttggttacgagaaaaggggagaagaaggagctgaccgccaggccccacagggtagcgacggagcggctgccctgcgcgcagaagagacactgaccgtcgggtccacg

SEQ ID NO: 202374 - DNA, 375 bp, Zea Mays
ctttgacaagattttctctgatgagtttatccttgacataataggtgcccttgaatgtatgctatctccattgtttcctgatgtttctcatataccttcattatagcatgcaatcatgtgtgatctgattataactgcaatgcattgtccaaggttgctagtttcttattttaactagatatactctgtacagatgatccagaggttccaagagtgcaaaagcaccgtgcttttctaaaagatcatgtagttttcaaagaggtattctgggctttcttgcacatattgtcatgcctgagaagaaggttatttaatgtatatataactatgtttctgacacaggccatacatattgaaaatgtttctgttatttcg

SEQ ID NO: 202375 - DNA, 579 bp, Zea Mays
agagcggagtagacgaagtagtcgaggacgagactatgatgctggcgacgaggttgtgctggacgaagcgaaggggtgggcttggcgacaaaacaaggttcctggagtcgcggcaacaagagccacgacgcataggaaacgagcctcaatgacgccagtggaacgcgatggcggtgtttgtcggcgaagaacttgatgacaagtgcgatgtagaccggcgacggtggctggcacgccgacgaagtcgatgacgatgtagatgcaacgacgttggttgacaatagacgacgatggtgctgcccgaggaggcaacgcaacgacgaccctcttgcttggcgaagcatcgcgcgatggacgacaaacgtctcgggaggatggtttgcccgcgatcggttgatcaggccgacgatgtgcgagctggagacgacgatggtgatgtcgatggtggagcctcccgatcggtgatggcgacgacaagctaacattgatggacgtgcagacgaagacgcgcgacacaggcagacgtttcggttacgttgtaggccacgccagttgcaccatcgaagaagatgaagcggg

SEQ ID NO: 202376 - DNA, 364 bp, Zea Mays
tttttctgtgatgttgcataaagagttgcagctttcgaagtctacacaatatttataaccagacgtcagtgcacgaataacagtaagatgacataaaccttgacatacataacgtattacaatgaatatcattgtaccttgtcgttatctgtgaggccactctggttttcccttaggactctagcgtagaatccagcaaatttgcctgtttcagctcttattttgtcccacctgctgctgagagccctattcagtctcaaaggaaactcacctctaagttcattgtaccttttctcaattctagcccacaaaccctccttcctctgccctgtgctaataactgggtcactactaatctctagcc

SEQ ID NO: 202377 - DNA, 309 bp, Zea Mays
ccttattaggggggattggaccaaaatccaaatcctaacaaaggaatccaattataatcctactacagaaagtccaccatccagtccaaacatatctcaatgtgcttaagagtctaatttaatccaagtccctcaagttggaatccatccatcatgatccaaccatcagccatcgcattcatcgtgacccaaccatctcaggaaggcgtcttactcttccccttccccatcacaggcaacttgaccaccaagcgaagctgactctctcatctcatctatcatgtcagatctccagccagagctctccgc

SEQ ID NO: 202378 - DNA, 303 bp, Zea Mays
ttccaaagtccggaggtgaactgtgatcctctatccaaatcgatcttctccggtacaccgtgtagagacacaatccgagccatatataacttaaaccaattgagatcacttataagtagtcttgaccggaatgaaatgaaccactttggtcagtctatccacaataacccatataaaatcgtatcctttcgaggtgcgaggcaatccagtaataaaatccataccaatatcttcccacttccactcgggtatctttaatgggtataatagtccaactggtctttgatgttcggccttaactct

SEQ ID NO: 202379 - DNA, 433 bp, Zea Mays
ctcttttaggcttcccttcctactcactactgggccgaagccctcaccactgctacctacctcctcaaccgtctgcccaccaaggcggttgcccaccccactccttacttcgctcttttcggcacccacccctcctacgatcatcttcgtgtcttcgggtgcacttgctacactaatctcgcctccactgctcctcatgaattagcgccccgctccactcattgtgtcttcctcagatactcccccgaccataaggggtactggtgtctcgacctcacctcacacagagtcatcatatctcgtcacgtcgtttttgacgagtaggatttccccttttcctcctcttcttccactgcctctctcaccgagctcgacatgttcctcgatctcgaccctatgtccactactggcgtcccccatccctgcaggtccg

SEQ ID NO: 202380 - DNA, 349 bp, Zea Mays
gtgacttttgtccacaatagcatcagttaactaggtaaaaccttagatagatgggttttctctgctctctataatctgtctttgctcaaccctatcgtcccttccattcttccatacccatacagatgtcagaccttggaatgtcaacgacaagcgatgtcactaaatgcaaagaatgcggtgtgttggcaaatcaaaacaacactatgaataaaacaactgatgaacagaaattcaagacccaaagggatgcacaaccgaaccaacaaacaattaaccctggaacctgttgttgttgcgagtattatggaattccttgtcgccagatcagtacaaacgaaagtgaaac

SEQ ID NO: 202381 - DNA, 279 bp, Zea Mays
gtgaggcgatcttgacggtgcgtcatgtcctcaataaagttcccacaaagaataaagaaatcacaccattcgaggaatggggaagaggaaattaaatatctcctatttgcgcacctggggttgtttggccaaagtaaatgtgcccattaataagaagcacaaattaggaccgaaaattattgattgtgttttccttgggtatgcttttcacaacattggatataggttattaattataaactctagagtaccagacatgttggtaggtactattatgga

SEQ ID NO: 202382 - DNA, 482 bp, Zea Mays
cccgactacctcatcgacccatcgtctattcctactgtctaccctccgtctaagtctatcccctccatcaatctcacctcgcgtcgtcttgtcacgcaacgctcgtgtgtgcaaccttttccccgccctcgccgtatcgcgtagacacaaccgcctcacatgctccactcgctgacacctcaggcccatgagtcaaatctgttgttcctaaattgttatctgtttcacacacgagcatcaactcagaatcagtcgcagccacctcgttttgcctcgcctcgtcgcgcagcgccttgcgcgttgtacgcgcaaccgcctcgccacaccccaccccacctttatttatatatgcagacgttccttcttctatttctctatcgctaaaactccttccctctacacagatacgaacttctcccctagatccgaatctcacgagcagcagttaccaggtacgcagctccctcatcctcccttcatcc

SEQ ID NO: 202383 - DNA, 321 bp, Zea Mays
cttctacctcccttctctctgtgtcttcagcagagggtggcggtgtcctgactccggcgaaggattcccagcgatcctttccggcgatagatcatggcgccaccggacttctaccacgctcaccgatattgtgcaggcctctacgataacaccgacggctaggtaccggcatagacggcctagagtgcgacgactctctctctttctcgatttttaacctgcgtcatggtgctcctcatggcgatgtggttttaggtccctcgaattactatgcgggcgagacgaggaggcgcccgcatatatgtatatatagcatggagt

SEQ ID NO: 202384 - DNA, 379 bp, Zea Mays
gctatgtcttgttaccaccacgtgagcggactaaattgactgctcaatctgtagagtgtgtattccttggatacagtcctgaacacaaaggctatcgttgttatgatccatctactcgtcgtattcggatttctagagacatgagtttcaatgaaaatcgcccttctttcacaaccactctactcactccacctattatcccacagaatctacttctttcatgtgtcttccttccattcctgcatctgaactatcatcctctacatccacatctgatgttctcattcccatcacaccaccttccacctccacgtcatccacctcttactcttccaaaccacctatcatccaaacctacattcgtcgttcccactctatt

SEQ ID NO: 202385 - DNA, 318 bp, Zea Mays
cttcatcgcgcgccttcgtcaggcccaggccatggacccggctctagcagccatccatgaaggagtcggcgccggcacccgcgatgcaccgtgggcggtggctgacggcatggtcacctacgatgggcgcctgttcattccaccagcgtcgcccctgctgcaggagattgtggccgccgtgcatgacgatgggcatgagggcgtccaccgcacccttcaccgcctgcgccgagactttcacttccccaacatgagacgcctggtgcaggacttcgtacgggcgtgtacgacgtgccagcggttcaagtcggaacatct

SEQ ID NO: 202386 - DNA, 305 bp, Zea Mays
ttccactaattaatataggcacaccctgtttattactgtttagtttgttattccgcgagtacgttgatgatcctttgttaccacagtaaggtttctgaaaagaatatggatcattgaatgacatctttgggttaagacactttgacgcgtgaccaagaacatatggtaaaatggaattccagttcaatggaagttagagttctaatgtgtgcaacaatagatttactttaactcagatggtacaaataagctccattggtgaatctattgtgctttttggcgtgcatgtaagatttaagctttac

SEQ ID NO: 202387 - DNA, 647 bp, Zea Mays
gggaaacctcgtcgtctgcgataggaggtgggtgcccgtgccgcgcgcgcttctcccctccgtgttgactgcgggaacgcgtcgagggggggttctccgaggcgctctgccccgcacgtgttgcctccgcaattgcgcgccggatttttcttattctttttttctccctcttgctggttgccggattggggattgatccggcctgcgcgtcgtctctgtttcttgctccaggggttgccccaaggtctaccatccggcgtgcatcaagcgtgacgaggcattcttccagtcccggagcaagtggaactgcggtaagttccatccaatgccttcaataacatgtggcagcgtgagatcattttgcttctcttgccgcggggattggtaacaaccaaaattatgaatcatgcatgtattactggttgtatttgccgacatattgtgtaaagcgaatatcggttggttggcggttgcatacacttgcaaacaatgctatttttgaactgatttagagataagcacgctttccacggtactcgtgtgcccgctagcttctcggacaatgctaacggacttagattcctgatatcgaggcaatgatcccgcttctaccaatcagatgactcatatcatgagttcgcattccc

SEQ ID NO: 202388 - DNA, 290 bp, Zea Mays
atctgctctctcgatcacaccactgaaatagcaatctccgtgcttgcatgattaccaggcatttaggatggtggacaagaatgatgggtcagagggtattaaattcaacacatcaaacctcattcaaacaaccgaagaggttgcaagagcgtttatcgctgcggcctcggctgccactgcacagtctgcacggacatctgtagtgtattcatccaaagatgagagtggcagcccaatgcagaagcttcagcagcatttttcgaaaatcatgaaagggttttcgtccgcac

SEQ ID NO: 202389 - DNA, 292 bp, Zea Mays
agaaaatagaaatccaccacgttgggccaaatcctcctcggccagcgcatttccgcatcctcccctacggcccattccgcgcagcccagttctccacctatacgcgcgcctgcgccaaaccctagccaacatgtgggcccacgtcactagtcacacccccaccgcacgaacaacttgggtgatgtacctgggctcaccactgcgactgaccgtgggtccctctgctcagcttcacgttccaacccctcgcgtggcctcactgcccatgggtccctcttatcggagccatcct

SEQ ID NO: 202390 - DNA, 435 bp, Zea Mays
gaatgttacatctggccgctcttgttctattactgcaattgcatcattaatttccttgccaatcaactcgggccaactggtcttgttctgcgtagccatgatcacgtactgtccttagcttctctctcttttgaaactgttataataccaataagaatcaataattgagcaacgttagtgtaacgaatagaaacataatatgttgttttgtgctaatgctatcatactttcatagtaagcatgtcttaatcgaatgcactacataactaccgggatgcaaacagtctattaaaatgttaaaaagatactttttttcaaagcaattactaacaaagaaatacatgataacctgcggggaagaagaacacaatagtctctggcgatgatacgtgctctatgtataggtgtgtatatatacacgatgacatttgtatt

SEQ ID NO: 202391 - DNA, 302 bp, Zea Mays
tgccacaaaccatcctcattcaacaatttaaacaaccatttacttagcagacacttgttctggacgtctatattctgaatacccaaaccccctacttcttttggctggcaaagaatttcccatttagcaagtctatatttctttttgtaatcactaccttgccagaagaatcgtgatctaaagtagtctattttttctaggactccctttgggacctcgaaaaaagacaacatgaacattaccaaacttgttagaacagaatttaacagcactagacgaccaccaaccgacatcagtttccc

SEQ ID NO: 202392 - DNA, 577 bp, Zea Mays
ctgctttctactgtagctgcatatggtagtcgtgtgctttatactcgtcagtcgttgttgggcacccatacgcgctgaaacggtgtaagcggatcctgacacaaacgatgggagagagctcacgtgcactacaagataaatgataggaaaatgtagcttcccgttacgtgtcttaccccgctacagggtggagatatttataggctttgcccggagataggtggtccaaagttcgatcctaccccggtcaccaactatatccggggaatattccgtgtatcagggtaacaacggtaacaacagcagtgcacgcgcagcgaccaatgcacaccgaataacacacccgctaactaagctgacaggtggagcccctagaggtgcctcatggtgggctaatgacgtaacggtgtgacatgtagcttccgccggccttagagccttcgtgctatggtacacttcgctgcgcttggacggaaggcggtcgccaccgttggagccttcgcgctatggtacccttcgctgcacttggacagatgagtggcgatggagactctagggcgacatagcggcgagggcc

SEQ ID NO: 202393 - DNA, 410 bp, Zea Mays
ctttaaatttggaaataaaaaagaaagaataaaaggaaaaagagaaaaatgcctggatgggcctgaatcctcacttttggcccattccctaattcacacggcgcgacccaactactgttttctggcgctgacatgtggggccacaggccagccgcccgcgtcacctgacaagtggggaccgcgtgccagtcattgtgtgagcgcgttgcctctgcctgtggggtccagatgtcatcactcttccccgacgccatgaactggttgtggcgttgttcaaccgaatctgagattcctggctttagctcacgcctaacccccccgatgtgcgcgtcataaaacatgtgccacacccgttcttcgtagaagcccaacacctaatccacctcacgaagccagacatcgaaattgcc

SEQ ID NO: 202394 - DNA, 438 bp, Zea Mays
cactttaatatggatctggtataccagggccagtctccccttgccagagggaaggccgtgtggctcaacaatccaaaggttccatgaagaaggaatggttgaagggtcgtagcaccacccagaacaccgaaaaacatcaaggcttcttgattccagagtatcagcatgcacctcctgaacccaagcaaaagggttaagaatctggttgaccgtagaaagctcccatgcatgcagcggaatgccactaagctcaaaatcaaccggagtgataaggttggatcctaaagaaccaagtagcttggaccatctcttacacagcaaagaaaaggagcctgatctgataatgtgcctcctatccgttagaaaaatagcctggtgctcatagggtagcataagcaagaactcagatggggaggactgccttagaattaacgaaac

SEQ ID NO: 202395 - DNA, 286 bp, Zea Mays
tttattttctgcaaagggtgggcctggcagtcttgtcaccgggttttgatgaggttaattttgacagttggtggagcagatcagctgaacgtatccatgaagatgcccggaaggggtttaactctttggtgattttaggagcttggagtgtttggcgccaccggaatgagtgtgtgtttaatgggtcgcaacctagtatcgctaagagcttgaccttagccggggctgagtatagtctgttgtgtattgctggggctaaagggccttctatgatgtcaggttttgt

SEQ ID NO: 202396 - DNA, 886 bp, Zea Mays
cctttgcacatccttccgcaatctgtgcaagtgtaatgagcgcagcatggtgcttctgccactcagcagaagacaggtactgtggtagcagctcagaagcaattggtacaattgcgttcccaccaatggcgatggaaaggcggtcaaggcactcctgcgccactccatagttgttcccttcccctgcgtcctcatcttcagtttcagcagagtgccaagcagggtcatcctcgacatcaagcagcatctgcatcagcactgcaaacagcctaccaacaaactgcgggagtcgccgcatcattcctggtgcacgctctctagcctcagctagagtaatcacaaactccaccgccaagtgtctggtcccatcttccagctgtgtagcctcagcaacttgcaacattgcccctaccacatcagcaatctgcctcctcaggaaccttggctcggcgccagcgagctccaccagcagctccagtgcctcctgcgcagagacttcctggccagagtttaggcaatcagtgagcgccctcatcattgctgggagcaaatcctgcatcttatccctgtcggagttggttggcaggcactgaacaaggttgactgcggcacccagggccgcaatccgaacatcaggagacgtgggatgcgccagggctgaggcgaggaggttgtggatagtcatgagatggtcgaggagagattctgcgatgtaatccgccagcctcgcgaagatgagcagcgctgactcctgaaggttgtgcgcatcaggccccgacgcggcgcggaagaggaacggcagcagctcgggccaggcgttctcaggcagcagcgaggccgcgagctcagagatagcgtcgcagaccttcttggcgatgggcttggg

SEQ ID NO: 202397 - DNA, 408 bp, Zea Mays
tatgagacaaacatcaatgtaggatatagaggtgttaagggtgcatatgataataattaaaagcatgacaaaggatatagttaaggcaagactcacgaaacgacaaggtggggaaaacaatcaagggtaagataggtaaggttccaacagaagggttgaagtaacagaaattattaccgagggaagttatgaggaaacagtgagatcatcaaggatgtgtgaaatagaatggtcgctcagggaccatcaagaagcaagggtgatcaagggcatattaaccgaaaggttttgaacaatcattgggatatgaaggtaagcatatataaaaatattagtatgcaagattccaatggtacgggcgtaccaagaccaacggaataggaaaagctaaaaaataacggcttcaca

SEQ ID NO: 202398 - DNA, 351 bp, Zea Mays
gtcagatgctttttttaacacaccggcaggagctctgcctttcaattaaacagaataggattgacctggcttatgagggaaaccgagcttgaaaaccgatatatgaatatcagatgctttattagtgcccatactgcaatgatgtattaattaaagcagaagtacatgcattaaagtagaagcatcatgcatgggcagtgtgtgattgtcactcttcaggatgaggccttgctaatcaatatgagagcagagttccaaaaaggattgtacatggggccggtttgcgattaagatttatcagaaattttgccattctatcatgtaaaatagaagaatatagcgagagatgca

SEQ ID NO: 202399 - DNA, 422 bp, Zea Mays
cagggtgaccactatgccctgctaacggagcaatcggtttaagtcggcaacgacttaaggcggtgcaacatgctcgcgcttacttaactcagggtgaccactatgccctgctaacggagcaatcggcttaagtcggcgacgacttaagacagtgcgacatgctcacgcttacttaactcacggtgaccactatgccctgctaacggagcaatcggcttaagtcggtgcaacatgctcgcgcttacttaactcagggtgaccactatgccctgctaacggagcaatcggcttaagtcggcgacaacttaaggcggtgcgacatgctcacgcttacttaacttggggtgaccactataccgcaccaacagagcaatcagttggaagctgatactaactcaaatcggcgcgacacactcagtgcg

SEQ ID NO: 202400 - DNA, 522 bp, Zea Mays
tggatccggagcttgagtttgatcgcgaggtgtatcctcttggtcttcttccaaacgttggtgtggttgttggtgtttcccagaggatgtccttctcaactgcggagtttccatgctttgagccttcacctcaagcccaaacaatattgcattgtttattacgacatctccttcaggtaaatcaccttgcatttattgatcctatatctcacatttccatttgtattctaagatgccatttatctagtgagaaaactgttgatgttacaaaagacatctaggtggctaggtgattgtcaccttgtagctctcgtgccattgatataatttgtaggtgctgaccacctagtcaggtcttgggtgtgttggcgccacagagttggcgttggtgtgcgtgcagagtactcgttgggtgctgactactggggggggggtcgaaaacggagatgtaacttttgtatgagagggatcaaaggggctctggtggatgtcatgtttctgttggaggggtgtgttaggcga

SEQ ID NO: 202401 - DNA, 282 bp, Zea Mays
caaccgctagggctgcattcatccaccttctgctcgtcacctcctccaacgccgactcatgctcatcgatcgccgcctcgcctaggtctctcacctctccagacttgcgtagctccctcctgctcgtcgcgtcgtctacggaatctagcctgcggccattggcggctagtgccccgccgtggtgccatccaccagcaatcagtggtcgcggtctatcccttctcaccccttcggatccgctacgcgcgaggcacagccgcgtctatggtctgcctggctggt

SEQ ID NO: 202402 - DNA, 339 bp, Zea Mays
gggaacggcgcggtggaactctaacttctcgtcgtctcattcttggcgttccctctgggagttcggcaagactcgcgggtgccgcgccgtcgaaccggtgggatgcggtcagagctccccaaactggcgtcgcggtcctggcttctctgctatcctcgtagctcaaggtccgtggtcatcctccatgtttaccttggtcgtctgcttgggttggacctcacggggtctgccgtgggcgtcgtagtggttggaatcgggcccaggacagtgggggctggagctacctcgggcgtggatcgccgtcgttggcatggcgccccgtgcggtgtcttgaggaag

SEQ ID NO: 202403 - DNA, 367 bp, Zea Mays
gttgagtcacacaaagctgtgaatagaatgtctcaatctgctttggcagcttgcatggcaccactacttcttcgacctcttcttcttggagaatgtgacatagacaatgaatttagtatgggaggggatagttcattccagctacttcaagctgctgcggctgcgaatcatgcacaggctattgttattattatgatggaggaatttgatcagatatttgatgtatcctctttttactggatccatttgaagtacttcgcgtagtcgttcatgagctataattcaactgattatcatacaggactcggaagaaggttcctgttcttcagatgcttatacggagtctgaggatgatgttgacaaggaa

SEQ ID NO: 202404 - DNA, 363 bp, Zea Mays
atgcaagccgaactgtcatcctgcataacgcacgggcacggctgtagactgcgtacgtagatgttggtattgacgtagccgacggctgtgagaacgtgcaggacgtcaacttgtctgatacgggagcatcggcagcagccagccccagcccctaggtcctcctactcctggcttcccgggcgagaaatttatttgtccatttgtccatagctagctggagctttgattagtcttggtatgactatctaagggagtgtgctacaccaatacacgccatcctctctccgacgacacatcagtaggagatgaaggcgggtatatataattagacatcgtaatccgcatgcagagcaggcaacctca

SEQ ID NO: 202405 - DNA, 532 bp, Zea Mays
gaacaagtcagagatatatgtttggatacactatctgctgttgctgccaaagtgcagtgggaacactatagaacaatattgaagagatgcttccgagaattaaaccttagacctgataagcagaagatcatattgaggctgatttgttccatattagatgcattccatttcatgaaacctgcaaatgatgcctcaggaaattctgatgctttgagtgaagatattgattcttcccttacattctctttggtcacagtctcttctgataagcaacagtacatgcaaaaggtagtgtttccacaggttcaaaagttgttaggatcagatccagagaaagtcaacgtcaacataaacctggtagcactgaaaatacttaagttgctaccggtggattattttgagtcccaactttcaagcatcattcatcgaatctgtaacttcctcaagaatcgtcttgaaagcatacgtgatgaagctaggtctgctttagctgcttctgttaaggaactggggattgggtatttgcagtttg

SEQ ID NO: 202406 - DNA, 275 bp, Zea Mays
caaaagtatccagaatttgctatggatagtcgtaatatccgcctagcatttgctacagatggtttcaatccatataggacaatgaatgttagttacagtatttggcctggcctattgattccactcaactttccaccatcgatgtgcatgaaggattcaaattttatcttgtctgtcttaattcctggtcgatcttctgcgggtagtgatatggacgtttattttcagccccttgtctatgatctgcttgatatgtttattaatggtgtgaagac

SEQ ID NO: 202407 - DNA, 275 bp, Zea Mays
cttgaggaatttatcaagaatcgatacagtaatcgtgtgaaatatgctgctgatcggagctattctagagaagacgatgacattttccccatggattgtgcactcaaggagcctactatttggagagttaaatgcatggtttgtgattgccaaacccttgacttgggcacttggcattgattgactagcatttgctgtgcatgtgctgatttgtttaactgctttccaggttgggcgtgagcgccaaatggccttctgcttcatgcaaaaatttg

SEQ ID NO: 202408 - DNA, 365 bp, Zea Mays
gtccgggcccgtcactcggaagggcaaggcagtcgctgacctcaacagtggcaatcacccagtcgtgccgccagttctcccacctcgcgccgccaagggaggcgatgtaggtcactattggatctgaccttgtctggaagtagtaggccccaaggtggtctttgtccttcctagacctcaccagtacaaaaaactagcgaaaaagggaagtgcaagctgccacccccacgaacatctcacagaaatggacaaagatggccacctggaggatggaatggggcgtgaggtgctagagttggagtccgaactcctccagtagcaggaggaagaacggtgaaattggcagcgccaacccgcagaagagg

SEQ ID NO: 202409 - DNA, 463 bp, Zea Mays
tcaacgagcaagtgcctatgaatctgtacacagaatagcggatgatgtaaatgaaaatgatagaattgaatttggagcagacttcgatttcaagccacttgcccgtttcattgttgatgtttctcttgacgcacccttagaaagtgctgaattgggcagtggtccatttgaaaaatggcagtatgatgcttggagcacatccacaactagtcattcaactgctgttaggggttctgtgagtttgaggtggctgaaagatcagtgtgctttgataactaaaagtggtggctcaatgctctcaggagatgaacttgcaatgaccttgtgcagagtgctcctatcaaataaagcaggcgatcaggtttttaacgttctactgaaaattgcctctgttttaatttttgtttctgcaatcatatggtgctcccactttgcagatagctggtgaacttttggacctggt

SEQ ID NO: 202410 - DNA, 277 bp, Zea Mays
cgaaattctaatctgaggtacgctacgcgcagataagatgtaggagaataggatgaaggctccataccggggttcgcaggcaacggaggaggcggtccacgacagcgtgcggatccaggccgagcaccacaccggtgaggaatcgccaagcgtcggagaccccatctcaccccagttgaccacgatcatcttcgcgggaaccagacggggctcccagacccgttcccggatccgaacggtggcacaccacggccccacccgtggcggcagtgttttt

SEQ ID NO: 202411 - DNA, 312 bp, Zea Mays
gttcggagagtcgtcaattgcgcgagggacgagtgaatcgggttatggtgtccgtatgggccgggttctcaatctccggccatggcgtcgccgtagcacaggggcgccaccgcgtttgggcgcgggttgggaagaaaggggtacgtgtcgtcgatcttgcaatctacggtggggattagaagccaggtgaacggctcggctaggactcggtgaccgttgatctggggcttaaatggataggattgaatttgggggtatttagatctgggccgccgatgggtgatccagcggctgcgatctagtacccgttca

SEQ ID NO: 202412 - DNA, 546 bp, Zea Mays
cacacatcgtgccatgggatggcgaggagcccccacaccatggaaagtacctcgatagtcgcctccatcgtcgctgtcctgagctccatcctcgaccatctcccacgggaggatcctacaacggacgtaatccacttccccgcaaactttgcaccgtcaactttggagcaataatcttgcatggatcatctcacccgctgtcgcctccccgaatgtcgtcgccttatcttcggtcgccaccaccgcttcccgccccaccagaacacctttgcgcgaaaacaaaagcgcaggagcatggatgcgcgtacggacggattggggagggagcgatcacacgaaaatatgtggaagaggatgaatcggatgagggatgcaaacttttaggggagaatgcaaaattttagggagaatgagagagctgttggagcaggaaaaattattattctttaataatatctgttttggtggggttggtttatgtttctttggagttgcactagcaaaaatttcaattttctcctagattccctcgcagttctcgtcgcg

SEQ ID NO: 202413 - DNA, 560 bp, Zea Mays
tacaagtggagctttggagggagggaggcctggcctcgtagtttcggtgccagtggtgaaaagtggcagctctgcccacattcctacaccaccgcccaccgcggggccaccgtctccatggcaccacttctccatctccaatccaactgcccttgcgatgctctgcctgctgcacattttcctcccactactacactttattaatcacacagaccgaatcccacgccttctctttccttccccttcgttctctccctgctgctctgctcctgccgcctggctgccgtgccgccgctgatccctctccctctcttccccctcaaagccccaattgccgggtgctcctcttccacccccattgccgactgcttcccgccagagagtggggaagggaggggggtgagaagggagatggcttcttggatagggagtgggtaagaatcacacgatgcagttacctccacctttctctcttctccttttgcgggcatattcttcacctccgcctgcctagatccttctttctttggcccggcttagcttccagtctcaccaacagt

SEQ ID NO: 202414 - DNA, 368 bp, Zea Mays
ctcatctgacctctttgatatctacgttgttttcacatgcaatgccaagaggaaaacgagctcgattaagtttcagacgtccgatccaaaatggaacggttagttaattactttcacctttccctctgttgtcaactgtgcagtgatccaaaatggagcttttaatttgatgtttgcctttttctagagatattcgagtttgatgccatggacgatcctccgtcaaggatggacgttgcgatctatgactcgagcggacagtgcgtcattggccacacagaagtcaactttctgaagaacaatctgtcagaactgactgacatatggcttcctgtcagtgggaagtgtgaccaagcgagcaaccctag

SEQ ID NO: 202415 - DNA, 342 bp, Zea Mays
cggtggtggagtaaaacttcctggcggcgagcgatttagcagggcgagagggggaaggaggtgcatgcggtttaggagtcgccccaccccttatcaatgcgaagtccggtcaaccagaaaccccgcgcatgccgcggttggttcagcccgtccgatcgctgcgggagcgttggggaagaagaccctgaccggtgggaccacgacgcagcaacgcacgagcgagccacgcgaagaaactggagaggctgacggcgggccccgcttgtcgggtgcgcacggaggtgagagcacgggccgcgcgcgcgaggtgaagctgggccgagcaggtgaaatcggcccagg

SEQ ID NO: 202416 - DNA, 460 bp, Zea Mays
atttcagacttttttaactttggccttgatgaagagaagtggaaagatttttgcaagcagctggtgattccatttcttacatttggtagtgcatacactttgtttactatataaaatcggtcaattaaataataattcttttatctccaggaccaacttcgactagaatccacaatgcaatctaggatacgggtgtacgaaagtggccgctctgaacaggtttattatgatcccattatggaaaacaatatcctgctctatctgtagtgatgatgaataattttttatctgcatccaggattatgacccagatttgccacctgagcttgctgctgtgactggtcatccagacatctctgctgacagtcgcaataaaatggttaacgggcatacagattttagtgcccaaggaagaggtccggcaaacgtacggacaccattggtattgagttcccctcca

SEQ ID NO: 202417 - DNA, 300 bp, Zea Mays
gtgggttctggtagcgttagtgccttccctaggcaagctaaaaactgcctggcagaaaactcatcgacaagaaatggagctgatacagtattagagtcactaacagtgaaatcaaatatgctagcaaaaattcctgagtgtggatcttatggaatacaccatgcaggctcctcaagttcagcagagcctgaacaagtgcatcaagctgaacctaaagtgagcagaagacaagcagatggacatcctgtggcttatggtatatttaactccgtggatgtggatggcaaacctccggctttg

SEQ ID NO: 202418 - DNA, 366 bp, Zea Mays
cacagtcacaactgtagggaactgaatgagactggacctgaagacattgaactactgtgtaagcagtctcttagtcataatgtacgtgaactgattagttgaggccacatggagtaccctaaagccaccttctcacgaacaaagtggatgtcaattgtcaatgtctatatgcttcgtacgacgatggtgaaccgaattggcagtcatatagactgtggtgacattgtcacaatagacaatggtcgccaaaccgagtgatagtctgaaattgaccatcgactatgttaaagctatcgtgagggaggctacacttgaggcttcgtcgggcaaacgggagcccttgcccccatcggttgcggcaagtcc

SEQ ID NO: 202419 - DNA, 319 bp, Zea Mays
gttgaaaccatgtgtataatctgaagttctttccctactaatgtgcttctgcagttctttcagcctactaatgtgcttctgaagttctttcactacatgtctggacagctcataaaggatggtttagtaatgagggcgtgtctgatcatttgttggacagttctttctcaagtattctttctcaagtatacttgagaaaaaatatggttttctcaagctaaatgggcgtgtctgatcatttgttggacatgtctgatcatttgtgcttctgaagttctttctcaagtattctttcactacatgtctggacagttctttc

SEQ ID NO: 202420 - DNA, 293 bp, Zea Mays
caaaaatcccctctgtcactgagaatctcttcaaaagcttcagcctcgccactaatccactggataactccatcagggtcaccgcggatgaatttttgctcggaggagaaggctccaactttagcaaagctgttctttagattttttgtgcattccatggatatctcataacatttttctttggcaacacgaagctcatcgacattcttctgcactctagatttttcgatttcgcatatctcatgcttcaccacttgaacttcaattttttcagttgcttcagcaacctttct

SEQ ID NO: 202421 - DNA, 325 bp, Zea Mays
gtgaatgtgatccacatccttcagtaccgtttcccacattttgcggcagtgtgccgctacggcatgctacacgctacactgctctggtcagtgtacgtgtgttgcacatatatgaaggtagtgaatgcaaacccagaagatcttggggcgaagctactaattaacttccctaacgtaaatactctttgagtcttgtcaagttgtggtacagaatggtacccacacacacacgcgtatattataattatatatatgttaaatgtgcatggtagacgtcaacacaaactatacgatgttttttaaatacagatatatagtacaaatc

SEQ ID NO: 202422 - DNA, 292 bp, Zea Mays
ggtgctggtagggtggaggttgagaaggtatgtggcggtgtgaagtgcctcaacccaatagggaggaggaagatgggcttgaaaaagcagagagcgaatgatgttgttgaccgtgcgcaaaatacgttcggcacgaccattctgctgggaggtgtagggacaggacatccgaaggcggacaccgtgggagagaaagaaagctcgtgcgtgggagttatcgaactcacgaccattgtcgcattgcaagcttttaatggtggtgccaaactgagtgagaacaaatgaaaaaagt

SEQ ID NO: 202423 - DNA, 349 bp, Zea Mays
gatgctgccacgtggccagccgcatgtgacgtaagccaacgggcggagccggacgtaaactctcccccagctgggaaggaccattcaaggtgacagatgtgccgacccaggggtaaccaccttgctacagctggagtacctcttcctaacccctagagcgtctctgtgagttctatccataggagcaagtctaaggggttgagtttttctcccttttgtaactaggttgtgcatacatgtacgccagcctgttggcctgcacccatgcatgtcgagttataaagagaagatttaccccctcagatgtgcttctatgacaattttatcctcctgcctccatggttttatc

SEQ ID NO: 202424 - DNA, 332 bp, Zea Mays
ctggaattgaaacaaaccaattaatcgggagagcagaggggactgaaagagcattgcagagcagaagggcctatgtctgtaaccttacctgtcacaatgtgcagaccaggtcaggccagtgttctagggtctccatcagaaggacaatgggagacctggggctaacaggtctgaacaaaaggggagtaagcaatgctaggaagatggggcaggacattaatgtgagcacaaataactgggaacacaaatctgaacgggggaattaatcgccaggaacgcacaatcaaatgggagaattgatcagagaaataatcatctgagaatgctcatct

SEQ ID NO: 202425 - DNA, 473 bp, Zea Mays
gactttttgaaaagggaccaaggtagaaaccaggaaaagtggtgttttatagtagtagagatagaggtataccttgtatctgcgaggcaattcttcaactccttttttatttgttcatgcttgtcacgaccgccaccattatcttgcttttgatttgggaacggcagcctaattcggcttaatatagttgcaatgactggattcttcttccccaaggagacggcgccagagctatcttcgcctcgcctctccgcgttgttggacagtggtttgacctggttcagtatatttctgacgaccgcctcaggatctgagttctgggacacagtgaccattgctcgacgctggaattcaggcccgtattttgtgtagagatccattgcgatggtggttttacccacaccaccaaacccgacaatgctcagcacgccggttttctccctcttgccatcttcatggatccacttcttaag

SEQ ID NO: 202426 - DNA, 282 bp, Zea Mays
gtaaatcgtctaggttcatggaggtagattctggtgatggatagaagaggcagcttgacatccccttgacaatcctacgacaccttctgttcataccgaggatccagcgtctatacatgaccgaggaatcggcgaaacagatgacatggcacataaatggaaaacgatacaatcctgacaagatggtgcatgcatccgatggtgaagcatggaaacactttgatgtcgttcaccgtgagaaagctgaagaggctcgtaatgtacgtgttgcactggccacag

SEQ ID NO: 202427 - DNA, 355 bp, Zea Mays
ttgcagaccaagtaactgagcctcagggaaatcttcccagagtttcccaaggcataaacaaagccactgcaaaagcaaaggttctgtttgtgcatgaagattctcaggttgcagatgtctcaggcaaacatctataagccctgcattcatacaagcctcttgacccatcctatgcccatccacgatgactgctataacaaaagcggccattgcacgctgttctgggaaagcatccaaactgtcaagaaacctaataaaatatgtatgtcctccatctttaaccaagtcaacctgacaagactgccatttgggaaaatgttacaggtaaaacaacagaatctaatctaaagaaaca

SEQ ID NO: 202428 - DNA, 547 bp, Zea Mays
cggggcgaccgccccgctgcgcttgtagctgtcgagaagttacacgccctggcggcagaagtcgctcgccccgatgacggggggagggacccctcgactttctgtaccaagacgcctgccaaggtgcctaaggtgcaaccaactggagcagacgacatctctgtcaagaccatccggctcagcggagattcctcccagaccactcacatcgcgggcgatctggaggagaaataagaaatcgcgctcatcgccttcctctaggcaaatgccgacgtattcgcataggaaccgtcgcagatgcatgggatccccagggaggtgatcgagcaccatatgaagatccaccctgacgccaaactggttagtcagaagcctcagagacagtccattgagcgacaggatttcatccgtgaggaggtccggaagctgcaggacgctggcttcatcgaagaggtccaccaacctcaataaggcctgtcccaaggacccatatccactttcacaaatagatcaaatcgtggattctacctctgggtgcgacctcctg

SEQ ID NO: 202429 - DNA, 296 bp, Zea Mays
ggcagcgcagccgtcacaagccatggtgttggatatgttggtgctgggaggaagaactgtcacagggcatgcttgaagaatggtgtggtctgctctttcgacgatagtggtgtcagggtgtctatgctgtgttcatctcttccatctgaagatgtaagtttcagcagcaaaatgtcattagttaattcaacaggctttgcacagaagaagaaagggagtaaggtatggcgaagatcccagggtggtaagaaattggtaaggcatagagctccgaagcatggcctgggaaaggacag

SEQ ID NO: 202430 - DNA, 869 bp, Zea Mays
ttgatagtgaacttgagacacctgtcagagatcatatcaagtttccaaagattgaaaaaccacttcaatttgtaaagaagggatctagcttgttgcctaagaagaaaaagaggacttacagtgagacagttcttgagcaatctcccaaagatactgtgaaaaggaaaagcaaggttcacatgctagaaagggaacaaaacaaacaagacaccagagaagtttctgcaaagagtttcactcaaaaccttgttgacacacctgtaaagaaaaaagccaagttgaaagagaaaatacagttgccgtatgtggccaaggatcattttataagcagtccaaaatctgtgaaagagcaagaacaagagttggtacctttgcccttatctgccatcaggaagagttcatttcctaaagtggacagtgaaactgaaaagaggtgagtcacttgtgtataaagtacttggggaatgaaatctccagatcatatggtatgtaactttatgtgcaaaaattgctagcattcatgaatttcctacaaccagacctgatgaggcattgaaattttgtttgtttgtcaggtctgatgaggcattggattttttttgtttatcatgttgcagaatcctctcctatactcatgttttaatcttaatgccatgtatccacattctgtatgataatgtaaacgatgtttgaagtccgcatactgttatatgactatatgagatcttctatttgcagggtgattaccatattgggaaataaagtgtcttcattgacaataaaagatgtaacgaggaattgcagtttgccatcaactcatgtatactctggcagattgactgacaagataccactgggaaagattgaac

SEQ ID NO: 202431 - DNA, 307 bp, Zea Mays
ccacacatgcaagccatatttggctatctaacatgcccccacagttgaagcatcggtagaacagacgtttagactggaccaaacttctctgaagactgacaaaggcatcatcttggtaaagatgtcggtgaactaagatatcatagggacatagagggcacgaacatcatcaagtgcaaggcgctccagaacaaagtgtagataaatctctatgtgcttggcgcggtggacatcatcaagtgtaacgcgctcccggacaaagtgtagatcaatctctacatggtgaagatgtcggtgaactgagatg

SEQ ID NO: 202432 - DNA, 562 bp, Zea Mays
ctcgtcgtcatggatcttctgcggttcctcggcgacctgtccaacttcgcttgggcccgcggacctcatcgggcttcggtcatgtcgggcatggatcaggaagtgtgaaaacgtcgcagcctcttggctctggattcaaggggtcgcactggtttcagcggccgccacagttatgtttgattggagctgatgaggctgtgaatgcaggagttatggtggaaacattacagccgcgtgtctctggaatcgaggaaacttctcggactctgcagactgggcattcaagccttatggatacagttatgattggggcggctggggttaatgtgtcgcgcggttccaaggagtgggaccattctttggcggccgctgtgcatgggaccgagtttttggaattggccgaggagactgtgaatgcaggagttactgtggagatgttacaaccgcgtgtctcggaaatcgaggagtcttctcggattttgcaaacaccgcatttaagccttttggattccgttcagtgtgtggctgctggagttattggatcgcgcggatccaagtgtgg

SEQ ID NO: 202433 - DNA, 405 bp, Zea Mays
cttttgtcccagcaaccatcaaggtactttcgccccataatgttacacaatccttttctcctttgtttttattgttttttttatttatgatatcagatgtttgatcttgcggaccaatggggagctttctgtgcttgacatggacgatggacatgaacacgctcttacaaattcaattgaactcttttgggtcacctgttcccagtttgaagagaagggtagtcttatcaaagaggtttcatggcttgactatggtcatcagggtatgcaggttagattgatcttattattgtgtacataatcacttcaccatagatgcctctttgaggacatagctacttttcaaatatccctttgtacctttataaacaaaactagttgcaggtgtggtacccatcacatgga

SEQ ID NO: 202434 - DNA, 516 bp, Zea Mays
aacatactgggcacgaaggatctctgaattctgccttctaagcctgcatggtgcaaccttcatttgactctctgagtggcaaagtagactacattagcatacgtatagggtggcacgtagaccaatgaacgacggccacaatctaaaagacactccatcccatgagggagttattataccagtcggggaggataccgcattaccattgctatcaaatgatcaactacgtttatctctactatagtcaggtgcccgtacattgttacttcacatcatgattgttaagacacataattgcatccatgtttgctagtagaaacttctccattttgaagtatagtgaatggtagttgcaattctttagtattcgtcgaaataaatatgccatgaatttttagatcgaggggtttgtagactcactcatcttggtcaataccagagccattcattgctggtgtgtgtcactctcggattgcgccgacccagagatgaagaaatctgagagtgatattttcc

SEQ ID NO: 202435 - DNA, 276 bp, Zea Mays
tagactatatttaatacttctaactattatctaaatattcaatgtgacaaggactaaagtttagtaggtgaatgatcagggcctaagaagataaattctctacttttcttttatttttcaaatacagtgatggcgtgggttcagatatgaaagccgacatataaaactcgaaggtagtgcttgccaaaggtgaagaaaatcaaaagggacaagaagcgaagccatcgatgtaatgtaataaagaaatatgcaccctagttttctgtgatgaatctt

SEQ ID NO: 202436 - DNA, 598 bp, Zea Mays
aagttagtatatatagcgtaataatggcgatgtggcgcgattctatcggtcagaagcgtgtcatacgaagggtcacatgaatcttagccgtagtggatcgcacaaatgcaaaaaaagaaaacagaaatgtgcatgcagaggagacgtttgcaaggggagatgtatgcagtgaagcccacgtgagttttcctggctcttgctgcatgcatgcagatcacgagtgggaggggaagacggtttctttttcctctacttgctgaaaccacacgggcacacaggaaacgacatgcaagtgggtcccatcgacaactccttctccataccacgcaccaacagttattttcatctctctgctgcacgccggcaaaacaggatcggctatctagacctgaggcatgccggagcgggctgggcggggctttgcatggcttcagcggctcgtaggggcaggggacagcggaggcgcatggctgggcatggggcttcacaccggggaaacgtgcgccggctaggggtcgtagggaggaccgtgcgccggggctggctgagctgccgcaggagggcgcaggctacgcaggggaacgcttggccgaggctg

SEQ ID NO: 202437 - DNA, 334 bp, Zea Mays
acagccaacctatccttgcttctctttatcttctccgataggtcctccgacaaatccatgactctcttcatcttcgccgataaatctttatcattagtcccctgcttatgcactcttttggttgaatatagcctttatttaaggcaatctgtctctttccctttcgcataaaaaaccaggcattcattatgtctttgaacagctactatcgaacgcatgaacacacttgatcagccatccgcttcggcgccgacacatgcgtcgcgttatgcgatttcgttgtactctcagcaggttcgtcaaaagcggccaggttagtggctgtcaacctttt

SEQ ID NO: 202438 - DNA, 275 bp, Zea Mays
ctggacatcaccctgccctgtgcttcaatgcttctgctggttagacttgcacttcagtggccacatttggacttcctcccatctcagtcgatcttctccttttgtcgcggtacatttattgtggatattttatggatatgacttctgcaaaaaatctttaaaaattcctggcgacacacccaatgggtgtgcccaaggggtgtcttggtacgcagattgtttaccacattgtcctggagtagtaacttgatgtgacttggggtgtgtaatcatat

SEQ ID NO: 202439 - DNA, 531 bp, Zea Mays
agctattttcatcgtttaaaagtactgttaatatgggagattatggatccattgtttcttgcatgaaaaatattccttcagaaagtcagatgcaggtaatttttttataatattcctgcccttttttgtgccaaatgcctcttattgagacaacaaccattattttaggctgttgcacaggaggtccaaaatcttctagtttctgggagaagaaaagaggcccttcagtgtgcccagggaggtcaactttggggacctgcaatcatactggcattgcagctcggtgatatggtctgtttgactttaagcaaccttacttttgtaatgtattatgttgcttgactttcctgcccagttttcatttccatgttaaattcattgttttttccttgactgttggtacagttttatgtggatacagtgaagaaaatggctcacttccattttgtatcggggtcccctctgcgaacgctatgccttctgattgctggacaacctgcagatgtttttaatgtagataacaatgtcaac

SEQ ID NO: 202440 - DNA, 320 bp, Zea Mays
tgattgaagtcaccagcaatgatccacgggcctacacaggcattcctgatgtctctcaactcttgaagaaaggcaggctttaagctatcttgatggggcccataaaccccagtgaaccaccaaagaggaccagaaacgctcttcaactgaaccgagacagaattatccttgatcactgaggccactgatgcaaaagatccatcatgccaagcgactaataaaccccctctagacccatgagcaaggccataaacaaaattactgtaccctgacccaagaatagaaagaatgtcaaaatctgaaacggagcacattttggt

SEQ ID NO: 202441 - DNA, 483 bp, Zea Mays
agcgacaaagggaaaggaaacgaacaagagaggggtaggaaaaacaacactctcggattgaaatggaataaatgaggctaaaaaaatcggtaaatatcatggtaaatatggagagatgtcaagggtcaaatatgataataggcaaggatataaagaagaggtaaatgtgcataaaaaaccaggaatctaggtacaaccaagaatagagttaagataagtcttgcaagtggtaaagtataagataaccacgggtgagataagtaagaggccacacttgaactaaggtgggagattagaggttttagataactaacatagcgtaatctccaaggtaagattgagagatgagaagggtaaaggcaataaggaacaaaagcacaacaaaggatgaggttacaaactcgcgagccaagtaagaggatacgaccaagaggaagaaggtatgtgacggaagaggggtgattttaaagggcaggtatgaga

SEQ ID NO: 202442 - DNA, 312 bp, Zea Mays
gtggtcaaggtgagctccaatgcactgaattgatgtggcgacgcatttgtccaagttcgtgaatagcctagaggcatgaccaaaaatgtttagaatctccctgagcacatgcagatcttttgggtgggtcgcaatagaaatgacaagatcatccgcataaagtggtgtgtggcagcgaattgcctgctgacccaatggcgtgaagaaatccagccgatcagcgaggccaagcgcccgttcaatacctccatggccaaaacaaacagcatgggtgatagaggttccacctctgcctcagcccttgcgcatgac

SEQ ID NO: 202443 - DNA, 339 bp, Zea Mays
gccgccgagccggagacgaggttgaagacggagccggagacgaggttgagcccggcggagttgatttgggcgaccgctgtcgcggtcccggagacgaggcgaagctgcaatccgtcggagcaaacccgtggccgaggcgctgacacggagatccaatgcgccgggccgccgagccggagacgaggttgaagacggtggagttgatttgggcgaccggtgtcttcggccaggggcaacatttcagcggaaacgcggcaacagaaacgacctaagttttacggagcattgctggaaaccacactctttccacacctccgtatccactcctgcactccgtag

SEQ ID NO: 202444 - DNA, 386 bp, Zea Mays
gctgcgcacatgcaagctttgcatgaaggagaggtgtttgcatgcatggttgcatgcaccagtttagttgcatacttgcatgcgtgatgtgtgtgcaggtttaggggttgcatgcagactgagactggctgcatgcgaggaaggagcgggggcataaatatggtctacattagactcttaatagttagtagagataggggtccaatgtcatctttggtatgtgcttagccagccatgcatgcagaagccatgggtaaaactagattatagtatgcgagagaatgcattataaaattaaatctactgcacggttcgccatcacgtcagatgtcagggcatctctcctccgaatacaagactcagcttcactacaaacgctctccttg

SEQ ID NO: 202445 - DNA, 407 bp, Zea Mays
gacttaagtcggcgacgacttaagacggtgcaacatgctcgcgcttacttaactcagggtgaccactatgccctgctaacggagcaatcggcttaagtcggcgatgacttaagacggtgcaacatgctcgcgcttacttaactcagggtgaccactatgccctgctaacggagcaatcgacttaagtcggcaatgacttaagacggtgcaacatgctcgcgcttgcttaactcggggtggccactaaaccacgctaacggagcgatcggtttgagttaatactaacttaaactggcgcagcactctcggcgcgcatgcggttactcatccaggggcggtctctatgtcccatgaagaagtctcgaaaccatcacgctgcattttacttctacaaatgtagatactgc

SEQ ID NO: 202446 - DNA, 429 bp, Zea Mays
tcttcccagaccatctcagcaaatctaagacccctggagcacccacgccccttgtctttggtgagcatctcgccgctgacgcgggcgacgccgtctctagtggacaatggaaagggtcgaaaccggccacctaatccccgatgttcaccctagatcctaaggttggattctaactaatctaagcctaaacctaaccatccgcccaaggcccaacggtctgcgccctcactcgagccagtctgtgccgcgcccttgagcgaggcggagagtccgcatttatccgagctagtctgcgtcacaccctcaggcgaggcggagaaaaccttagccacccgatccagtttgcgtcgtgcctttgggcgaggcggagaatccctcagccatccatcctagcccgcgccacgccctcggacgaggcagagaagccgc

SEQ ID NO: 202447 - DNA, 511 bp, Zea Mays
gggtggaagtcaacttgcggttgcggacaaggcggcttgggcagggagcggttgacgacgtcaagccgcctcccaccctctatctaacgcccatattaatcagcgccatgtaaacttgcattggtgacaggtcaccccgtccctcgcccgtccgcttctagaaccggatcatcacgctcacgcatgacgaccgtgcttgcgttgcactcctggacgtacgtagtacgccctgtccaagcccccatgaccgatgcgatgcgatgcgacggaccatgcatcatgttcgcttcagaaacgtgccgagcctgcatggtcctattggtttctaggggaaataaaaaacaattctagctgagctgatggatggcgcagtatatcaatttttcattcacagtaggtgtagtactacttgccataaaatgaccgtgtgcactgtgcggacttgaattcttctctcgaagatgtgtgtcctttttggatggatggatggacgaccgatggccactacgaa

SEQ ID NO: 202448 - DNA, 395 bp, Zea Mays
ctgggtcatagagagatgcaacatgtccacgagttgtagagagatgagctggacagtgcaagaaggtgcgctagagcgacagacgagcgtgaggacgaacacccccgtcctgaagcaggagcggagggaactagatgtgtgttgccactagagctagagttgacgagagcagtggtggtgtcggtgcgaagcgaggctctttgtgaccttgaggataaggtcattgcaaaccttgtggaaggacagaaagggcacgaaacgggtgatccaggtccgtaggttgttgtagcgctcgttgaggcctcacataaggttgaggcctgagggcgagagtacgactatacgagtggagacaggctcttcgagatcatggagagagtctgccacgtcattca

SEQ ID NO: 202449 - DNA, 356 bp, Zea Mays
gtttaagcttgcctaaaataaaggagcgattggctccaggacagcaggcgatggctatatatgcgacacagggagacaggaataaaggcagcaaagaagttatctcttctccacctctctctatcaactaagcctacggctgtgggggataaccacgccggagaagacgacgaaccgcgctacgaccttcgtagccgagggccccctgctctagacgcccaggcccttgacaggaagactaacaatgtacttattgcaacgtcttcagtctctatcccactttaatgtggtgaaacaggttaattggcaagtcattttacagcacgagtctggacagtgctgaaaccttttcttag

SEQ ID NO: 202450 - DNA, 344 bp, Zea Mays
ccgcacccgcccccttcccgaagacctcgcgacgccaaaaaggagagaccgacacgcccacgcccacgccctgctgccgccaaccccgtcccctcgcggcggctacggagctcgagcctgagccctgctcccctagctaggttgcccccctggtctccgcctcagccctccagcctctttggcacaacccgccgccgccgcaggcgcaggcgcaggtggacatggatctaccaagcctcgccgtcgtgctgcgcgccgcgctcagccacgttcctgaggagcgcaaggcggcagaagagagcctcaaccaggtgagtgcctcgccgccctccatattcgctggt

SEQ ID NO: 202451 - DNA, 900 bp, Zea Mays
ctcattttgagaagagataagaaaacagctccttgcttcaacacacggaggagccagagctaaagccgaccagagctccaccaaacagggccaagtcagttacaggataggaatagcaagaaagatggtatagaagtgaaaactcacgtgtttgacgattcaacatagttgcacacaataacaatttttctcatccacaataggcctttgcattggatcttttgctcttgtgtaacatcaccaaaaaaacgccaccttttatttcgcaaatcatatagcactagtccgtgagagccagcaactgccaagtacatcccatcattgcttgccaccacatgtagaactggccagttctgggaaatgtatgaaatctacttcaaaaaatatatattgtcataaaaatgcatcatcaaacaacagaggctgcagcattttaacctctcaaataaatcaaaggcaaagaagttaacacttaactggaacattaagatgcaatatcttcagttcatcggcatcatccggttgcaccaaaaggattcgatcttccccataaagaacctggtgggaatatgttgtgcctgaaagccctctgtttgggcaacatttggcaaatgagaaagcaagaaccctttctgacaagctttcttcgacagcaaataacttatatccattatcatcccattgaatgtgtgatgttcctcccataagaggctcaaattttagagcgctaggtttcaccataggagatgaggcagaatttgaaccagtttgacgaatagtacacatcaatcgacatccagacacagaccatacagtaagtcccctaaatttccacccaactgcaagagcacaattgtcaggcgtccaagatatacaggcaacaggaccggtatcttccac

SEQ ID NO: 202452 - DNA, 474 bp, Zea Mays
gaatagtcatcaggtaaagaaactctcatttttcgttgtacttcctccacatctgctacaataaggtactcctcaataacttcatacttcctagtaactggaggaacaaggctggcctttgtcatgcgggcacctaatatacgatcatcgatcacagactccccatgttcagttaactttaggcaatttccttttaaatcccaggctccagaatttacatcaaagtcactctcagtatcagaaacagtagtttcactctcagtttcatcaccttcagagtagccatcatcatcagatgtttcactaccagagcagacatcctttttctttaatttagacaggcttcttttgatttcaaggtcaaatgcgcgagatgaattatctgctccagcagccaccaaatttgctcttgttttgttttgcttctttttgagtttagtatcgaatgaatattgactaatgtccaggctgtcc

SEQ ID NO: 202453 - DNA, 274 bp, Zea Mays
tgaaacttggccttagccatgatggcatttagatggcgataatccacacaaaaccgatgagtcccatccttcttttttaccaaaattaccgatgatgcgaagggacttttgctatgctggattatgtcagaatccaacatctcattcacctatttctcaatctcagatttgaaagaaggagcatatctatacggacacatttgcataggattagctccgggtagcagagggatctggtgatcacagtccctgacaggaggaagactagtaggta

SEQ ID NO: 202454 - DNA, 292 bp, Zea Mays
gtagagcgaactctgtgaggccattcacattggagtgaagcgggcactggccgtcgttgcatcccactatgaggtagacctcgagcgggtgagtgagggctatatcctgcctgaagaggatgatcttgttgaggttgaggcccggaggctcgtcgatgtcgtcaaagggccaggtgcggcgctggctcgccacttcgaagaagaggtggttccaccgatctctctgcttggcgccgggtcctactcgactgcgacccaccccatgaagccgagggtgctacctcgccccttc

SEQ ID NO: 202455 - DNA, 425 bp, Zea Mays
gcgtgcattagatgtgtccaggaacagtttgagtgggcctgtgccagcggagcttggtggttgcattcagctgtcagtgcttgttctgtccaatccttatgcacccactgctggttctgattcttctgattatggtgagctcgatgacttcaactacttccaaggagggattccggatactatcgctacactgccaaagctgaggatgttgtgggcgccaagagccacattggagggagagttgccgggtaattggagttcttgccagagcttggagatgataaatttgggggagaatctgttctctggtgggattcctaaggggctggtggaatgtgagaatttgaagttcctgaatttgagcatgaacaagtttacaggttcagttgattcttcgctgccagtaccttgcatggacgtgtttg

SEQ ID NO: 202456 - DNA, 559 bp, Zea Mays
cagagatgcatctctttgggagttgatgccatcagaacaattgcaaatcacatcaactgatggaccaacaacttctgatgctggaccttgaacaagaacttcagtaggtcgatttagcacttcttcgatgacttcagcatcagttgcgctttgaaccaacataatttccattgctgaattgtcatccaaagactctggtaccagagcagctggatcaacatagcagctaccaactacttccctgaagtgcctaaattcttccatagcaaattcaaaatctggtgaaggaatatgttgatcaaaattttgatctaattggccacatcttgctgcctgaagggtttcttccttcaattgagactccttgatcctggaagctgattgctgcatatcaagcctgttacgttggcatttcatgtgttccagaaaagcatacagcagcatagtaaaccattcaattattagctttattttcccatctctgtcctcttgagcaatgtgattttgactactacgtagatgctccacaactaaactgcatgctcttctgagtttatcc

SEQ ID NO: 202457 - DNA, 292 bp, Zea Mays
gcaaggggtgcgtccaatcaccttcgaagagttagcatcaaaggcaactgatatagagaactatatgcaacatatctctaggcaggcaagaccatataataagcctgtgatggaaagaaatggaccacgggataaagttcccagtaaaccaaaacagatgcaggccatggaggctacagtagtccctcgaaaattgcaaactaggggcgtcattgaaagaaatcaacacagaggtgatgcatcagctcctagaaggccaactttgagtgagcgacaaaatcaaacatattcc

SEQ ID NO: 202458 - DNA, 391 bp, Zea Mays
caggaatgaagttcttatcctctatagaataggtgatctcgtatcccttcttgtcaaaaacaatatcggtggtcaggggtagtggatctctgctcatcacaccaacaagcagtctgatgacgcccatctttctataggtgtacatgtctacatcaagagtggcgccgattaccgatcctagggcccaaaaacccaaataatgcctccaagcgtgaggtactcccctcacatgaacccaaacctcgtccaattgataactgggttcaacatcactagcatccttccattcagagatggtgagagtaactccatgatttttgagagtgaactccacatcagccatcctaatcagttcatcaactgagggaaagcagctgatactgactttttg

SEQ ID NO: 202459 - DNA, 491 bp, Zea Mays
agcgtgtttgttatattttaaaggctgttgtttgggcaaggcgaatcaggcaagagttgatgacgagcggctaaactaatccaagagttgatgacgaccggcttgttctttcacttgcaacgacttagagtcgggcggcctgcaagatcaaggtgcatggtcgtcgaaggatggcgacggcgtatcctcgatcgggcaaggcgaatcaggcaagcatctatttggaggttggttagttatcccatgtcatcagacatcacgcaggaatcaggtcatccatcaggaagcagccagctctgcctggactaacccagggcaaaggcaaacagcaaactttccaggataagtctctgactttgttatactttcctgtgtgcaggaggtcttgaagatctggaactgcaggtgcagaatgctattgcagcagcagcagctgcagctccacccaaggaaagcaatagtgtcagcagcaacgatcctggcagctcgtc

SEQ ID NO: 202460 - DNA, 271 bp, Zea Mays
gcatcatgattgtcgcataattgtctcttgtgcatcaacatgcttctctcacctttattccaataataaaaacttgtgaataatgtgatgtactgctatgttaggaattataagaaatgtcttacctcgcgtcggattggtaagtcttgttaggtcgtgttatgtgttctcttgtcttgatatctaggtggtattgtaattgtttagccctttttgccaagaaatgttgcttgttttgcccataaaaggaccccttccccaaataatctag

SEQ ID NO: 202461 - DNA, 275 bp, Zea Mays
tggtggtttccttgttatcgtaggttaaaatcgctggtatggtacgccaatttctaatgttcatggtcaaatctcactaacgaaatctgacttgctacggccttcatcggagcgcataaacaaatgcatcgccggatctccgaagcgagtgccgcccctacgcattcatttcttgcgcccccagttgtcggtggatgccattcattcgacactcatcgcaggtcaaacaacccgagccacacaccacaaaagtatactacgcctatactactgcc

SEQ ID NO: 202462 - DNA, 899 bp, Zea Mays
gctaaggtgctagatatctttaaccatttggactggttggatgggaaaaaagacaccgtacctcacacaacccagctaaagatctcagcgattaccgatgaacctgagactttctttgatactcgtgaagaacttgaatctgaaagttcttctggtgaaatttattcttctagtgttgttctgaaggtcggaaatgaattggatatgcttgtcagcactaaaccgagacatattccccaagattcaagttcagctaatgttcaatccaaatcacaaactacagtgcagtctccttcgcgaatgcggcgcacagcattgttatcaccttctaaggttaaggtttcaaagaccagtgcttcaccaatggaactgtcttcaagtacaatcatgccacaacaatcatcttcgccggttcagcctcggcgagtgatgtctgactctgcagtaaaatttttatcagagataacagaatcagcatcaggtgagatgtcttgttcacaaactccagttgaacatgaaccttcctctctgatggaaaacaatccagcaccaacagcatctctgttacctttgtgcacacctcctcctcttcctccccctccacccactgtctctttactccctgttcccactaagttacccataaatactagcacaagtaccatcaacatttcccttagagcaaccgtgcgttcctctccaccttcagaaccatcagtccctcctaaagatcttttgagaaccgaagagctgggtaaatcacaagaaccttcctatgaaactcgtgggaaattacaaactgatagtactacaggttccaatgatttcatactgtcaccagccgcttcatcttcactggatgaggaattgagcaacgcaagagcatctctcccgacaga

SEQ ID NO: 202463 - DNA, 485 bp, Zea Mays
cttcactcaagcccaggcccacactgcccccgcccagttctccgacaactccgttccaaccccgccagagcattgcggctgggatcaggctggcctcgtagccgccctgaatcagatgtccctccaggggtcttcttatgtcctcgacactggcgccacagccgacatatcgtcttcggctagtatactcctgtcccatctcccccctccttccggcatcacggttggcaatggcactaccatacccatcacatgtcgtggcacatccacactctcctcccccacctctatttatcaccttaacaatgttctggttgcaactgaccttgtgcgcaacctcctatctgttcatcaattcacccgtgacaatgcatgttcgattgaatttgacgcgtgtggtttttctgtcaaggaccaacagacagggcacgtgactcttcgctgcaatagtggtggcgatctctacacctacccctccacaacag

SEQ ID NO: 202464 - DNA, 836 bp, Zea Mays
gacggcagtgttgccagtggcgcttctgctgctgtggcggccgaggctgatggcgccaaagcggggaagaagtggaccttggatggcgaggagtctgacgaggaagaggacaaggaggacggcaagaaggctgaggggaatggtggtgctggtgacatggacgtgggtttgcccagtggaaatggtgatgccaacggtggtgctgagatggaggaggacgaaattgatccgctcgatgccttcatgaattccatggtgctgccagaggttgccaagctggagagtgctgcagtagcaatggatacagcccctgctgcaggtgcagatggcaagaatggtaagagctcaaaggatgtcattagtaatggggataagaaagggtcaaggaaagctacggggagaattatgcaaggggatgattcagactcggactacgatgatgctgatgatgatggggctggagaggatgatgaggatgatgaggaattcataaagcgtgtcaagaagacgaaggctgagaagttggcgatcgttgaccattcgaagattgactaccaaccgttccggaagaatttctatattgaggtgaaggacatcaccaagatgacatccgaggaagtggtagactaccggaagcacttggagctcaaggtgcatgggaaagatgtgcccaagccaataaagacatgggtgcagagtgggctgacaagcaaactccttgataccatcaagaagcttggttttgagaaaccgatgcctatacagacacaggctttgccgatcataatgagtggtcgtgattgtataggcatcgcaaaaactggatctggcaagac

SEQ ID NO: 202465 - DNA, 397 bp, Zea Mays
gaagttgcaagatgagttttctagttatttgaaaggggaatgcacacaagaggttagtatagatggagatgcagagagacaaccattggtgtttatcaagatgaagctagcaaatgctaggaaggagcttgaggacatgagagcagacattaaaaaatccaaggatgatgttaggaaactttggaatgtcgcagctacatttcgggctgatatagatagggaggaggcaggtctactagcattagagcacaaagagcaccttgcttcgatttctgtatcatctcaccaggaagagctaagcaacattacatatgagctcaacatcatccatgaaagaacaaaagcaactaagatgcctatagagctacaacaagcaactgaagttgtggaacaagca

SEQ ID NO: 202466 - DNA, 336 bp, Zea Mays
cgaaggacaacctcgggtgagtggtcggacccaaaacaccgacagagcgcatatgggcggaactccggctggttgcgcgccgtgtggaggaagacgaacagggacttaacgccggcgagcggaggagctgggcgctgacagaggaagagggagctgggcgagctccagggagctacgcgcaggaaaaagctccacggcaatggggtcgcggcttggagaaataccagggaatgggacgtcacgagctgggaacagggataaacgccgaccatggaaccgagtagggagaagcgaccggcgcaggggaactggagcaccgcgagaactctatggcag

SEQ ID NO: 202467 - DNA, 420 bp, Zea Mays
gttgtgcttcatcgtcgacaccgtaggaggtctttacaccatggcccatggtgattatgcagttggtggcgacagcaatgacatcagcgacgactctgcttttgaggtatcaaattccgcccactgaggtagaagagttgaacattgctttggcaaattagtacaagttgcttaggcttgctgcttgtgagaggaaagagtttaaatccaagtttgagtccgctagagcttcagttgtggtgtccgacaagactaaatgtgatgggtttgcccttcacatgtcgaacatcgccactttgcagaccaagtatgccaccctgctagatgagtgcggtgagcttcaatctaggtctagcttgttgggcgcatgtcagacttgtcctagcttgcagactgagctagcggagaagaacgctagga

SEQ ID NO: 202468 - DNA, 391 bp, Zea Mays
gaacaggctagtagaggggggacgtgtggcggatttgggattctccctctttttgttggcggatttgggacatcctaagcaatgcgttgaacgcgaacagccaacacacgatgcctgatgcctccacctgattgaccggtccgtgtcattgttcgtccgccttctgctctccccttcgtccaactccaaccggcgatctggcacgcacgatgcttgctttgagtcacatcgagtggttgtcgtatgggtcgccatgctcattgttatttcaacgatggtgatagcgatgctacctgttgctgtcatcctgcaagcacgggacgaaaccttgtcgaggacacactagttaacgaatagatgcaactagccaaattagctcaaacgtctgccc

SEQ ID NO: 202469 - DNA, 537 bp, Zea Mays
gcctgcacctggggacttgccatcgtctcttgctaccatttccctttctgccccagttttcaggattatttcccaagctattcaacaccctggaaataatgaagaattatgccgtacatttgcaccagagcttttatcacgtgttttacattatgtgttgcaggctcttccaaagttggaaagtggggaagaggttctgactgatgaggagcttgttgctgccattgtatctttgtgccagtctcaaagaaataatcatgaacttaaagtgcagcttttcagcagcttgctgttggacctaaatctatggagttcatgcaattatggtttacagaaggagcttctgtcgtctctcgcagacatggtatttacagagtctgcttgcatgcgagatgccaaggcgatgcaaatgcttcttgatggctgcagaaggtgttactgggtaattcaggaaccggattcaatcgataactttgcatttactggaacaaagcgatctttgggggaagtgaatgctctagtggatgaacttttggt

SEQ ID NO: 202470 - DNA, 332 bp, Zea Mays
gggataacaactcaaaagcggtttggtctcacggggaccataatgcagaataagatcatggaattatttaatctatttgactgggtcgtgcctggctgcttaggggaccgagaacactttcgagcttattatgatgagcctctaaaacagggtcagaggctaagtgctcctgagagatttgttcaagttgctgatgcgcgcaagaagcaccttgtttccattcttagggaattcttattgagaaggacaaaagaggagacaattggacatcttatgcttgggaaggaggataatattgttttctgcaaaatgagtgacgttcaaaaacgtgt

SEQ ID NO: 202471 - DNA, 520 bp, Zea Mays
ggtgagcaatctgacttggaggatgcctcctccgagtactctgagtcccccaaagtcctccgagggggactcgcggcatgcttgcacttgttgtcagcacagcgaggccaaccacgacccctcctgcctctacccatggttggttggagaaggagagaaagaagaagaaagcaacagatgatcgaaggatgagtgaagagaacaacggtgcaagcagactatttatagaggccaggggtgaccgtccacttcctaccacgctcgccgaacagacgcaagtattcaataagcaattcaagccgcctgaaaatgagtcaggcaacaggcgccgcttcgcgtaacacgacaccgtttggaccaaggtcaactactcaggcaatatgattacactccatggtcacatcaagttactactccaggacaatgtgctaaacgctctgtgtaccaagacaccccttgggcacacccatttggtgtgttgccaagaatttttaaaagattttctgaagaagtcatatcc

SEQ ID NO: 202472 - DNA, 406 bp, Zea Mays
gtcactttgcaagtcttgccttaactctgtccatggattatgtttttcaccattatcacctttacccttatcacctctatatcttaccttgatgtttatcttataccggtctttaaaatattctcttttccatctcaatctgagcattgtattgtacctacttttcccttggtcatatcctcttctttatcacctgcaagttttttaactctatcctttgttgtgttttggttgtcatctcctttacccttctcatcactgtatcctacctcgttcgagagtggtgttttacttattccgcccttgttcgtaacctcatctttgccatgtgaaagtcttgtcgtgaccccattcttggttgtacttgtaccgctggctcttcaatgccttcatcttttctctcata

SEQ ID NO: 202473 - DNA, 468 bp, Zea Mays
gttgaggctaagtcggacacgtcactatatctattgtcgcagtggtgacactctgcttctgtatgtcgacaacattgtcctcacggccttgagtcctaccctcttgcagtggaccatctttgctttgcagcaggcgttcgctatgaagtatctgggccaacttcattacttgggcatttctgttgagcaccgtccccatgacctgttccttcagcagcgggcatacactctagaccttcttgagcaggctgtcatggttgattgtaggccttgccccacctcggtgcccttatccattgatagtgcccttatcagtgatcccactctgtattggagcatcgctggcacctgaccctctctagtacctcaccttcaccgggttatatatctcttatgttgttcaacaggtgtgtctacatacacatgatcctcgggtgtcgcaccttaccgttgttaagtggattctct

SEQ ID NO: 202474 - DNA, 478 bp, Zea Mays
cccctgtatccaaacaagcccggtatacagtctatgtaataactttgtcaaattacagaaagcttatacctttatcttttgtactactatcaaagaaacatgccctgtcgttcattgatcatacaaaagtcttaagtatcgagtatcgacttaaaattatgtgcactcaccactattcaacttgacagtgaatttcttagtgcattgtctatagattatagtgaagtatgtggtctagtgagccatactttttgcttggttgtagccatttttgtttatggtctatagacctttatctttttgtttgttccttttctgaatggctggtagttaatgtaatttttgaccttctctattaacatatagcaagttagcagcagtacgtcaaggaagcactttttgcgtgtaatcactttaatttcagatagccatgcatgtttctccgccaagatttaacagctaaccttttgcttcagcg

SEQ ID NO: 202475 - DNA, 308 bp, Zea Mays
ttgggcatcaataatgtaacaccccaggtgttaccaagaccatggttacatttgtgcactaatgactatgatcatatggggaaaaaaagaagaacataaaaccttggaaacatgggttagccaagagaaattagcggcaagggtttcaaccacacaattggaacaatggtcatgaggacccaaggtgattaaaccctaaggacacctaagagcactagatttccaagccagggatcagtggataagttaaccaaattgccaaagcatgatcttagtccctaaacaagttttagtaaccttgtaaccta

SEQ ID NO: 202476 - DNA, 369 bp, Zea Mays
ttgtggaagacgggaacgggaccgaacgagcgatctaagtgtagaggtgatcatagcgctcgttgaggttgtaaagaaggttgaggatgaacgtgcggttggagataggctccccgagatcatagagggcgaccaccatgcctttcatctggtggcagtactcggtgacagatatcttccccccctggacgaaggttcgaaaggcggtgtacatgcttgcgaatggcgtcctatagctcaattgtgatcgtcctgaggatccaggagagtaccacactatccatctgctgccacgatgggatagtgaggcacacaatattggtgaggaaattgtcgtccagggcgtagcggtgcagcatgagggcgagg

SEQ ID NO: 202477 - DNA, 556 bp, Zea Mays
cccctttgttaaggtaaatacttagtagtaccctaaatttccacctaactggtggaatgtctacaaagtgttattgatcaggctttgacatttttttagtgccaactttgttctgataattagcacagccacttagccactgtttatttcatcccccctttatgataatggctgtgctgaatgagatatggagaattgctgttttgagtattatttgtttgtctatttgattgcaagtgaagcagtaggtataaaagtcttgacatatcatttgcttcatacctgtttgttgcagcctctttaggctttatgggttataattatttagtagaaatatcaattcaaataattttggacactataatattgtaatgccatgcttaacatctctctttggatgaagttgaaagtctgccatctcgcggtggaaatgttataattctgtgttgtcatttacgaaagcatccctttaacattttctggttatttgtagagcccagcttggagaaagtatcaaaacaatagttcattctgattatcctgagcagtggccaag

SEQ ID NO: 202478 - DNA, 877 bp, Zea Mays
gaataacttgttggatgccgtacatgtctcgctattgcgtgcactgaggcggtatcttgaatctaaatctgctcaaggatctcagatggcttcaaattgcttgaagtacatatactctatcaacccccccttttaactgcaattactatttcttaggtgttgtgtttattttttacttaaaattctgaaaaatattcactttccttgaaccgtgtacaggtatttggattggacattactagatgcattgacttggccaactttcttactagagtacctgtatgtgatggggtgcattaagaacctaggggggcagagttttgctagaagccttctagccgctgaatactataaactttctgttgccacgaagttgagggtgctgcaaatactctgtgatcatgtccttgaatcacaagaatacaaaactatactggaagatcgagtaggctacaatgaggagatggaatatgagatagattctagcacctttttggaggctggttccagagcagtcttgactagagcctcaaaggcctcagcttacaaaatgctgaatgatttacagaactttgaaagtggtccaaatgtaacaaattcagatgttgctgtagcagatgtttctcaggacggtaatagtgatgattgccgaatatgtggaatggatgggactttggtatgctgtgatggctgcccatgggcatatcattcgagatgtatcggtcaaaataaagctttccttccccagggggactggttctgtccagaatgtgttgtcaacaagcttggaccaacttcatcaagaattgaacgtggtgcaagaggagctcaaatgtttggcattgatatgcacgggaggctattcttaggaacctgc

SEQ ID NO: 202479 - DNA, 302 bp, Zea Mays
gttagccgtttgatcttcaacggatggccggatcggttgtttgcgtattctctcccgcacattaaatcagagccattgatcctatcgcgtgtggctgtgatggcgtaggagtattccagattggcgatctaatcgtggcagtccattactgatcggacggccgaaaagcaccaataccccttcggatacgtagttttgcataagagcccctcggttttgttataataaacccgccgtcccctaaagttataaaatcaataccaacaggccttgtctttcgcagtttagaccctgggttcttt

SEQ ID NO: 202480 - DNA, 335 bp, Zea Mays
gttcttcctcactcacggggtcattcttcggatgtcgtgcccatacacctcccaacagaacggacgtgcagaacgcattcttcgcacaatcaacaacattgtgcggtcccttctgtttcaggctagtcttcctccggtttattgggctgactctctccacaccgccacctacctcctcaatcgtcatcccactaaaaccctagacggccataccccctttttcgctctccacggcactcagccatcttacactcaccttcgtgtttttggctgcgcctgctatcccaaccaatcctctgtagctccacacaaactatcacctcgctcatccctgt

SEQ ID NO: 202481 - DNA, 274 bp, Zea Mays
tgtcgaactcggagtggagcctgtcgatgatgcgctggagaaaagttgacgaagaggcggtgaggatgatgtcgtcgacgtacagcagcaagtaggccatgtccccaccctctttgtacacaaaaagtgagacgtcagagacggaagcagtgaacccgagttgacgaatgtacgaggcgaaccgctggtaccaagctcgcggtgcctacttcaggccgtagagagagcgctgaaggagacaaacatggtcaggagccgctggatcgacgaagcc

SEQ ID NO: 202482 - DNA, 450 bp, Zea Mays
ggaaacaccttcaaccgtttccggtcccgttcccggatatacctatctcggttcccgtaccgttttcacattttccagataaaacgaaaacggacggttttaaacgggaatacgggacgggacggtataattcctgtttgttttcatccctagtcccacgtccagaagattctggaaattttgcgccctgcctccgtgactctccacctccccactgacgctctcgctgtgctccgcctctcttccatgcatgcagcatgcttccctcgccttgtggccttgctgctcgtcgtggccccgcctccattgccttttcccctcgcctcctcctcgctcgacgaccgcgaccttgttgctcgacgtaagcccgcacctcggcccggcctccatcaactccctccccttcgcttcttgtctcctcctcgacacctgggaaggcgaacaaccgcc

SEQ ID NO: 202483 - DNA, 1090 bp, Zea Mays
agtacatataggcaggggtggagtgagagccaagcagccgtacctgatacatgccataaatcaaggcctactataattacacattctataattacaataggctaacactcccccacagtctaatcgggagcatcgctaacatttaggctggatcgaactcctgaaatagtgaggtaggaagacccttggtgaagacgtcgacgtactgcgatgtcgtaggaatatgtagaacacgaacgtgaccgagggcgaccttctctcgaacaaaatggaggtcaatctcaacatgtttcgtccgctgatgttgcactgggtttccggagagatacacagcactgatattatcacagtagaccaaggtggcatggcgaggggggtggtgaagctcaagaagcagctgacgcagccaagtagcttcagcaacaccatttgccacagcaagatattcagcttcagcgcttgacctggagaccgtatgctgacgcttagaagaccaggacaccaagttatccccgagaaatactgcgtagccagaggtcgaccgacgagtatcaggacaaccagcccaatcggcatccgtgtaaacaacaagctctgtaggtgaagatcgacgcatggtcagcccaagtgctagtgtgccctgcaagtaacgcatgattcgcttgagagtagcgaggtgtggttcccgtggaccatgcatgtagaggcatatctgctgaactgcaaaagcgatgtctggtcgggtgaaggtcagatactgcagggcgccagctaggctgcgatactgtgtagcgtcagcaacaggtggtccatcagcagatagtttggagtgtagatcaacaggcgtgctgcacggcttgcacgcactcatcccggcgcgctccaaaatatcctgactgtactgccgctgagaaaggaacaggccatctgcagagtgtgtcacagaaattcccagaaagtgatgtagctgacccatgtccatcatggcaaattcacgttggagagcttcaatgatgtacttgagaaatccagcagaggaggcagtgagtacaatgtcatccacatagagcagtaagtaggccgtgtctgg

SEQ ID NO: 202484 - DNA, 571 bp, Zea Mays
aatgtagccacttatgtcaagcaagtatggtttgatgatgactggtgatgcaaaaggaaaaaacaaacgatccaagccactcgtttctccatactgaatgctagctgatttgtttgtggattgaggtatacattgtcaaatggaatgcatattttaaaatgtgaggatatactaattactacaactttgaatagcgatttaggcatttagctttactccactagaaatataactaaacaaacgtcaatctcatatccttgccttcatttttggccttttggaataaatagtactgtggcttctgcgtccatagatgcatagagctgcaattattacattgttttacagccagtgttggctgaataaaagttaacaagtagtagcaccgtccaccacacatccataagttgataagctcatgcacatgcacaaagtcgacccagttcctctgagcgcctagaatttacgcattctatttcaagaacttctagaatttgttaggctgtttggtgtaagtggatggtggaaatctgctactgacgttgtaccatttcagatcatgataattgac

SEQ ID NO: 202485 - DNA, 298 bp, Zea Mays
gtgaagaagggaagaactttgatcctttggttcttgaagattttgattgggacaatgagtgggttgatccattagctaattcatctgctattggggatgaccctcttttcacatgggagcatgttgatcatgccatcggtgcatctacacaacttcaaggccgctactttcctaggagagctcatggtactcaagtgccaattcttgaggatgctgaagatggtcttgatgtgggtgaagagaatgaagacgatgacaattttgtgcttgatgaccttgacatggatgatgaagaaga

SEQ ID NO: 202486 - DNA, 307 bp, Zea Mays
tgtgtatagacgaagccgaaaactcaatagccgaattaatcaaccccagagcaaagagcggcacatcctcatcaaagtcaattggactcatccttgggttcaactcaatgtcttctgctatgttcaagagggagcacaagaattgcaatatctctaccatacaaggaaccccaaagggctccatcaagtctttgtcttgcataacaccagaaccgtctcccacttcatcgccagagctgttcaaacatacgtagtcactcttcccgttctcagtctcctcagcacccaaacatgggttcttgcaacc

SEQ ID NO: 202487 - DNA, 417 bp, Zea Mays
taaattctgaatttcttaagcttctggactagtcgcgctaatacagagaagttcagggatcccggtgtaaattttcctaagactcagtttacccacgcagtggaccgcgggttgaataaataaaaaggtaggggctctttagcaagattaccaggccgaagaggtatggtttattatcagccacccgatcagaattgaacgaccctgattagatcaccgtagtatgcttatatgaacccatagatccggaagcgagggtggcgattcaaagtaacctggactcgatcccgaccctagatgtgaagatcaacggtgtggaagcgatcaactcgaaacggtgtcgacgttttaatctcgaccgtccatggatggatcaccggtccgcgacccctcgcccatccattgccgatccaacgg

SEQ ID NO: 202488 - DNA, 299 bp, Zea Mays
actgagaatgcaataaaaaaggctttaatgtccccaaggtatattgatatggacttggtcaatgcttatcttgcacgccgttcccttgattatgtaattgggtttggcatatcaccacttctgtggaggaagttgcctggttgccaatcagctggacgggtccaatctgctgctttggcccttgtgtgcgatcgagaatctgaaatagaacagtttaagccacaggaatactggacagtacgggcagacttcaaaatgcaatttgcagatctgtcaaatggcacatgtattccatttca

SEQ ID NO: 202489 - DNA, 485 bp, Zea Mays
ccttcgaaagccgaaggttgaaattgatgaagccgccgaagcatgtcagaaggcatttggtactgtctgcttctttattggtacgagagatttaattcaagagcacatagcattcagagtatgaccgcttgtagagagctgggaaatgccgaaggagaccatcaccaagtctagcgaaggtgaactggtcccactgaagtatacattcagatatggggataaattcgatgaaccaaacgatgactggctaaaatgcatcgaagttacaagtgatgaactgcttggatcatattccaagacagaagacaatgcattatccatagccttcggaggccggggaaaaaagagactgaacagagtttttgatgccattggctttgtttaccccgactaccgctatccgctgcgaggtcatggaaagaagagaaaaactgctacttcggccactccaaacgagcctgtgccgaagggcaaaaagttaaagg

SEQ ID NO: 202490 - DNA, 477 bp, Zea Mays
acttgaaatgacgcctgaaaaggcaaatcaaaagatgatggtctatctatcctaagtatcgaaggagctgtgggacacttactatacagttaggacttttattttaactttggttgtactataaagaggggttgtggatgtgtagtttgaccaagagatgtctagtgtagtgtcggtgcatgtactcactcaaaactagtgctaggtgtcactcaatagcccacaaaagaattggaatcgaaatcgatttagaaaaacctgagttagaacaggttgtagctgctctggagcaaggactaagggggaacgatatccttgcgcgagtgctccaatgaggactagtggagagtgtcgactctccgatacctcgggaaaaattagaggagttttctagccctttctctagttttcgcatttacttttgagcacacaccccatgacgacttatggtttgcttagagtttcctagattttgtg

SEQ ID NO: 202491 - DNA, 545 bp, Zea Mays
gttactgggccaagtcagaagggcattcagaggagccaaaggacactacgacccaacaagcgcttcatagggccggaatggcgtaattgagggaggcccatgagaattagggacgctagctgctagtaaatacagagtctggtgagaggaggagggcatcgaggcacagaaccctgatcccggctgcgtccggtggctggcgctgcgtcgccgtgtacggattccagacattgataaaccacaaagctcttcgagagaggaccttgagcaccgggagcggtgctcaaccaccgaaaccctgcttgtgtttacagttggtattcagagctaggctggattcctctcacaagtatttcaccagatcgaaggcgggagcaatggcgccgtcaaagagtgaagatcccttggcgcagctaatcgctaagatcgaggagggcaatcgtgagacccacaggcgtatggagacgatgcaagtctctatggcgaatatggaggcgacggtgaagggggttcttaaggaacacggcgagttccaaaagtggcgg

SEQ ID NO: 202492 - DNA, 397 bp, Zea Mays
tagcacccactcccatctccactcgttcaccgtagctctgcaattcgggttttcccccaaactggtccgccgcatcgcgaagaacagcccgcccgtggctgggccactctggtgagttcctattcaattcaagtgtcgtttccatgcctctgtatgcttgcgaagctcatggtggcgcccgtttgctctgatcgaccatggtttggcgggaacatgtactcacgtgctcggtgtccgccgtgatcgtggacaagcgactcccagtagggttcatgctagtttaatggctgttcctagaccgccttaggtcagtgatgcctccccggtagttggccgtaaccaccgtcgccggccatggcctgtacgaaccacgtcggggatgatcggcgtgcgcgtc

SEQ ID NO: 202493 - DNA, 416 bp, Zea Mays
ggaaaatacaatagacagaaagagcgattgtcggataagtcgctagcccaagtggcatcagagtaggcttagagttgaaaagagctagcacacaagatgaatagatggtgagtaatggcccttgaaggtaacacaagacataaaaaagatgaccatagtggaggtgacatgggttggaaacaaactgctaagaatgtgcacaacatatgagatgacaggacaagtcacacctaataaacaagattccctacaatatggtgatatcgaatgggatcaatgaggttcaccatcactagggtgaagatgaagattaagctctataggagtctcgacagtgcgatggtcattggtcaatgagagaggaacgataaagaagatcttggatgtacttctcttgcatccgataaatgccatcc

SEQ ID NO: 202494 - DNA, 333 bp, Zea Mays
aaggactaggacttggaagtacactaccacccggggaaagccaatgtggtaggttatgacttgagtcgaaagtcacaatgcaactgtctgatgatggattctcgcatcaataccctgtgtgacgagttgagtaagatgaggatcgaggtaattccttctggtaccttgtctcacctctccgtcaagccaaccttgcaagaccagataattatggcccagctcagcaacaagggagtgcaaatcatcaaggagaatcttcatcagaaagcagagaagtataagtgttttcgccaagacaacaaggggatactatggtttgaagatagattgtcg

SEQ ID NO: 202495 - DNA, 355 bp, Zea Mays
ctccatcaaagaacccacctggtaggcgtctgtgctcttgttgtgcatctattcttccctcacaactgctgctctccctaaatttcgcaatcaaaatgaattcttggtggaaatcggaagggggagaaagatgggagaaaaagaccgcatcttttttggctgcttgctctgcttcggatgctattgctcatgctcgtggggagggagcagaggacgagcaataatagtggcatgattgagaaagaactgctaatggctgatgctgatggcgttcccctctccccttctcccgcgctccctcctctcctcactcgagcacctactttttcattccttgtgctgatgtttctcgtgt

SEQ ID NO: 202496 - DNA, 599 bp, Zea Mays
cgatgattgcgatgcacagaagaatggcgaggaagaaggtatcgatgccgcccgcggttgttggagtggactaagtagacgaggacgagaggatggcattgcagatgaggttgtgctggacaaagtcgaagtatttgggtgacatatcgaggctcctggagtgtcagggctggggcgagagagctgcaccgcacaagcaaagccgcgatggtgctggagtgtcacgacatcgttgctcaaagaaggcgatgaagagcgcgaatagtcggggtagaccatgtgctagaggcgcacaacgatgaagtcgacaatgatgtagggccaacaatgaggatgacaacgggcggtgatggtgcaaacccgatcaccaatcagttagaataaaaggactcacaacaacaacaaatttggctgcggatctagggcgataacagagcccgtgggcttgagcggcctctccacaatcgtcaccactgttagctgatatatcagacatgtgtttcctgccatatagacgcaggatcccctaccatacaagtgtaggcatacttgccttactagcactgccgcatataggaagctacagccgcatataggaa

SEQ ID NO: 202497 - DNA, 315 bp, Zea Mays
tgctaacaccatctgctcgcttgttcacagcgttatggcgtcgcaggtccatgtcgtcggacaagggtaagcaaaagcagccgcagcgatttcttggtttggccatcgtctctcttgtttagaacgcgatgcgcctgtgttttttgttttggcaggaccgtaggccgtgctgcgttcagtggcaaccaccaatggatcgtccgcggtaccgccaatggtcacgggctctcctccgaggtacggccagtactgctgagtgctgagtgcttctcctcttctgagaattctccagcgaaataaatgcgaacccaattt

SEQ ID NO: 202498 - DNA, 839 bp, Zea Mays
tggggggcaatgggggtgagattagggtagcacttgcagccgaaaacccgaagatgttcatacgaggggtgtttgccaagtaaggcgaagtggggtgtgccgcaagtaagtgtcttggtgggaagaatatttaggagatatgtggcagtaccaagagcagcagcctagaaagtgggagggatgctggcttggaagagaagcgtgcggacgacattattgatggagcgaatgatgcgttcggccttgccattttggggggaagtgtaaggacaagacatgcgtaaaagaactccatgggtggagaaaaaatcgcgagcgttgaggttatcgaattcgcgaccattgtcacattgaacaccctggacggtgacaccaaattgtgtgcgaacataagcgaaaaaatttgtaagggtggaaaaggtgtcagacttaaggcgcaagggaaatgtccacaaatagtgggaatagtcatcaagaatggccagatagtatttatgaccagacacactagtgattggtgaagtccaaagatcacaatgtattaattgaaaatttcgagtggcatgtgatgaagaagaatggaaaggtagacgaacgtgacgtcctagctggcaggcatgacataagggggtatttttattcggggtacaagggatggcagaagactgagctagctgagtgaggactgtagatcctggatgtccaagtcgttgatgccacaatgaagaggtggtagcatgaagggaagatgttgtgctcttgagtgggtagagtgggccggagctatcacaccgaaggatcacgcgccgagtgggaagatccttcacagagcagccaag

SEQ ID NO: 202499 - DNA, 707 bp, Zea Mays
taccattcttttttatagattggtttgacatttgatattccaatcagatcaaaacagaacatgcctttgcctttgtatttatttaactaactgaatcatataaaattctttgagtgacattaggatacatgaaaaggaattaggatactagtggaaaccaaaaatcgaacaataggacaatataatcatggccatcgtgtcgtagacatatatggctacaaagatgaccactgatccaccagggtatatattgttagagtgctacttcatcaatcatgtttgacttctttggtaggcttttttgtgagctcggtgcacaacacttcgcaggtcttcttgtcgtcgggagccttattttctttggtgcactcctcgatgcaagcacctcttatgtcattcgcatttgagggttcttctggaacccacaacgatcttgccaccacaagaaaggtggcaaggaggagaaccaccacaatcatcttgttttgggccatcagtattgcttctatttagaatggcaaacgacgactctttgctcattttttattagccctttatatagaagactagtaaatcaactatggggagaagagaacttcacgggttacgagcgatgttaatggctgtgagcgtataatttctaattgctagtttgatcttcgtttttgtcgggtgactagaggtttaagtgtcatgtggcagacatg

SEQ ID NO: 202500 - DNA, 407 bp, Zea Mays
acgactttgtagttgtgttcctggatgacattctgatttattctaaggctgaggctaagcatgagcagcatctctgtctcgttctgggtgccctaagggagaatcagttctatagcaagttgaagaagtgtgcattttggccgtccgaagtggctttcctggggcatgtgattaatcagtagggcattgcggttgatcccaagaatgttgcggctgtggtggagtggaagagaccctctagtgtctctgaaattcgaagtttcttggggctcactggatattatcggtgtttcgtaccaaatttttccagcattgctaagcctttgactagacttttggagaagggtgttctcttcgtctggtccagcgattgcgaggtcagttatcaggcattgaagagcaagttg

SEQ ID NO: 202501 - DNA, 272 bp, Zea Mays
cagggaatagatgtcatcctagggatgaattggctagataaatatcatgcagttatcagttgtgataagaggtcaatcaagttgatgtccccactaggagaggaagtggtgaccaagctagtctcgcctgagccaaagaaaggaagttgttaccagatggctgttgatagcagtgaagcagatccacttgaggttatcaaggttgtgtccgagttcccagacgtgtttccaaaggacctaccaggtatgccacctgagcgaaaagttgagtt

SEQ ID NO: 202502 - DNA, 310 bp, Zea Mays
tggtggaaactggacatacagatgttgtagttcctgtggtacgctgtgtgattttattttttaaactgcacttccataatttctggtgatatattttctcttcctaggtggattataaatgcaatctaatgaaaggacaaactcaacgactggagcgtcatggttcggaacaattcttctcaaatttgtcagcattgttgaaatggtccccttttgcaacagaagaagagctgatgcagaatgtatgttaaacctgccatccgtttgaagtatagagatacaatattttatttactctaacaaaacatta

SEQ ID NO: 202503 - DNA, 575 bp, Zea Mays
atactaaaccaggtgcttcagatgctatatcgaaggatgatctagcattgctaaaaaagaatatagtaaagagaaggactaataaggaaatttgtggtgctgaaaagaaacctggggttagcagaaacagaagctctaaagatatccttgctaatagagattttagaaacaagcatcagaacaaggaggatagggtaaaaattaaagatcggagatgtgggcttcttgtccgtgggagtacccatgatactgaagataacatggatggctatattccatatgaatggaagcgtacattatgttcatggatgatagatctgggggttatttctgaagacatgcatgtcaaatacatgaacagcaatagaaccagggaaatgttggcaggtaaaattaccagggagggtattttctgtgggtgctgttccaagattctcacaatagcgaagtttgaacttcatgctggttcaaaagagaagaagccctatgcaaacatctttctggaaggtggtaaggtatctttgttgcaatgcttacttgatgcatgggagaagcacacacaaagtgaaaataag

SEQ ID NO: 202504 - DNA, 544 bp, Zea Mays
gtgagttacgaaggtaaaaacgagcaacaaggcaaaaagtttcaaataaaagtacctataatcatggcgcgttcggcagcttcctcaacttgcttagcctcctcacgggagtcgtgagattctttctcattcttttcaatggcttcatcagccatctcacgaccacccttcatccacacatcggagtagaatttgccgcccagggtagaagcctcaactgaagggtccttagtattgtcagcagagagaatagattctggttgggccgcggccttgacatgttcgcacccagccttttctaagattgccgcaatccctcgggcaccagaaaaagcacaaaaatctccgcaattgctaaggatctcatccaatccttcggcttcttcacctatccattggataaccccttcggggtcgccacgaataaatttttgttctgaggaatacgcccccaccttcgcaaagctatcttttagcttcttcgcgcagtccaaggaattttcataacacctttccctggaatcatgaagctcttcaacattct

SEQ ID NO: 202505 - DNA, 477 bp, Zea Mays
cagctgtcatcacttccagtatcatcttgctccaatcagaatctagggtcaccagttaaagtccagcttagctcatctcagtcatcttctagctctgcaacagctaacaagtcaagattgaggtggacacttgagcttcatgagcgttttgtggaggccgtgaaaaagcttgaaggtcctgaaagtaagttggtcattctgctttatctctcacatgttttcaggttatcttaataaatagtttgttcatatatttacagaagcaactcccaaaggtgtgctgaaactaatgaaggtagaaggtctaacaatttatcatgtgaagagccatctgcaggtatacaattgtgtccgctgaaaaattaattctcccttctatgttttcattaacttacattttctcgcatatactcttcgtatagaagtatcggcttgcaaaatatattcctgagcctaaagacggtaagcttaaattac

SEQ ID NO: 202506 - DNA, 717 bp, Zea Mays
ctgaacggctcaactttcatcgttatatctcacacttccgttctgttcataggggctctgcttttgctaaaatgcgtacaacatctgttagaaagttactcccggagtatgtttatcctcttaatgtcattctgctgttgtttgcttgcatctattgtacctgcactgaaaatgtccttgtagatcatggggtttcctgtgtccagttcatacacctgacggagagccttgtggtttactgaatcacatgacttctacatgccgtatgatattctcatcttgtcatttctcttgaatttaaatctgcacagtacctcatgaacacataacacagccttcattcatatacttgatttcttgcttctctttcatctttggcagcgtattgcatctgcattcttctgtctaaatgtttctatatataaatgtgtgcttgtcctttttggggacagtacagctaaagtttgtagtaagctatcatttctttagctccagctaaatttggtgtttcaggtgtttcatcattctacaactcagaaggggtgataaaaaattttggggaaatgaagaagttgctttctgctgagttggttcgtgttggaatgaacccagtgttaccgaagattgagcaaaccggtcccccagaagtactccatgtccatttggatgggtgcattcttggtactattgcttctgctatgattgagaaagcagtta

SEQ ID NO: 202507 - DNA, 729 bp, Zea Mays
ggggtacccgcaatggtatatctagtgttctggtgcagaagagtaatttgcttagccccagattctggctcatgatcaatgagatattcaagttcaagaaccatgccctcaagtgagtttagtaattcttctatcatctgttacattgttaggataacaccgtacaataatgagtatatatacctatctagcgatcgatgtttgtgcattattttaaagacaaatataaatggaagcctagctattgataattttgcaccccgcttttcatttttttgaagaaaatccttcttttcgtttgaaggtaccaagaggactatgcacgaaaccctgacaagaatgagactttcggtcaatttattcagtcacatagatattcacagctgttccaggatgcttaccttgtacgctactaattgaattatacataccccatccacagtttctcatatcagttttaagatatttaattttctgcagatcccaatgtgcgcatgcatttggtcctgtccaccacagaacatatttggcttccctgctggttttgtgctttcatttttttgtgataatcatcttctcgaggtgcctaaaaatctacttcaaatatttattagtttcttctgcattctaattggtgatacattagaggaacttgccagtctggctaatattgtgctcattcatccaatggttttatgtgtatgcattcagttgtttagtcccctacag

SEQ ID NO: 202508 - DNA, 369 bp, Zea Mays
tgaattttcgcgaagtggtaggcgccgtcgtatggggatggagcgtggccatcttcgagtggaccggattggtaaacaagaattgttgtcctcgccgattggggcgagcataggtgaaggggatctgtgaaatctttttgagggtgagaaattgagcataatgctgttcaattacagggagatgggtatcatcttgaaggttgagccgatgtaatatatgatgccctcgcaaagtgtatgtaactgtaatttgtatgatgtggcctgttggccatattcacgcgcctatgttgatccggctgcacccgtgggcgacttttgcgcggagtttcttttaaataagagacttcgattaacgcacttgttgtg

SEQ ID NO: 202509 - DNA, 334 bp, Zea Mays
tgtccatgcaggtatgttaggcctcaactaggcagtatgaccttccgtcttttccgattagtgaggtcgtccaatcggtcttacctgctgttgctcttgaatgtgtgtgcgaggtcgcttcgctggccggtcacttgggccggccttatttttcacatatttggataataattgatcgaaggtcgggccagatttgaccagccgaccaaccgctttaaatgtattagttttccacgtacatatctctagtcatcgtggtttgaaggtacgcggtcgttgcgggtcctgagtgttgccggaccgttcgctggaatgcttctgaccgtccggtgat

SEQ ID NO: 202510 - DNA, 278 bp, Zea Mays
tggcactgcggagatcccagtcatttcaagaacaactgtccccagctaaagccaccaggacccacctactccaactcggtgaatggccccaagaatacctcggcatccgcccccaaggcgccctcctccatcagccagcagaacaagacccagtaccaagggagggcacgagtgaatcacatcgatgcccaggaggctcaacaagctccgggagtagtgctcggtgagttccttgttgaatttactcgcgctaccgtacttttcgattttggagcatc

SEQ ID NO: 202511 - DNA, 440 bp, Zea Mays
tgaagctcttcattgccccatatattttaaaagaattgctcaaaagaaaatacatatcttgttttgtacaagtgatcgaacattgagtgtcgctaaccgtaaaaggcagtgcttcagcaaaaggagcacaacaacaccaacgtttgtgtaacaaaacatacacactttagctccacattttcaatgcaagaaataagtagccacatatggcatcatcagttcaccactactcatgtgactacattttgaatgcaggaaataagtagccacatgtgaccatatattctagtggaatgctaacctctatttttttaaaagtaatttgaatccaacactgacacctgaatttacaaagactgcaagagcagaagcaagaaaaaatgtattttagttgttgtcaaataattgtcaattcaaattgcagctcaacatcccaagcg

SEQ ID NO: 202512 - DNA, 529 bp, Zea Mays
gccaatttacagggggaacacccgccaaagctagcgcatcgggcgccaaaatccagcgccaacaaaccctaggttaggcgtcgcccatgggggagaaggcgtcgcccaggcgcctaccgcgcctaggcggacgccatactcaagtttacctgggcggcgcggacgcctagcaaaaactgtcgcctggacgcctaggcgacgccttttaaacaatggtgtctcccttcacgacagccaacttctacagggcacattcgtagcctttgatcgggtcatgaacactgttctacatgactgcgtcgagctccaaccaccctctggcctccatccaccctcaggaggaccaacacgctactaagttgtttgtgttccgttgtgccgagattgtctccatgacgatcaagacattgtcgtctcgaccacccatgcatgtcgtaagtttggtcgccactgtcgacccagcacctcctggtggctccataggggtacctctctcctcgtttcccgtgtcatcgcaacccactcccac

SEQ ID NO: 202513 - DNA, 401 bp, Zea Mays
gcacaatatgcccccgccccatcctcatcccgcgtgctccgctcgtcaaccaaccaaacctccctctgctaaaaccccatcgccctcctccactatggccgcctccccagcccgacgctcccatttccccaacctcggagccgcgacttccacccctgcgctcgccccttcccacacgcacccgcaggatacccggaatccgcgaccccgacacctgctccagcgccacccccaagatgcctggactctgcgaccgcacacccatcatcactcagccaatattcatgtcgtcgtcgttggtctcctgctccgcccggtgtccccgcccttctactgccacgctcttgtgggaggcaacccactcgcggctgcaccccacgccctcctcctaaaacccctcg

SEQ ID NO: 202514 - DNA, 384 bp, Zea Mays
ccggggaacaacatcggaggggctagtcatggtcttggctaggggatttctgatcgcctcctctcctctcctgccccgccgtgccgcaagccgcaatgcaactatgaaatctgagctcgccgcttccctccgccattcacgtcggtgacatttattcatttccttcattcaggtaacatcctcgacgccccaacatctatatgtttcgaaaatgcacactgccagtcagtctatagctgattgcgatatggatcatggatcgacagtccatgcccttcacacaatcaaaatcgaatcttggttgcacaactggaataacgcacatcgttttcccccctcaacataggatcgtctctgtctgaaagcacagcaagttggtatttg

SEQ ID NO: 202515 - DNA, 325 bp, Zea Mays
agacatttatttatccaaaggggcatggaatgtgataattgacaaaacaaagcatcacattgccatacaacaaaaatcatgacaacaccgatagatactatccactaatcgtttaaaaaaattaaacttacttctcgcttgccactacatcactccttaatcacacaaccatcacgagcatccttcacacgattatataatagcgacccaagcgtcgtgtcacaatacatacatctttccccgttgcgagtataaccatatcacggcatatacccgcacacctcaatcaaatatcttacgccaccatccctataatacaccacga

SEQ ID NO: 202516 - DNA, 633 bp, Zea Mays
ttgagatgcgagtgacacggcggcggaaatgactgatgcggtggccgccggtgaatcactccggccgagctcgggagatagcgccacgtatgagtcaccctttttccggcgttatccacccaataccgtgcacgaatccgggcggcgatcaacgtcggcgagctgagctggcgttctgatctgctcagttacagttccatggcgattgttcttcagtcgccagaaccgaccatcttctcccatcttgatctccggattcttactagaaacagagcaatatcctttactaagatttgttcaccatgtatcagcctacaaactagctataggattcatgggctaaaaccgaatggattcaaaaatatggcgcctcaaacttggcctcaccacactgggaccatttctaacctagggttcagtttcagttttctaatccagttctgacagagcgactttgagtagatttttctccaatttttgtataacaacagcaggagatgtctgcatcaaagtttctcatgtatagtagccctacaactttgttagagcaaccctaggtaagttctcactggatcttagtggaaatagctctcaaacttggatcaaagtcactgtcaacttaaagttcagact

SEQ ID NO: 202517 - DNA, 1387 bp, Zea Mays
gtacttgcgaggcaacgggaaggaggtagaagagggagagtaaagtagcgcgccgcagccgcagcggaggaaaggcaagggcggcgagggaacacgcggttgcttgcggaaacccgctcgactcggtctctccgcccgcgagttgggttgatcggagggtttgatgacgggggcgcgggagccggtggccatggagataccagcggaggaagggccagcggcggcgagggcgccgccgcggcggattaggaggaggctggtggagggggcgcgcggcggtggggcgccggcgagcgtggaggagatcgaggccaggcttagggaggccgagctccggaggcaggtacgtgtccctttcgtcctgtttccttcttcccgccgcgtgctagtttggtttacgttgcttcttgcttgctcgtagttgccagttgggttgcttcggcgtgaactgtgaagtcgaaataattcgtagcggtcacgataattacttgatcgctttttactggtgcggtgaggcgaggccagggtagttgttctccgcccgtttctgaagctgttctttttttttttctggatttctcctgcgatttcattggccattaattccaaattggagttccttttggcgagacaaaacctgttttactcttttcatgtgcgaatttgttggcaagtaagggtgtaggaacgaggaattgggaggtgcagactgcagagtgtgtggattgtggaaggtttgggaaaattggatgagcaccgttaaaggatctctggtttagaaaatactactgaaagatttagttgtagaaaactagcacctgaaggttgctccgttgtttcgttttaccatccacgttgacttgtccggaaaaaaattggttggagcaacacaagcaccgaccgcgtggattggcttagaagtaacttgacacacatgtacctctgcaaaatttggtgaccaaaaacatggttggagctttttgttgcttaatgtgaattgtgatttgctagtcgatgttttgttaaatttgctctaaaccgtttaatgaggagtctcttgatgggtctctaggggcctaagttaaaaaaattaagcccgtctcttcacggactttcgtagtctttcgtagtccgatggttcttgtcgtagtccaatggttcttgagagttgtcgtgtttactgtttgtttgattcattttgggagtaaagtgtcataggaaacaactattggagtcgaattggactgattgcagtataggataacttgttgacttttcgaatgttgtttttcagcaattccgtgaatggttggcctgcaaagcaaggaagaagccacggagcccgtcgtggtcctctcaagaagaagaccatgggcagcgccttgaa

SEQ ID NO: 202518 - DNA, 282 bp, Zea Mays
tctttgtaggttgtgctttcaatttgcttttgaagttgaatggaccaccattctgatcatttccaataaatctcgggctgtacaatttataagcaattagcacaaacttattttgatcatttcttcgtgaaaaagacagctcctataactaggtgaataaaagctgaatgcttgggcagaggggaggggtcaccaataggggtggactagaactgttttcccagcctttttgcaaccaggattctttaatctcagtcttgttgatttaccaagtattgttat

SEQ ID NO: 202519 - DNA, 352 bp, Zea Mays
tgatctgtggcaactatatgcttgtaatgaacttgtgtgatgaataaaataacgtgtttgaaaaaatatggcatgtgcatagtagtaatcctttccccctggcagatggctttggataaaaccacgcctaccgcctcagggattggagcaaggtctcccctaggtgctgaaggagaagttggtggagaagggagtgaaacccacctccctgcacctccggagctgccattagacatagccgaagttctggccaaccaaacccgactcattgaggtcctcaccagaagccttgagaaccagcgcccgaatggtggaaggcctcaggacagaatgggagattttctaaggctca

SEQ ID NO: 202520 - DNA, 277 bp, Zea Mays
tcactgcgattgtcgtgccgtcgtggccacgtcctcacatggactcgtgcctgcattggctacaaatgtggtcgcccctgctatcgtcgcgccccccttaagcgcctacataaggatccaccacaagcaaccgcgatgaccacgccatactctgccgttggagacgacgcagctaccgcatagctactcaccccctaccaccaacatgtacccgattggagccacatatccttgcctggtcgttgggggagtcgttcggatccgtttctcggccaac

SEQ ID NO: 202521 - DNA, 309 bp, Zea Mays
agctcacccacctcaacctctcctacaccgacttcgtaggcaagataccgcacgggatgcggcggctcagcaagctggtgtctctggacttcaccaactggatctacctcgttgagggcgacaacgactacttcctgccgctcggggatgggaggtggcctatcgtagagccagacatcggagcgctcgtcgccaacctcagcaacctcaaggagcttcacctcggcaacgtcgacttgtctggcaacggggcagcgtggtgcagtgccttcgctaactccactccccagctccaggttctcagcctac

SEQ ID NO: 202522 - DNA, 597 bp, Zea Mays
acttgcaatcgattgtttcttaagttgttcccatgtggttatcgatctggacaaagggatgagtactaggtttgagctatgccttttgttgacggagggatgagtaccaggtttgagctatgccttttgcggccataatatgatttggctaacattgttgtgtttctgccgaattatgcaatggttgcttcgtaactcatgaggaattgctttgatttcgactgcccatcattcagaggaagcatggacagtttatatgcagcttgccatggggctacctgcaaatcccttgagaacgaagatgcactatcatagatgaaattacatttttacctttccctatttcatagtcaccctttgcaattaagggagtacaataatgtcattttactgcgtagacgtgtcgcacacatcttctcttcgtagaagcttcttatgtctcctctccttcgaagtcctctttatcgacgacaaagctttgctttcaatgccttcggcttcatgcacctttggctcattcagatctaccgaagctttttcaaggagagcggtgatcttcctttggccttcattagctttctggacctgaaaaaccat

SEQ ID NO: 202523 - DNA, 380 bp, Zea Mays
gaatgggctgatacaacagttcgtgacacccaacttggaaagagaaaaacaaaacctggtccttctgaacgtaaaggaaaaaggatcaaattcgctaatgaaagtgaagagaaaaaagaggttgggaccgaagaaagcataactaaccctagttaaggtgatagtggagacgattatgatgatggccatggggatggtggaggtgatgctacaacacatggttttgagggtagttgtcggtgtttcgaaccttgctccgacaagtaaacttattatgcatgttttgggcttcgaacggtatgtgtggtgggcgcaagatttatactggtttgggcaaaatgtccctactttcaatcattgacggcttgcactaccgacac

SEQ ID NO: 202524 - DNA, 390 bp, Zea Mays
caaaattgtttatgaaggttgcgcataatgtgactttagggtcttgaacaacccaccacaatctaacgagtacaagctctagcatctggtgtcaacgtgtgtgcggccatcagggctacaacagtatagcaagccttcgtaataagcgcaacaggcacaattatgactctatgattggggtacacgataagtccacgcaacgtgcgcaacaggcgcaattgtggctccatgatcacggcagacagatagtgcctacagggcatgcgaaaaatatgcgactcagcgatggcagtctgactcaacgggagcgatccgattaatggagagcgcgacatagcaatcacatgatgcaaccaagttcgaacggcacaaatattgcgtcgtgttgcc

SEQ ID NO: 202525 - DNA, 318 bp, Zea Mays
cacccacccactaggaacagaactgtaataacatttgtgcatgttacagcacatagaacgatcctaacacaacaactaaaaaaggtctgtcgtagcctccagaagttgcaaatccttggcccctgctgcactcaggcgtggaggcttgccatcaggggcaagagctactagacccattcggttaagaaaaaagaaccagaattgacgcgaaaagacataggagacaagaacgtgatctagcgtttcacgttcttggtcacacaacacacaagcttcagtgtgtggcagattcctcctttcaaatcgatcagatgtgag

SEQ ID NO: 202526 - DNA, 373 bp, Zea Mays
ggacggtggtatcagcaagcgaaaggtatgaaaccatcattatcctctttattatacataatctagattctagagtaccaggttggcaggttcgcacacaagatccttttgtgaaagttgtggatgattcttattatgatgcaattttcgtatgctgaacacaaaaccattccaattggatctgattctatgctatgaaagtttggaaggcacatatggctttagaagattataagccttcgattcattggagttatcattctgcatttctatgttctaactagtcaacacatcttctggatcaggatgctacaaagggatacttgaagctgctcgttgtgactgcagcagaagatggtagtgctgggggcac

SEQ ID NO: 202527 - DNA, 375 bp, Zea Mays
tccaaatatgcccatttcattgccctgggacatccttatactgcagcctcagtggcacgagccttctttgataacatagtccatcttcatggatttccactttccttgtcagtgatcgtgatcccgtctttacaggcagcttctggcttatctcttcaaggtagctggggtcaaactccacatgcgcatgactttccacccccaaacagatggacaatccgaggttgtcaatagaactatagccatgtacctgcggtgcctaacaggagatcggccgcgggcatgggtcaactggttgccatgggaggaatattgctacaacattgcctttcactcagctctccgcactacaccattccaagtggtctatggaag

SEQ ID NO: 202528 - DNA, 387 bp, Zea Mays
gcataccctacttacttgtacactggtgttaccgactcgactcgggttaccaataggagaattcctgctgaggatctggtgagccgactagacatgtcttgagaggcaaagtatcaaatgttggtgctcctgttgcctactctgcttggaatctgccaccttctaagtcctttttcaatttcgtgtccaatcctcctgctggtgatagtggtctgggtcttagagtgcgaccctctcctgaagatattgaggtcttggttgcttctctttgtgatcttccgaatgatgagaggcaagttcattttgagatgccaacgagtccagatgatgcagaaataaatgttgtactcgatatgttggctggagaatcttctgactcggcccctg

SEQ ID NO: 202529 - DNA, 876 bp, Zea Mays
tcccgaagtacccgattcagaggatttgccacggtaggggtggtggcgctggtgttgagacttgcccctcttgtgggctggacccccagtgttgcccctcctcgcgtcctggccacgaggctgatcaacacccgaagacttctgtgactccatggtgtactggtgttgcatctccacacccaatgcctgctccactgtagtatgaaaatccaccaacggaaaggcacccagagtatgcctgatagaacgtttcaggccctgacagaactggctcgccttctccatctcattgtaagccacatgaggaacaaagcagaccatcttgttgaagcccacttcatactcggtgatggacttcttctcttgcttgaaagactgcaaatcaatcttcattttctccagaaaagtgaccgggtagaacctcctctcaaactgcctgatgaaaacatcccaggacaggactcctggtgaagaggagtgagctgcctgcacgcctctccaccaaatttgagcctctcccttcagcagttgtgtgccaaagcgaacacgatcaccatacacaatctcaaagacgtccatcttatcctccacataagtcagccaatccgccgcctcgaccggagtaccactgccatcaaaggtgtccagcttcatgcccatccactgcatcagagaaagaccactaacgggaaggggcgcctcagccccgccacccggagcagcacccgcagggacagcgcccccgggcactcctccacctccagcaccctgagcagcacccgcaggggcaacaggaatagcttgcctcagaatggccaactcctgctgcatggcctgcattgcggctaacattgccgccggactcatagaatcccc

SEQ ID NO: 202530 - DNA, 991 bp, Zea Mays
ttcatagaccttattcttccatttttcagcaagaaagatttgaactccggtaagccttttattgattagcctgcatatcaaattattgttcttttttttttctttgcaaatgcccaaccttgacatggtatggcctttttgtctcatcttttatatcacagacgattgtttggaagcactatgtgttgtgaggggaataattcaaaatctgagatgcaaagtatctgaaaaagttctaaatgcactgaacccattacttgcaattgttggattggaactgcgactatgtatctgtgatatttatgctgggttgtcattgaatgatccttcgatgttgtttctggtaattatcactctatttgtgatgtcaattatgtaaacttcgccatgttgcctgttcctgtttcacagtttcttgtggcaatttgcatttttaacaggctgggttaataggagatctgaatgcagtttcagcttcagaacttggtgaactagattatgacacaagacttaacacctatgataaggttaggccacaattgtttcttggcttgacagaagagcatgtgggcgccatattatctcattgtgtgtatgatatgtcatctgaagaattaattttgcggcaaagtgcatctagggctctgcagtcgttcctggacttttccgcctcagttatgaataatgatgtgtccaaatactctattgatgataaatttagagagaataataccagaagcatttgcacgatgggctgtattcagaagatattggaaaaaacttatctgcacaatatgggagtagcaatgactaaagatgtatcaattcaaaaggtgcgcatatatatattttttattttgtagtctatcaaactgttggttgaagggctgcaattgatgttgtattcaggaatggattattttacttagggagatggtctccaattttaatcatttagcatccttaagctcatttaggcctctctgtaagg

SEQ ID NO: 202531 - DNA, 309 bp, Zea Mays
ggcggccgccggtgagtaactccggctaggcctgggagatggcgccacgtacgggttatccctccccgacgttatccacaccataccgcccacaaatcaggacagcggtggcactaattttggcgcagagaggtcgccgacggtgagcaagccgcgttggcaacctgataaacccgagagcactgtaccatgggatacttcttcagtgtgcctgacagtcacagtttaggaccaaattcctctcaatttcctatggcaacatacctgaggttctgcagcaaagttgtagtcctatagatcctctttatc

SEQ ID NO: 202532 - DNA, 550 bp, Zea Mays
gtgtgcggaaaggcgcacgcgacaaagcacgaacggacggtgacggcgcgcaccgaccgcgcacgcgaacgacaacgacacgagcgaacgacgcgaacgcgcgcacgtgcaaggggaggggggtagacatgggtagacgatgatggggtagacgttcttatctcaggacgacgacgcgacattgagaatgacacaatggcgaggctatccatacacaaaaaaaaagcgtagatgacattgcatagggtgtagaggagggggggtagacaaacacatgcgagggtagacaaccatcgtcttcgacgatgggctacgcgcaagcgaacgcgagtgcgtgctacaagaatgtggttttggggttgtcatccacgtgcggttctgctaatcgcgtcgtgcggggagccatgcacagggtagacgcgtgatgtccgtcatgacgagcgaggacatggcgcccacctcgcagtggctggtcggggtttgtgcaggggctatccgagggtgggacgaggttgctgctgtgcggtaagccgaccgcgagggtcgctgg

SEQ ID NO: 202533 - DNA, 433 bp, Zea Mays
tcttttagtttctatggaaacaattttaggacatattagcccctgaagtacctaaaagcacatatgggtatccagctgttgattgcttttcatcatattgtgtttgctgtaaaagtgcaaatataacacatatgcacaatggtgctatatgggtgaatgtcattactgcagtcaaggtgtttattttctcatagtgttgcttatttattaggtgtttattttctcatagtgttgcttatttattaggtcattcaacctgaaatgtgtcatatgccatcacaacattgatttactccatgatacatatggagtgctggaggagatagtgcctattaattgatgttaatttgattcccatgctattgttttagtaatcactaatttccctaccttgtttcttgattgctaggctctctgtagtttactaagtgac

SEQ ID NO: 202534 - DNA, 579 bp, Zea Mays
tggtagcctttgttgctgttgcatctccacagcaccactctgttgattcactaactgattttgctgtaaatttgactgatggcccattaattgttgtggctgctgttgcaaaggaatgttgggctgttgagttggttgagtttgctgcagagaagactgctggtgcatggactgtggatgttgctgctgccttaccacagacggtgtaggctgctggagtaacgattgcacaggttgttgtaccgaattcagtgcattctgttgaataccactctgtgtagctgactgcatcgccatggattgagtttgtggaatggcaatctgcccaggctgaaggccagatgacatttgcaccatgggctgctgtgaagattgcatctgtgttgactgcaacaaagtttgctgctgctgaatgtgtggttgcatacgtgaattctgctgcaatttctggttcatcaacaatttctgctgttgatacataaactgattatgtgcttgctgttgttgttgctgctgctgcctacctgccatttgtctttgtgcagcatacatatcttgtggagtaccttgtgctaaacc

SEQ ID NO: 202535 - DNA, 308 bp, Zea Mays
ggttcactgtatctgtgtgaacaggtgaaacgtgaagagctgcttgagtatgcccaaagtatcatttcaggactgaagagaaatgctgacattgtgaggtgatagaatagaacctgctaattacctgttaatatattatattgagaagttgcagcttcttctggtaggttaattacaaatatttttttgcagtacttgccttgattttcttggaaactaatcacaaaaaaggaacaaactgtacaaactaaacaataaccatacctgaaggcctctaccaaatctctgaaatatcaaatattgtggac

SEQ ID NO: 202536 - DNA, 435 bp, Zea Mays
tgggaggtgtcttaattgttttgcccaagaccatagagtggcggtgtgcaccaaccgaacaagatgctggcgctgctttggagatgagcatagagctcctctctgccccaagcttaaaaggacatcctctcctctcaattcttcatgctccttttagccaaggccagtacctccccacccacggccgtcaagcaagctcaaccccacctcctaccttcgtgcgctcacggggtggtcgccgcccatggcttaccctggggacccgagggcacgtccagatctggagacctgtgcagtttcagcatccggcgacatcaagcatagtcgcgactccctggtggggcgggcagggtgtgtcagcttaatggcaatagccatggcacctctccgctccatgtggaggcgactctctgggatcagttaggcattcacaag

SEQ ID NO: 202537 - DNA, 395 bp, Zea Mays
ggaggtcaccatcgcgagaattgagcaagcgcagcaagaaccacaggtgttttgtagcctcagaaacaaatcagacaatgaatattttgagaacttgggatgccctggtcgtcttgagctgccaatattatacgactatgttggctagagtgaccaatcatgtttatatgatcatacaaatgaccctgcctttttatactacgcacaacatagctgctgatagacgtagctcctcctgaactgtgcctggaaagaattagatatatggtattaatattatgtgctagttctttttactctgcaaagaacttgtaggagacttttgtggaggtaacatgtatgcatgatttgtctttatttatgcaatcttattacatactaagagtccactgtca

SEQ ID NO: 202538 - DNA, 302 bp, Zea Mays
gtatgataaggttgactgccttcgcgcatctgggtgtgttcgtaaggtgttgcgcacccggtctggtacattattgtgtcggtccggctgcgcctgtagactttcggactgatgcaatgcgtcttcgatttttacgctcgttatgctagttcggcggcacccttaggcgacttttgcacgggtagtctttttgagaagacttcgaatttacgcacttgttgtgctaatccggctgcacccttgggcgacttttgcgtggataatctttttgagaagacttcgaatttacgcacttgttgtgc

SEQ ID NO: 202539 - DNA, 463 bp, Zea Mays
cgagggcttagctctgcagcttcgggaacctccttcgatgatggcgtggaattgtggaacggatgttggaattgttagatgtgttgagtggcaaacgtcggtggcaaaagaggtcatgcagtcgacggggtgatcaggtcagcacggcagggtggggtccatcaatgcggtgtccgccgcccccggagagaggggaaagtgcacgagacgacaaacactgaagccacggtcaaggatacggaccacacatccccatgcgaaatgccacttttgccctctggagttctgcctttctcagagcccaccccacccccatggcctcactcgagtattctgcacgaaaaagttaaaaaacaaactgcaccacggcaaagttcaagctcttttcaaccatagctccggcccttgtcacgatcatgatggagatcttaatagcagtatttcacgttctgtttggttttag

SEQ ID NO: 202540 - DNA, 475 bp, Zea Mays
tgatgataaagtaatgttacctaatacatcgttaatatagctctacgaagctaacacaaaagaaataagtcgaaacggatttacaacacaaatatattggatatttaatggttcgcggaatctaaacgatgtggcacgcaacagcgcgcgcaaaccgcacgtgaacagtaacaatgacacatgcggatagcacaagcagtccgtgcgacaactcgcgggcagtgcacgggcaacagcgcaagacgcgaactcgcaaacgctacaaagatgcgacgacgtgcgcgaacaacacgacaagcgggaaatcattaacagatatcgtgcttagaatgaacacatattaaacaaatataaacatttaatttggcttaaatcatgttaacgtccatttacacgtgcgcaaattaaaactatacattagttttaattagatctctactttaacatccatcagataaacaaacaaacaattaat

SEQ ID NO: 202541 - DNA, 405 bp, Zea Mays
tgctccttcaggcctccctagccccgtcatattgggttgaaagccttcaaaccgacacataccacatcaatcggctagccaccaaaacatcggcatttggcaccccaccaccattttgtccattttggtacacatctgtcctaacaccaccactgggtttcggctgcacatgttactccaacatgtttgccaccacgcctcacaagctagcttacagatcgagtttttgcgtcttccttggccactccagtaaccatcataatctggacctctcgtccaacaggatcatcacttgccaccaagtggtctttgacgagacttgctttccccttgttggctctccagcatcatgcactgaccaagacttctcgtctgagttcgaggtttcaatctttctgattgatc

SEQ ID NO: 202542 - DNA, 347 bp, Zea Mays
ttcctggtttcataccggggcattgaagctaacccggagaaaatcaaggctattgaggtaatgaggcctcccgcccgtattaaggacatacagaagcttacagggtcactggcagcccttagccgcttcattttaaggttgggtgagagggtgctgcccttcttcaagctcctgtggaaatcaggcccatttgcctggaccgaaaaggcggaacaagccttcaaagaattgaagcagcacctagcttccctgccgatcctggttgctctggagccaggggaaccgctatacttgtacattgcggcagctgcagaagcaataagcatggtgttagtcaccgaaagggt

SEQ ID NO: 202543 - DNA, 394 bp, Zea Mays
gctggaggctggccctggtttcgttccctctcgtcctgctgctcataatcccgggactcatctacggcaagtacctcctctacctgtcccgccggtcgcgccacgagtacgccaaggcgaactccctggtcgaccaggctctgggctccatcaagaccgtctactccttcacggccgagaagaggatcatccagaggtacacggcgatcctcgacaagacgatcaagctggggatcaagcagggcatcgccaagggtctcgctgtggggttcaccggcctttctttcgccatttgggccttccttgcgtggtatggtgggaggctggtggtgttccatcatgtgaccggtggaaggatatatgctgctgggatttccttcgtcttgggtggcct

SEQ ID NO: 202544 - DNA, 630 bp, Zea Mays
ttcctgcgccgccagctgcctgacgtggtcgcgtccatgctgcagattgccgaggccccaggactagaggatggcacccgccaccttgccgttgagtttgtcgtcacccttgccgaggcacgggagcgtgcacccggaatgatgcggaagctgcctcggtacgttggtcggctatttgcggtgctcatgagtatgctgctcgatgtccaggatgaaccggcatggcatgccgcagtgtcagaggaggaagacgccggagagacgggaagctatgtttttgcacaggagtgtctggaccggctgtcaattgctgttggtggtaatacgattctgtccgtggcagctgagttgctcccatcgtttttctcctctgaagattggaagagacgccacgcggcactagtgaccatagctcagattgcagagggctctgctaagatgatgattaagaatctggagcaggttgttgggatggtgctgaattctttccaggaccctcacccacgggtgaggtgggcagcaattaatgcaatagggcagctttcaacggacctggggccagagttgcaaaatcagttgcaccatgttgtgctaccttcattagcttcagcaatggatgatgtccagaac

SEQ ID NO: 202545 - DNA, 329 bp, Zea Mays
gtcctgtcaatatggcggatgaggaatttcagggaggttacaaccataacatgggtggattacctaaactgaatttccccaattttgatggatcctgtcccaaactttggcagaaacgttgcgaagattactttgatatgtatgcaacagaagcgattgtttgggttaaagttgccacgatacacttccaaggtgtcatggctcgttggcttcaatccatcgagccgtgcctcccacacatggcatggcaccaattttgtcaagccatacacgacagatttggtcgggagcagcacgagctagtcattataaaacttttccatatccgc

SEQ ID NO: 202546 - DNA, 424 bp, Zea Mays
aatatgtttccttgaatcctatgcctagacagagaagatcgttcccttacgcccaacaatatatgtcctttctaaatttcattcacgagtacaaatatctatatatgcatgctgcaaaaagtacattgctccactggaggcaagtatatatctacaagggcatgaactcctcgtcgatgaccttgtagtgcttcttggcgtcgtactgctgcacgatgaggacggaggcggtggtggagaagtcggaggaggcgaggatgtcgccgacggggccgagctccaggcactcggcccactcatccagcccctccgtcagcacggagctgcggtccctgccgcgccccacgatgaagagccggtagtccgcctgcatgccccggagcaccgccaccagctcggccccgtccgccacgtgcttctccag

SEQ ID NO: 202547 - DNA, 502 bp, Zea Mays
cagctccacaggaaacactccaggtgtctccgataccaattgttagcaatagcagtggacaagcatcctcgcatggaggggggaatgttagcagcgcgagcaacagctccacaggaaacactccagcagaatcaaggaccagccggcgtccgcacaagcccaatcccaaattcgtgggccgcgactgggtcgcctgatgggccgaccttgtaataggagtattagagtgagagagggtaacagaggagagcagagaagaatctacgctgtcactattgttcttcttcctctccaagctatctgctcctcccccaaactctgtttctcggattgttcgctgcttgtccactgctattgctaacaggcggcgagaaggaatctgtggcagtttgctgccgcgcatccactagattccggcgcacgtatgcggataggggtcgagggcgcgcaccccaggatgcggcccccgacctttgggggggggggtgcttgagatgcccag

SEQ ID NO: 202548 - DNA, 997 bp, Zea Mays
tgtgtgtgagagagagaggaggctccctgccctctcgcggtgacttggcgaggagggggagggactgggaaagcgaatggttttcgggaaggcgctgtgatttggcctggaaaggaggaacctttccttcctcttcccgtcctttgccggctcttgtaccgccctcagatcggcgacccggttgtttcttcggcaacgggcggaaatgaggctctcgtcgtcgtccggcagcgtcctgccggctcagccgggctcgccggaaggtactcctttgcctgctctgctgcgccgacttcgatttctctcgctgttgtcttgttcattaatgcacttccttccccgttcgttgtattcctcttccgtattgagtttcagttggagttgtaggactgctatttggtttctgttttgttactaaatgcctctgctttaaacctgctctgtggccgggtgatcccgtagcagcgacccagcgccgacgtgtttgatttgcgaggtttatctggatttgttttgatggtttcttttgaaggtgttgctgtcacaaactggaaaccgtttgttctttcgattttggtccttttgtctactagttcttgctgcatgttgatttcatgatatttctccgactgttttttttttcgattaagctgtaaaaatagttcccttgtccctccagtttaaggacacttattataagttaacaccccatcttgattctcaattttttgcacttagaattggaatttatgtagtaccatctactttctgaaacatttttttttgttggcataagcctgtccccagttttgttctcccttgatatttcgttgctgaagaaacttgcagtactgaatcttgtgctcaaaacaaacaaatacttgtgccattacagctgtggaggagcacaagtgcctgaactcggagttgtggcatgcttgtgccggcccgcttgtttccttgcccgcggtgggtagccgagttgtgtacttccctc

SEQ ID NO: 202549 - DNA, 308 bp, Zea Mays
agtcggcaacgacttaagacggtgcaacatgctcgcgcttacttaactcggggtgaccactataccctgctaacggagcaatcggattaagtcggcaacgacttaagacggtgccacatgctcgcgcttgcttaactcggggtggccactgaaaagagcgatcggtttgagttaatactaacttaaactggcgcagcacactcggcgcgcatacagttactcatctaggggcggcctctatgtcccatgaagaagtctcaaaatcatcacacaacattttacttctgcaaatttagatactgctgaat

SEQ ID NO: 202550 - DNA, 437 bp, Zea Mays
taactgcactgtcttcgtgtttgggcagactggaaccggaaagacatataccatggagggagagatgagacagaaggtacccataatatctggacatcatctatgatgaagacaggaagttctttgtaactgttgaataatttgtcttacctaatatgtcaggttagtgaactaccggatactgccggtgtcattcctagagcagtgtgccatatctttgaaatacttacagcacggaaggctgattatagcatgaaggtaaccttcttagagctgtataatgaagatataacagacctattgtctttagaggaccaaagcagattccctgaaggtagacaaaaaaggcctataactcttatggaagatggcaaaggcggtgcggtaataagaggtcttgaagagattgttgtctatagtcctagcgacatatacag

SEQ ID NO: 202551 - DNA, 361 bp, Zea Mays
ggacagtctggtgtgcaccggacactgcactgtgcactatccggtgcaccggctgggcctcacgtgattctaccactatgcggccctgtatgatgtgtatcggacagtgactgtgcgctgtccggtgtgcaccggacaacaattgttcactgtctggtgtgccataaccagtttttaaaaacttttcctctcccgagacaaagccctggctcttcatttccagcgccagcccgagcagctctctccctcaaaccgccgccaccttccctcgccggcggccactgctgtcagcccatctccggcgagctgctccagcttctgttcccacgctcctcttccctctagtgagattcaccctctc

SEQ ID NO: 202552 - DNA, 437 bp, Zea Mays
gtggttggataccaaaagaattcagctccattccagatgtaacgtatgttccaagtcttacttcacttttgtatggaaattgtcaatgctgggttttaatggctttctgtaaatgcaatcgcagacttgaaggaaactcatttgccaatggacctgctcccccgccgccaccttttatgccaccaccccctcaaaggccacggaatcgtcctaagcatcctcaggggccaggagatgctcctaaaggttcagaaagccacactgttcaaagtaacaagaagcaaggccttgggacaggtccgcttgtgggcataattgctggatcaatagttgctgttttatgtgtgtttctgcttctgttatgctgcatgtgcaatgctcagaaaagaactgatgatgccagcagtgaatcaaaagattttggaggacctctaaca

SEQ ID NO: 202553 - DNA, 569 bp, Zea Mays
atgagactaagcttttgcttgaccttggaaatttagttcttcggacagaggttgtgtcttctatttgcatgtaaagtttttatgccttaagtgtttgatttgtatgctactaacgtcacttgttgcttcaggaaatatgggatgcctatacttcagaagagcaggatatatatctaaactttaatttggtgcttagtgatgtctctgcatttctggtggatggtgattaccattggaatgaaacatctgatgaaaagaacttgttgccagtaattgacaaatgtgggattgctttgaaacttcagcaggtaaacaatactcaatccacaccttttttttgggctgtctattaaatgtaatcatcatgacagggttgctgttccgtttttggacagatccagttagaaagtcctctatatccttccacaagaatggcgatacgggtgccttccctaggatttcatttctctcctgcacgctatcatcgtttaatggaaattttaaaattttttcaagatggtgctagtgataatagcaattcagatcatgaacacttgtgggatcatgct

SEQ ID NO: 202554 - DNA, 479 bp, Zea Mays
gcttacttctatggctgattcaaatggacaaatctctgctgccgtgatggaacgtcttacagcagcaacagcagctgaaccttatgattctgtcaagcatgcatttgtgtcttatgggagctgcataactgatcttggagaaagttggaagtaccgaagccgtttgtggtatggtgttggcattccacccaaatctgatatatttggtggtggtggaagtggttgggaatcttggagatctattctagagaaggattcaaatgggatttggattgaatttccacttgtgaagaaatcagttgctgtgctgcaggcacttcttttagatgaatctggacttggtggtggtcttggtattggagggggatctggccctggtatgggggttatgactgccctctatcagttgctagatagcgatcaaccatttctttgcatgctcagaatggttcttgtttcgatgagggaggacgacaatg

SEQ ID NO: 202555 - DNA, 460 bp, Zea Mays
gagagctaacacactcttaagctcagcttttctacaacaatgcatcagggcatcatatttagtatttgctggaattggctcttcatggtacaatttgaagagcaactgttgtgcttccatagcacgtgctgatttactaagcccattaataagcacactgtaagtcacaacatcaggaagaactcctgcctttaccattttatcgtgcagagaaagagccctctccacattaccctccttgcagtggccatcaataagagatgtgtatgtaaattcatcaggttgtaggccaagcttaatcatatttttgaagagcacatgagcgtcactgagtcgtttctcctcacaaagaacccttatgagtgatgagtaggtgattgcatctggaagaacacccttctcaagcatctgttggttcaattcgaatgcagaatgtgtatcacaattcttacagtacgca

SEQ ID NO: 202556 - DNA, 333 bp, Zea Mays
tctcttcgataccaacctatcatctgacagtgttcccgctcgcggactgggctcataagcgaatcgacagaatcagaagatccttcctttggaaatgggaagaaaacactaatggaggtcactgtttagtgaattggacaacgatcacaagaccaaaggacttgtgcgggttagggattccggagcttgataaatttggtagagtgttacgccttcgttggttgtggaaggaatgggtggatgataccaaaccatgggttggcatggataccccgacagacaacactgatcgagcacttttcactgcctcaacaaaggttgtcattggagatg

SEQ ID NO: 202557 - DNA, 342 bp, Zea Mays
gagtgatggacaagcccattaatccatcaacttctccgctttgcttaacatccagaagctgcaaacctgcagttccctctaaaccaagggaccaagtattctctgcacactttccttgcagagatgaaaattccccaataggctttgcactgatattggagggtgcatcttcttctgacatgccagattgtatcctcaaaccctcaatggacagggcttcaatcttttccatagctaatggtgcaaggtcctcaagtgaaacatattccgaagcattctccccacccaaggatgaaagatcagcacacctacctgtcttcttaccagagggagcatttccac

SEQ ID NO: 202558 - DNA, 322 bp, Zea Mays
tgctgtctctggctgtgggcctggtccaagacgctgggagaagcggcaaaagttgccgtggaccagggcaagtttccaacaccatcatcaggccaacaggcgagaagagcagcgacagaagccttcgcataaaagtcaagcaacacggacggcagaagcaaagcgcgcgtttgcttgttccatgttccattccatcgacgacgacgagacgaccgaccgcgtgcctgcatggccggcgccagggcaaaggccgcggtctggctgtcacgatcacgatcaatcgaacgacacattttttctttcttatgcttgtatagtggca

SEQ ID NO: 202559 - DNA, 366 bp, Zea Mays
ttgaattgaagcggcaattggacgatctacttgctaagggtttcattaggcctagcaggtcaccatgggcttttccggtattatttgttgagaagaagaataaaagcaagaggttatgtgtggattatcatgctttaaatcaagtgacaatcaagaataaatacctgctacctcgtattgacgttctctttgaacagctgagaggtgcccatgtattctctaagattgatttgaactctagttatcatcagttgaggattcgcgaggaggatattgagaagacaacttttagcaccaggtatgggcacttcgagtttatcgtcatctcctttggcttaactaatgcccctgctgctattatggaag

SEQ ID NO: 202560 - DNA, 277 bp, Zea Mays
tcctttccttgatgtgaaatatacctttatcgaatttctgcttttggatgatctgatcttctagggagcaacgaacctgaatgttgagtagcactgctgggtgtaacaagttaaatccatcctctaggagtggttgaagactatggcaatgtgactttcgactcaaagcatcagccacaacattagcctttcccggatgataatgcacttgtaaattgtagtccttgatcagctcgagccatctgcgttgcctcatgttaagctcgggttaggtgaa

SEQ ID NO: 202561 - DNA, 314 bp, Zea Mays
actactaagtaaccaacgtcattaaagtagtataacatgtaatgacgattaaactatctcctcatgtgtgttctctttggtgtgtgcttgcatgagaatattgtgaatgattgtaaaaccccgattaaatgaatatccctttctatctaagtctgtccaaatatataagtcatagaaaacttatgtgtatttaactagtataataataaaagaactaatgaaaaattagagcaaatgtgataaatgcttgcacgtgtgatgtcgtgttgcgctggttaattctagaaggtaattgtcgtctttgtaatggtatt

SEQ ID NO: 202562 - DNA, 469 bp, Zea Mays
ctagttcaaaccatattatttcatatcgggtcatattttaggctcttattttcgagtcatgctcgtgctagatcgaaaagtctttcccatgttcccagcactggctacgacagctgacgttcccgttgggcagcagaactgcagtgcacgcaccaacccaatccaccccccctcggcccacggcggcaccactacaccagtcagtcaccagaccactctgccgtcgccgcctacctcggcaacagtcaggacttaggacgcaactcatccccgccgcgagcaacgccaatgctccgaccgctacacgctacagccgccgccaccgctagctaggcccagccgcctcctcccttcccctccacgacgatggacccgaccacgcccgtccttgcgctctccaaggccttcgcctcctcccgcaccaagcccttcctcctcctcgccccgcaccgccgccgctccctcttcg

SEQ ID NO: 202563 - DNA, 1697 bp, Zea Mays
ttctggaccgaaatactgttggaatgagctcataacattaagtaccaaatacagggacctaacatccctctcgcagcttgcatttacggtatatttcttggatttgtacaatgtacaccacacatcagttgtttttttccctcaaactatgcatgagagctgtatgtcatttcattaaaaataaaaaggttacaagagctaggtgaaaacatccctgcagagtagttcttaacgaaagaaattgtatctttgtgggtatcaaggttgatatttttttagcaggcatgtggaggggttccgtgtgagtatgatggttcaaaaagttgagcacatatgtttaatctgataaaaatatgtcattagatggttcatgctcaacatgttgtgtagctctttttatggtagaaagtttagcttctcatttaagtggaggcattgatttatttccacatgcaccctgaataaacaaataggatgttttttctatcaattttattggagatcaccttaatggtgaatcaaatttaatgacctgattataccttgatggtagtgataacacattatattagggaagtaactttgctatgcccaatgagtattgtggtttatgatgttaataaattcagttcataagatcattggtgtccagcatgatttatggagtgctcacctgtatggttttccttgtgttttagcttcctatgttttttaatctctgatgtaggtgtgggatgtctcatctggtgagaaccctgaggttgtcggtggagccaccatatttctttttaacagcaaaaggcagcttaaaacaggaagacagaagctgcggctgtggcccacaaaggaggcagatggaggagtccccaccacaactcctggcaaggtaacactcagatctacttttcttgaactcaggattcatctgttttagtcctctcccagctaatctctcacttcgtttttacttattacttcaaggtggacttaccttttttctatgtaacttataggttcctaggaatgagaggggtgagatagaacgtttggaaaggcttgttaacaagtatgagagagggcagatacaacatgttgattggcttgatcgtcttgccttcagtgctatggacaaagctatggaaaaagagtgtgagaggaaggccaatttgtaccctagtctggttgttgaattgtgcagtttcgaacatagaattgtcttccaggttaacattactgaccttgttatacatatatgttatggcactgagctatttttttcctataactcactatgcagctacatgattcttttacctgtaaaattgatctcgctttgttttggtgcacaaggtgatcattgtgtattaagaatggtcaatggtcttctgctactttcatacttggaggaattcacattttgatgttgttgagtcatataatatttatctgaacatgacttctcctgcttgcaagttatagaaagtgtaattttatcttcaccagagaaatgctgagtgttacttgtccatgcaggaatctggagcaaatttttatacaccggccccagtatcattatcaaatgaactggttactgtatgggaccctgaacttggaagaaccaatccatctgagcacaagcagttaaagcttgctaggagcttgactcgtgggatagttgatagagatctaaaaccaag

SEQ ID NO: 202564 - DNA, 276 bp, Zea Mays
gtcgatgaaggatctcactaactagaggcctctcgctcactgtgatagctctaggcctttgtataccctacgactatctatgtcccctccttcgcatccttcttccacttcaccatcgtcctcgccacaaccacacgctctgactacatccactacatccaatattagtatcgttgactcggtcatcctatcctcgccgtattgtccaagctgtgtagtagctcaatcatttcttgtactcggagcgcttctgagcatctttgtcatgcctgttag

SEQ ID NO: 202565 - DNA, 715 bp, Zea Mays
cccgtcagtcagccgcgtcatgcgcgaggcctccttctcctcttcagccgtcaagaccaccatcgagcagtcgctcgcgtcgccttctccgccgccctccgccgtctccaccccgaccgtcgccgcgactacgaccttggccccgtccccttctccgctctcacgactcggctcagccaacgcctacatgaaccctcgcctcgcagccgccgcaggcggtggcggggacgacgcgcgcaaggtgctcgacgtcatgctcaagccggcgcgccgcaacccggtgctcgtgggcgacgccgggccagacgcggtgctgaaggaggcggtacgcaggatcccgatggctggctctccttccctcgccggtgcgaaggtcttgccgctcgagagcgacctcgccaagctcgccggtgacaaagccgccttggcggcgaggatcggggacctgggcccggtgatccagaggctcctcgtggaccacggtgccgtggttcttgatcttggagatctcaagtggctggtggacgggccggcggcagcagcgtcagaggggggcaaggcggtggtgtcggagatggcgcggctgctgaggcagttcggaagcggcaaggtctgggccgtcggtacagccgcttgcgccacctacctccgatgcaaggtctaccacccaaccatggaggccgagtgggacctccaggcggtttctatcgcccgc

SEQ ID NO: 202566 - DNA, 2065 bp, Zea Mays
atccgaaaaccccgaaaggaggagggaaaagggtgagagaaaaccacgcagtcgcttgtccagacaaaacaagaacaagaacccaccagtacgcacttcctcctcctcctcctcctctctgcctctctctcctccctccctccgccagtccgctcccccctggcccatcagatccaattccttcccccgacccccgtcccggatccgccgcaattccttcctgcgtcgagctcgactgctccctctccctgcccgcaagaatcccgccgtggccggcggcttagtgggactcccaagtcgaagccaaggctggtggggggcgcgctcctgccgggcgtagcgggccatgggcgcgctgttgccgttcgtgcgtcgggtaaccagggccgtcaggctcagtccgctgcagcgcagcgccgaggatcggtgaggtgagattttttacttactccggtggcggtggttcccttctggcttctgctagcgttcttactagcagctcggtagttgtgaaaaaagacacagcttttctgcctttttcctcctcctcctcctcttcttctttgagccgtccaaggtcccgttttttttcctttttcttttctgctgtaattacttcatgtgtcaaatttgggttcgattgacggcacgaagctgatgattgcatctagccttcgcagcctttcggtttccgcgtttggtcggcttcttgggatttattattattattattatcaagtgcgttgaaccgtcgggtgctgacttgtcttctcccctccagttccttcctgtctcgcgagttgacatccgaacggcttcacaggaatatatttgagccttctgtcctgtttcttttgatcttctgtatgtttgcttcattatggaaaggggtcgtgtgtttccatgttgcgttttgtgtgtggtacgtacaacgcattgggccgtcttggttcctagatcttttaccttactcacttcagtgtctcaatcatttaacgggcaggtaatttctcgtgaacgcattccgctattgactgctcgccctgtcgagcagattgagctatccaatatccatttagctcgacacagtgaagaactgaagatacacattgggcttgcttgtgttccgtctctctcaaacatcctgttggtgtgctgtgaaggtctgaaggtcacataatccacttggctatatgccggggtgggtaatgtgagtcgggcttgataaatgcagacttgttaacttggtaattagtcaaatgaaactcaaattctttaatgacttcttttggccatttttagcctcagcttcatataatgtagctggacatttgtgcttccttccaaaagttccatatttctttgtttatttaaatcaacgtttttagatgggaatatatagctgaacatcttcaaactgtttacataatatatctgcattgttgttgtgctgatgccagtagaattaacacttaacaagtagtatctgttcattactgagttcatgttttagtgccctttgtaattggcaattgaattgcaattggagttaggcatgtgtaactgaaatgtgcaaactgccacaataaagttgtgacatccagctgacggaaagtttgtcttttcgtgcatatactctcagtaatcatcactaaatttatcaggacttaggagttggtgttctcttgtaagctgccaatttatttgtttcttatgtcaacctatgaataatgcacacttgtcttcttccacaattaggccattattgcagaatcttttctgtgatctattgtatttattattccattgagggtttgattcactggtctcttgcacagttttgcaacaagaatgggggcaaaagtagaacgggaaagttatatgcctggatattatgccacgggggatctcaatttggaaccaaatggtagatggtctccatactatgaggagatgacatcaaatgatcagttatgcaatggcttcacaacaaaaccaacaaatgactattcagaatttgacaaagaaatactcaagcatcaaatacttgaacatgaagctgtgt

SEQ ID NO: 202567 - DNA, 405 bp, Zea Mays
cggagactcgaccggattcaaaaccggttgagccgggacaaattctggttgaaccggttttctcaaaagatcggcaacgacttttctgacagctctgactgttagacaggtcagagtagggatggcagaggaacaatcccaaaaccggtttcaggcccggttgaaccggtttccagggctgaaaaacaacttttgaatattttgaagagaacaaaggtggagttcttgtgggaagtaaaaatggtttttctcaagggcattcatgatctggaaaaatgttctcaaagatgatttcaaaggattttgaacttagctcattgcataacttacttaaccattgtggatccctcttaattgcacggcgattcctataactcaagaattgtcaaatgagcactgtctttg

SEQ ID NO: 202568 - DNA, 301 bp, Zea Mays
gcgttcttatcggttttagccgcagggcagaggggaagtacgggggggtcaccggagtggcgtccagcgcacgggcggtgaagatctttctacccagagcgttatccccgagtccggtgcacgaatccgaacgccggcgacacaaatcgcggcggagggatccatcggcggtgaggacagccgcgctggcggtctgatccagtttagccactgtaccatggcgagtggcattcagacagcctgacagagcactttggagcttggttttctcttaatctctaatgacaacacaagtccaact

SEQ ID NO: 202569 - DNA, 509 bp, Zea Mays
aagagagaagagaaattgatcgctggctgtcgaacaggactgggcgggatccgttggccttcacgtggcaccaggcgcatagcagaaggtgtgcccaagcggctgagtgacctgggagggcgagatttctcgccggggttagaattccgccgtgcggtcgctgcgcggcgcgggcagctccaccaacgcatcgaccttgggtaagtgctcctccagctgactccctttaccccctggaacctgtaggaccttgcggtagtgtgtgagcgttgtgtgtctgccggccattgctcaccggagatcctttatccgtagaccgccgtaactcgagtattgccttgttctcctcaccgttgcgagcaatatgcacgtactgggtttcgcatgatccctcccatcgattaggaccgatagtagattggttgaagcaccaccctgaggtttggcctcgccgtcaatggcgtcaccgtggtgccaagcggcgccgccgcactcagcgccgggttggt

SEQ ID NO: 202570 - DNA, 331 bp, Zea Mays
acataggggtgctctttatctctctccaccatggcgccccttcctggtcccccttgtgttcttgctgggccgcaggttccaagtcgaccccgaagcagtggtgaaaccgggggatggtttttatattcctaaagccgagcttcacggtgggatgacgacgaatcgagcccggaaatctcggttcctggcatcagttagcgccagatgcgaagggggtttgagaggatagggatgaccctgacaagctgggcccacacgcaagacacccaggcgaggtgctgaggacagcgtcccagtacgcgcgccagcgccgtgaggccgcccacagggc

SEQ ID NO: 202571 - DNA, 367 bp, Zea Mays
ctctaagtcggactaatttaccaaagaaaatgacacaccttgacaacaatcataaaacaatataaaacgaattcccaaggcataggtgcaatcaacactaggatttgccatcattgaatttggatgcagctatacatcaagatcaatgtcttaaaacaacactcttttttatgaagaggtaatatgtactatgaacaacccttaccaacttcaacaattcattttaattcaattgtcaaacatccacacaagatgaatgtataagaagatcaaacacctcacatcaaagcaccacgaaacaagtagttccattgaaacaaaactcctaatcttcctaaaccttgttcttgacgtcatgaaaaagata

SEQ ID NO: 202572 - DNA, 1068 bp, Zea Mays
tgcaaccatgacattcggattcatgaagatttgggccatgtatgccgtgtgtgtggtatgattgtgagaagagctgattcaataattgattaccagtggaaaaaggtttgtaatttgtttaagatatatatgaggcttttccagctctgggtcatttcgcaataaagttttttatgcacgcaccgagttggggtgttttttttggcaaaatgcctggtagtttttttattcttcagttctacttcatgcaccttatagtttatgttttggacatctgtgctgttacatgatatgcactagttccatactcattcacatccacatactccttacagttttaacctttgaacactttgttagtttgttagcttatcttcttattctacttgatatgcacaagttctatactctgccttggtaatttcgttatcctcaccttgtatgcacatgtaaagcttgtgatatataaactattgagaatatcaaaacaattatcgttatcaatgccagctaatatcaaacagtagaaaattattgggacttaactctcgcaaatctgtattttttcgttgtttttaaaataaatgtttgcttgtaggttaactttgaaattagggcatttttctggaagcctgatattataggacgacatgtgtttttatttttctcccctgaataacttgctaactaagggtgtgtgttttgctgttatctccttgatttggttattactgtgtactatttagcaatcggggatattttaccctttgtctcttgtttgggtaatggttgttactgtgtaagatatagtggctgtccttttgtcgatgttatggctttactgtcaagatgtacatgagctatgccataatatataacattcttgtatgggctcaggagcaactgtttggcaacttcataaagtaacttcaattttatattataatcatgaagttcaaacttcaagcgtgtaaagtcttaatagtattggagaaagcgagtgattttcatgactactttttttcaggcttcaaggagaagaatgaatggctatggaggaaattcaaa

SEQ ID NO: 202573 - DNA, 311 bp, Zea Mays
tccactcagttcagtcgcaccatccggagcatccagtgtgacaacgggtgtgagttctacaacaatgtgtcccgtgacttcttcctctctcgtggcgtccacctccgcatgtcctgcctctacacgtcacctcagaacggccgagctgagcggatgattcgcacgacgaacgatgtagtgcgctctctccttttccaggcttcccttcccgtttcttactgggctgaggccctcggcactgccacctatctcctcaaccgtctccccaccaaggcggttgcccaccccaccccttacttcgctctcttcgg

SEQ ID NO: 202574 - DNA, 501 bp, Zea Mays
tcgcaggggagtgggtaagccagaagaagcggaggaagaatgtggacgcgtccttcttcggggatcacctccctcgcgggtggaagctgcagctcgggctcaagcgaaacagtggatccatctgggtgcgctgcttcagctacgtgaggtttgcctcttttgccctgccctgccattctttcttcataaacgattatatgctagtggtagtatctggaatggaactatgctgtgataccttacctgatgcgatgtatacttgttcagagatgctctggtagtgtgcctggtagggtatatccacactataagtggtggattgggtttaaggatacatgttgatagtgatacctctggcagtatatctgctttggaaatcatctggtgtggatgtttttgtttgagcgaatggatgcattttttagatgttaattaataatgtcattacatcactagggtgagatgtttgctaagtataacattgggttttctgggtttgca

SEQ ID NO: 202575 - DNA, 326 bp, Zea Mays
cgagtaccacctcgtcctccacgagatcctcccctgccaccatttcctctagggttgggacaattgtaactcaggtgtcccctttccccacaattatagcattctctatcctcaattgcaacgtatgctggcttcacatgattaccactactcatcactcgaagtctgctctcttcatctatcatggcaaacacagcctcatccatggcaggaagactctcctggtgacaaaaggccgctctcctgctctcaaactcagaatccagattctttagaaagtgggtcactctcctatcctctacccacttatgaaccatttgtgcatc

SEQ ID NO: 202576 - DNA, 306 bp, Zea Mays
ggggaagaagctagtggcaataaacgagtacgtacagtagtcgtagccaccaaacgggcattaaagctcgcatagaaaagggcgaagaagatgaggtgtagctgttactccgttaacgcccagcagtggaggaatggagcgggagggacgaagaagaacattagcaggtgcgggatatgcgcggtacagttacgccattaataagaagaggaggaccaggcatggcgaggcgacctcattgatgacagtgatggggaaacggacacagcttcactgtgtgctctgcagcggagcactctgcaactg

SEQ ID NO: 202577 - DNA, 373 bp, Zea Mays
aaaaatccatcggtgccactggtgttaagttgaagtttatttgcgcgaggaaagaaataatgtgtttaatacttagaactcttagtagaaattgtttcggatcaatacgcgttatgtgttcatgaattgggaagtaagcgcatgatggtttcgagttagagattagtggtttacggttcgtatgatttggtcgatgtgtgaatatacatgtgaatatgtatgtttataaaaatgttgcggtgtatgttgtgccttagatagtgataataataggcaagccgacgtgtatgttatttagcgggctatgtcgttgctctagttagctgaagtgttagatgggttggttaagctcgtaatcacgatgatttacttg

SEQ ID NO: 202578 - DNA, 4836 bp, Zea Mays
cgtctatacgcttgtttctcctccatattgtcgtatgaattatgcgatcacgaaagggaggggatactgggtagcaattggtgtggagaggaaaggttcaagttgattttaaccaaggcagcacgacggcagcgacgacgacatacaacaacacgacggtaggggtgatgatggcagcgccatcgggtggtggatgcagtggctgtcttgactgcctgcatgatattgtgcatgcactatcgatgggatcatgcctgacagtagagcagcggcctgccatggctacgggaggtgcgcacaaagggagagatgtaaaagagaggaaggaaaaggtggagggtaggataataggaaatggagtgggtaatttggcttgcatgttcacgcgacaggggaagaagggtaccaaccaggatgccatggttgtttgggaggtatgttcccatcgaccttgattatatttctttacattgctaaagggttcacctcttttacactctgttctttttaaatttctaatgtttattatcattcagatcgtctatctataagaatcaataagaaatacatgcatataataaggcatattgaactagaaaagaaagactaaaaatcaaattttgctgagctatccacccttttaatatctaaggtgacattatatattgaaacaattcagtttttgtacgtgatgtatcttggtggaaacaatcaatgacgtagagtattggccaccgatcttcattattcctaaaactgtgcatagcctcttgttcctcctctacccttggatgcacccctaacctattcttgtccattcagcatgctaccaccctcccttcttttggcctccctcaactatcaccttttgatgtgtttttcttcctccttgcacatccatagatcaaatagttaattttggatttctcattgcgttctcatggaatatttctttcatttttcttattttctaaaaatataatataatgcaccaatcaaaattataaaaaggacaattcaaaggatggtttagcgatggagcaagcaacatctccatcagggatggaggcagcagtagggcgggcgctcgagccccctcctgttcctgagaccatggagtcccactgaagtctccactaaaatttaaaatgtacacaatataatataaaaggggcttctatattgtagtgatttagtttaggctctcctaaactttctcttggctccgtctttgatctccatacagtttcaattaaaattagaggtttggatattacaaacaatatattgatttataaaaaaacatcttgtgatttgaccacctcaaaatagtatcactgcttattattaatgtagtaaacgaagattgtgctttgggagatgtatgcaataaaaatatttaaatatcgattcattattgactgcagtgagttgtatataaacatttgaagtcaaaacaactatgtttctttgttgatctacaaatatggtatatataaattagagcatgtttggcatggctctggctcttttaattatgctccggctctggcttctcttcaagagcaccttatctataggagctagtgttttttaacaaaatcgtttgataaaacagctcctcttgacacaagagaagggcaatatggagagtgggggaggagccgctaggagctagttttttttgctctggcttctctctataaaaacgactctggctcctcagtgctctttgttgagagctatttttagaccatttggaagggctcctacaggaactggagccggtttggaagccctctcaaacacgcccttagttgtcaaagttgtattttgtagattctgtgatgtccaaaacaaacttcctctgaccagatcaagtacattttgcctaagttttgacaatgaaactgttgagatttaaatagcagaacgtgacacgagaaaactgcggagagagtggcagaggggccctttctccctcaagccatcacaatgcgcaattgggtctaggagcaaggttttggtgtcgtgcacaaaaattccaccgtgcagcgcgttatccttcggtagtgtgtggtggtgatacaagtttgacgagttttgtgggtttgtttgttcctgccatttgcctgtctgcattggctaaaaaccttggcaagcataggttagatccaacaatggcgaccctttaggcaccactctcttcttggaagcattgccaaatttcccttgaaatatggggaaactctgccttcattgttaggtgcgctagggctacctgtgcgtaggtagctgatgcccgaagatgtggatcaagtagatgagagatgatgaggatggttggttccattggttgtatgttcttgtcatgtttgtgttggttgcttccggttggtcagtcaagatgttgtttggaggcttttcgatggttttcttcagtgatctttttgtttctaaggtctttgaacctatttaaccttataaacttagtcaattatcttctagctacgatgaatagtagatctgccccatttctgaagtttcatataaaaacataatggatatatgttctaggttcaacaattctatatagggggcattagtctagattttagaatcattataacgctgtatcccaaaagacaagtagaaccacatgctaaacacaataagaacatgtctcaaattattgaccaatcctaaacaataaagaccattcatgggatacaaaagtctgcatagctactgcattcgaattgtgggaatcatgcattaataggtacattgaataatcggtttgatgcaagtgtgtctagtgcgagagtaagtcatgtaaaagggtttttgtttagacatcccaaaagaaagttcattcttttaagccaatttatgcttcaaataacacccacaattgtcaatagattcacactaatagtttatcacatcgattcaggtgaatgggattttcccccatatttctaggtggtgtaaattgtaacacaatatgagcagtgtgtcgaataaacataacataatggtagtcaagaaagagacattgaatggattaattctaggtacaaaagcatcaatgtttactttcattataattcattagcactagattatgttccctttcattacaaatttggcttattttcacttccattttgacatgctcaaataaatgttgtgtcaaaacgtatttcataagaaaattaataaaacatatttaatgatgtagatgttgatgcatttttctaaaaattgggtcaaatttagcaagactcgtcctatctttagtagtgtaagaatatattaatcttcataggtatcttaaataaaaaatatgtgtagagttctagatcttgtcgaatactacaacatagttatagagcatttgtccatccatggttgtttgactatttttttttaaaatagcatttaaagttttgcatacttgaaacatataaatgggtctctagaccatctaaaaaaatagttgccaccttgcacaatttcaagataaagtttgtcttcatcctttttatttataaaaattataaattccatgctgcacctatttctaaggtggtccatattaccgtacctaaggtaattttaaatgcttgtttttctaggggtgcttggtaaaccaacccttggaatcactttccgttgagggtttgtctcaatatccatttatatgagcagctgaaattaaaactgcgtctaaaacaagtgcacctctaaaaactacttcgtgtaatactccattcttgtttttctaccacattaggtttgttctaagtaaaacattactatctttgaccttcattttgaaaaatacttaacgttatggattttatatattgaaaatactttttatagtcactcttaaaacctaaatcttatattataaatatatatatatatatatgtatatatttaaattaagtcacttttaagacgtaaatcttatattacaaacctatatatatgtatatatttaaattaatatctaataatataaacatttgactgaggataaacctaacatgatatgtaaataaaaacggagggagaagtgataaaaggatgacatataagcttgaaatctaataaaaatagagattgaaaattttccattaaggcagactccatctttctttgacaatggcgccctttaaactaataagtacatttgtctcttttctatcttgtatatttgtattctatttatatatgaccataacttgcattgtgttcagaattttaatggaaggtcagacacgattttttgtggagtttttgatggccacggtccgcatggccatattgtagcaaggaaagttagagatactctcccttcgaagctgcgtgctctgatatatgatgactttggggagagccccatttgcaattcagatggctcaattctagaagaaactttatctccgtacgctgatgaagaagacaagtctccagtgtctgtagaaaaaggagaacgtcaggaatcctttttgtcaatgaaagattcattccggaaggcttttagggtaacagacaaagaacttaaattgaaccggaatatcgatagcatttgcagcggaagtacagcagttactttaatcaagcaggtaataacttggttgcctattttctactattacttgtgaacttaatttaatgtctataatttttaaagctttgccttcgtattatcagggccaggatcttattgttgcgaatttaggtgactctagggctgtattaggaaccagagatcaaaacggccgtttggtagctcatcagttgacagttgatttgaaaccc

SEQ ID NO: 202579 - DNA, 694 bp, Zea Mays
tcattctgtgcatctcagttttcaacatgtcaaaagagatttggaaattccgtatttgatgatataatgtgctaaacctcaaccagaagttcaagttctcccccaacaccctgtcaatttctactctaaatttctcctctgcaaccgaagaagctagcggttcatcaacttgccattgcttaatgtattcctctatctcagcaatttctttgtcttctgtagtaggactggtgcttatcttggatgtttgttctgacttagcaatctctttgtcttctgtagtagtaatggcgcttatcttggatgtttcttctgacttctctaaactctcaataatagaggcactcatctttttctgcaaagaacttagcatgtgcctaagcgagtggatctcctcatcttttcttgcattgacactcttaagttccttcagttctgacattgcctcaagatggtaatcttgatttctcttctcaatttccgaaagcttttgctctgtatttttgtagctctgaagtacagatgcgtaatcttctaatataatcttaccctcaccttcggattcttttggaactagctgtttctgggctacaagaccttctgaggtttcttcatatttctcaatttcacttgtagcgacacgtaaagatttggatggctcattttgcacatacagacttgttagtcctgaatc

SEQ ID NO: 202580 - DNA, 912 bp, Zea Mays
ccagcaactgctgcttgctttcaccttctagccttcctggccctgcatcatctctccacactcgttcacctgttctccctgaaggacattggcagcagacagggtgaccaaacaggacttgcacctgatgaataagtcgagggggtctgtggcctcggcaaacgctatctagtgcgacaaacaagtagaaggacatcaccataccgtctgggagcaggtgcacactgtgggttttgccggcggttgtcagcgctgagcaggagcacaagtgagttgaggatggaccttgtgagggtgttgaggatgatgagtgtttagggcctccttcgtgtccgagaggggagatgatggtgggaaggtggtgggtgcggagagaggggaggcatggggacctaaggagttggaggctgcagtggggtaggagtgggacattgggagcaggtgtggctacacaggagggtttgaggagttgaggccagtgtctcaaggagggagatgacgaccatggtggcgttttggcaccaccacccatgtgaatgtgatgcacaggtgtggacatggagctgcatgacggatctcatagcgaaccacaacagcgcaccatgttggtctataccctattggaccatgagtgagatccatatcaaggtcagtgagtcaattctgcattttggaatttagggacttacaacagacaagttcattgaccggccacacagtgtactctagttttcgcattttgtccttccgtcataccatctcctagctttaacaaaacattctcatccactcaatcccattgcattctctaagtcatttataatcgattaaaaagcaaagacacttggatgatgttagtgagaatttggagacctgtgtagtgtaacagatctcagatttatgttggagtgt

SEQ ID NO: 202581 - DNA, 378 bp, Zea Mays
caggactagagatgacgtcgtcgagtacgacatagttggtaaacggtgtagtagctagtactttgtaatgcttgctagtaagttagtacattcaggcgtggcaacggggacggtggcacacaccgtacagtagccttaggtacgactgatgcccattgttgaggctagagggacggtggcatgcactgcatagtggcctcggtgcatctctgacaaggccacaatgcacctctttgaccgcaatgttgtctatcatatttaatgtgaccgacgaaagctttttccggaccgtccgataccatgcggcctactcgaccgcctagagtaggggcgcacgtgcactagggtcgtcctgccctgggggcttctttcaagacc

SEQ ID NO: 202582 - DNA, 584 bp, Zea Mays
tttgtcgatacttaacacaaatatttttatacgctgcagtagttagtgttccatttggtctgttaccagcttcaacctcttcaacacatatttcacaaaaagttctagtattcatggatgaccaatctgccttgtcatatttctccttctatacgaaaatttatgtacaagcatatcacatatgaacattacaaatgtctacaaattagcaatggccatgtgttagaaaattactcaccgaattatttgcagtaatttcagcttcaacttgaattggttcatcatcttcccgaccttgagcatttaaatcgatgtcaataccaacacttcggccaccacgaatgctccttccagcactcctactaccgcgtatcacacaactagtgccatgaccggcactacaccctgccagtgtaaatcctgcgccacgacgacctgtcgtcatggaaccacgtaccatggttggtctgcctcgttcaggtgtcgtaacatcaccaactcctgattcaatgtctgctggttccggcgtaggatccatcacaatacacctatagatagagtagcattgtagcaattagatggtc

SEQ ID NO: 202583 - DNA, 725 bp, Zea Mays
agattacatgatgatgggcacaaggacaagttgactgctgatggttagtatatatagtgtctttgtagggctgatgcttatcctatcacacaccgctccaattttgttgtccttttctctttgtagaactaactgtttattgatttcctgcaatagaatgtctagaccttgatctagctgatatcgattgccggattgaacttatgtatacacctgtacgagaagacggagtgcacgggttaccaaggagtgttacttctgatacaatcttacctggtccgtgcttcttcacaaaacttctattgattccattagctggagaagccttgtcatggttgtaacttgtactattcaataaacaactataagatgagcggattccaattgtaacttgtactgttcaataaacaactataagataatgggataacaattgtaacttgtactctgttcaataaataactataagatgatagcataattaatcatattatgtgatacattgatacaattctgtgttgcttacatacatgataagaatataaaagaaacatagctttgagcatagtatgcgcataatgtaacatgaaacagtattataccaatctatgcattgaactatatgttgacccattctttcatgcaggggagcccaagggtgtcaatcttattctacctgagtgttttgaggacaatgaaatttctcccatcaaaacctatttcgg

SEQ ID NO: 202584 - DNA, 343 bp, Zea Mays
caagcagttgcttcccttccaatgcacgcatcctggccatccaaactggacggtctctctgaaagcgcggaaagaatctgagcggggtgtcagccacttcttcttcatagatctgacacagggccctcaatgccttgcgagcgacgacttgacaggtgtctttgaatctgtgtccagcagcagtgacactccattccacatggtgcggactggatccaatgtatacagtcacgacacacttctctgtgccatgctcgacgaattcacgaccatcatactctggctgactcctgattccgaggcgaactgtgcatgctctcaacaacttggggaaaccatcttc

SEQ ID NO: 202585 - DNA, 442 bp, Zea Mays
agcacttgcacggctacttcaccagatctcaagccatggcgccgtcgcgggtggaggattcgatggcgcaactgttggctaagatcgaggaaggtaacaaggaaacacaccgacgcatggaggtgatgcaagcatccatggtgacggttgaagcaacggtcaaagggttgatgaaggagcaaggtgaacttcatcgatggcggccagaggtcgagacgaaggtgtcggaagttgcagaagccctgaagacaatccaagctaagattgatcaatttgggaagggggtggcaaccgaagcgcctcgggaaggagttccagcaactgatggtgcgtcgatctccgctcaacgggagatcccgtcgactgaagcgacgcacgggcaacctcgccagcgctttgtcgaaaatcaccggagaccgggtgttgttacggataattttcg

SEQ ID NO: 202586 - DNA, 327 bp, Zea Mays
gtattttgatgagaacactgcctcaccatccttaagcgccaccgtggccctccttagcatggctggctaattccaccctctttctggtcctttcgaccattgctacattagccccttgaactactgaggcttgccatgctttgtgattgaacgctaccacactgtgtcgacgagaacggcttcgtcgatccttggtgtccgccgtaatcgtggatagggggtactccaagcccgattagttcaattgatacatggaatagagtcgccttagctcgagaatggagagcaggtgctttgattcgccggtcatcgacgtttgtagcaagt

SEQ ID NO: 202587 - DNA, 374 bp, Zea Mays
caagaatatcgtcgcgaaaagatgctcgtcgagcgcttaaccggatcacggcgcaaatcacggcgtggatcggtgccggcggcgagatgcgcggtacctgagatttttctgctactgtaccattggaacctctattcagtcagcgtgacaaatcaagtttgggctggattttctcctgattttacatggcaacaaggccatcattctgtagcaaagttgtagcctaatgatccagctacaatcttactacaacaaccatagccaattactgactggattatggtcgaatccaagcttaaagatggctcaaacacactgtcagtctgaattcagacttaagaaagtctgacagttaaactttaggcacattttcc

SEQ ID NO: 202588 - DNA, 289 bp, Zea Mays
gcaatctctctagacgcttcaagatctcaaggatctggcatcaatcggagcaatatcgcgccaaatccttcgcctcctcatctccaacgagcgagactacacccctcaaggtcctaaccgggctcctgcgcgacgcctattcgctgaaatgcctcagggagttgcacgcgcatctcgccgtcgcgggtgcgatccaggacacattcgtcgtcacaggtcttgtcgaaaggtatgtttattttgggaaggccgcgtctgcggcgttgctatttgccgaaacctaccgcag

SEQ ID NO: 202589 - DNA, 281 bp, Zea Mays
cttatttctctaagtgtgtttgttagaggtaattcgagtgttcctaattgtctcctccaacaatacggttgtaccaatataattgattgcacatgaaatattcccttttaatatgtacataatatggttagaagggtggataagttagtgggtggggagaagagagagggactttaaaagaacacctggcacacataagatatttgaactttaatggtctattgattcccttaaccatctaaggacctgtttgtttggaatataatctgcctgagttatat

SEQ ID NO: 202590 - DNA, 352 bp, Zea Mays
gatggcgccatgaaaccggggagagacgctcgtggtcgcctccatttctcctcacttgccgctacctagcatcgcatcccctccacccaagctcgatcgatgaccaataaaagaagcttgagatcggctcctgcatggccggttgcgtgtcgctgggggaaatagaatagaaagaggctagatttgaggtcgctgcgttctcaccaccctctccacttctgaattgaagaacctacgatccgttccacaaccgggcagcggtttgttccgtgctgcaaattagatcgagaggccatcttcttcatctcagagtttcgccgtcggttggttcccggagccgcgccatttctcg

SEQ ID NO: 202591 - DNA, 453 bp, Zea Mays
cttctctcgagagaaaaaaaaggatccgaattcaatttgaaaggggaaccgggtgaagaaataatccgaattggcgaattcacgagcccaaaccgcgagtgaaagcgcaagcagaagtcccatgctagcgacacgctgcttcaaacccagccatgatgaacccaaaccaaatcagatacaccgcactccgcagaagtcccttgcaaaaaccaaaatctgacggcgagctcgccagcgcgagtgggttgttcttctccccccaaacaattgagagctccgccacagacacacatccaacgcagggaacgaaaactggacgctgcttcaaacccagccacaatgagcccaacccactggagacacaccacactgtgcagagctagacatcacgccacgccgccgccggaacgcgctcgcgacaacaaatggcgacgagcgtggaggagcgtgctt

SEQ ID NO: 202592 - DNA, 424 bp, Zea Mays
ggcccacgactgcctaccgctgagactaggtccaagagcccttcgcacgacaccagcgtgcctatgtggagtactccaacgatctggacacacttacgccatcgatggtgagttgtgtacttgtatgtcaatttatctttatccttaagacgttggtaaaattactataaacttatatgggaattctaatccttttcaggtgacctggtaaccatatcatgagccaacattcgccaacatccagttgagcaccatgtacgagatagacgaggacctttacttaatgaggtgtgccctcatttgcttctatgctgttgagtatcacttgccccacagagtggctcgacaatttggtttgcgtcaggagttttcggtggagcccttctccacttcaatataactccacaagtgagtgactttgccc

SEQ ID NO: 202593 - DNA, 467 bp, Zea Mays
cataaacagtactgaagatatgcatatatattacatacaaaaagcatatatgtgttacttgggttgtataagagtactctctgctaactcatcagtaaatacctaatccacagcctttgtctaaatctatgaatgtagggcgatagtgggaatatagaataaatacacatgccctaatatcggggctcctaaacaaaaaagagatgcaatgcgcgatgcaatgacccgattatagtgatgtctaagcggatacaaatcacacatttagctggagaataagggttacaatcaaatccacttcaatcgaccgataggcttcaaaaaatcgacgacaaactcggggtatttcaatgttggattacctggaacttcttgaatcgggctccaatgctgggagattgaaggatgtaaggtggaatggaagggcgctggattggagcggcggtggattggcgctgcgctggttt

SEQ ID NO: 202594 - DNA, 280 bp, Zea Mays
ttcagcatctagaaatttgctgccaggtactgtggtcatgtcttacacgacgtcttattttcttactttcagctcttaaattttaactgtcagctaatcttaattcatttgaaatattgaactatcaaatttgtttcactctcacatattccttctagctaaacactgaacaaaatttgtggaaatttgtaacatctccttttcttttgcgagccttacagaagatggtgggtctgcaaaaaaggcaaagttgctacctgatcagagtgatgaagatatt

SEQ ID NO: 202595 - DNA, 767 bp, Zea Mays
aaggtataagaaacaagctatggtggctcttaatattattgaggacaatgaaggattcagccgtcaagctttagacgactacgccaagctcttcaagaatactctttctcgtagtcatgtgcaggctcttgctgccctttttgggtggtctgtcccagataatttagaatatatcaatgggactggggatattaccgcagcaagcatattttagctggcggtgttgctgttcttgtttgtcgatttacctctcattgttactacatggatccggaaaaaataattgtttggaatgttagaggtcttaactctctcgacagaattctgtccgtgagctcctcaattgttatggagcggatataatctgtcttcaagaaactaagatggcacaaccttctccgcgtgctctcctctctatgttgggatctgattttaccggttcattggccctgccttctactggttcgaggggtggaatccttattgcttggagacgacatttggggataactggagctaccaggacagacattcatagtatttctgtgcagttttgttcagtggagggacaccagtggtggcttacttgtgtgtatggacctcaatctaatgaagccaagattgaatttctgcaagagctgagacatattagagcagcttgtcagggtccttggatgatttctggggatttcaatctcattttgcatgtcgaggataaaaacaactcgcatattaatcgggctatgatgggtcgattcaaaaaattg

SEQ ID NO: 202596 - DNA, 394 bp, Zea Mays
cccggtatgatggagtgggcagaagctgtgacaggtaaagtggacccgtttccaacaataatggaagtggagcgtggtgggcgaaataaggagatgttaccactgacaggagtcatatgactagaagcgctggaatccatgacccaatctgttacgccaggaggattgaggatcatggtgctaaagttgctggcgagggactgctgatcccaggatccagtccacagagtccatggtgcagtcggggaagcaggaactgcggggggctgttgcggaggcccaagctgatggtgtggtggcctgaactgatctgaaccggtccagatatgggcgggttgtggacaggctggggaaagttgcctggtagaggggtgtacgaggtcggagcagtgaa

SEQ ID NO: 202597 - DNA, 1381 bp, Zea Mays
gtactgtccacagccaaggacaattgggtgccacagagtcgtgaacctgaggaggtgaaggtgagcaccgaggggttggaagttagaattggtgggcggagagatgagaatgtgtcactggatgatgggcgattgtcacaagctgcatggattcgtcaatacatggaacaacaagaggaggtatagatgagtgaacaagtatttttcacatgaattgagtcatctcttagtactctttgaaaaactgttggattttgttagtcttatgttttttttgtccgcttgcttagtctccaattgtatcgttctgtttcatacttctctcaggttgttctgaacttccagtggatactaagagcttctacatcatgaacctgtgcaacttacagttttagaagacaaataactgattttgttgtctaatctaagtagcacaatgttttgttctatttgaaaaaaagaacacaaaatggttacacaaattggtaactattgttcactgggaactatgtttcacaacaattcaagtctcttcttatttttattgcttatggtttatctttttgtttcaaaacgttaactatcctcactgcagttttagattttgacatggtctccaatgtgtagtttttttgtagaacgaggtaataccctgcttataaagataacatatgagtttttccaagttccaagccagggacaccagcgagcgataactctaatatgtagctttgactattacttgtaataactccatgccagtaaacattaagtaatagaatgtaagtccttgagatgacacatctactaatgttattttcttgtggtcaatctaaataatcttttttttacacatgaatgggaaatttatgaaaacatgacacctttcaccaatgtatctgaggttgcatgtacccaacatccgaatatcctatgcatacaatttcacaacctctatcaagtctttctgttaactgttattccttttcatttcttttaatatcatatttcttggtacattttttcttttggatatcactgatgttaggaagaggatgcaaattccaatgattcctctacatgggaggatcactgcttacaaagttttgaagttgtcgaagcaaagccaagtaggcggaagagcaagggtaactttgcttattgttttattggcattcatattgtaactatgacatatgttgtctactagtttttagttacatggccctgtggccctgacaactttttggaagtttacatagttgagatagtttaccgcgaactatcttatgattccctcccgcacttaacagctgcaaaaaagaattccaagcatggaaacttgaaggaacagataagctatcctaccaattctgtatct

SEQ ID NO: 202598 - DNA, 1028 bp, Zea Mays
ggactggtgcgatgcctgttaaaatgctgatggagcaggacatgtggaaagaaagacggcctgatgaggagccactgaatgttgttgcaagattaatgggcctacatgagcctccaggtcagcaatccaatttccctttaggaagacaattggataagaaatatcagtgtggtggttttgaagagaactactggaatctcaagtcaaagaaggaaagcaaatgccaccaaaaccaaaaggcagggccacgccatcagcacacttggaatggttctggtgaccaaccatcaagaatcagtagcagccagagcatgcaccaagaaaatgagacttgtgagaagaggatgtcaattgttcgcgagaagtttgctgaagcaaagcgactagccacagatgagaaacttcttcattcgaaggagttccaagatgcactgcagtttttaagctcaaatagagacctattcttggagttccttgacgagccaaatcctctattatcaagcaaccgttatgagttccaacctgttgcaccaccttctgaagtaaagcaaataaccatactgaagccatcagaaccagcaaagagaaaagacagcatctttgtggggagacaactgttttcagatggagatggaggtgaaagtgaacgaaacagatacaggcgccatcagagttcggatgtttccccagcaaattcaaatttgtctgagccaacaaaaattgtagtactaaaaccaggattccccagttctcatgactccaggattgcgaggtcttcattatcatcagcagaagacagtgaagatgaaagtatgatggcggttgatgaaaccatgtgctcaagaaggttggcaaaggagatcacttggcagatgaggatgcggctaaaagacaggcaagacgaagagagtatgctctcatgtgaataccctgacttttatatcggagatgactccttcagtaaatcagaagttgagattccaaaagagatgtgtggtgaaacaagtggggaattggagtttggcact

SEQ ID NO: 202599 - DNA, 296 bp, Zea Mays
ggttttgttggagaggcagacagaaacaatgataacaaatatttcctattcacgcacaagaatattgtcatcagatacaatggcaatcaggtttgtgtatcatgagcttatatcacctcatttagccattagtataggttatcatccttgcctctgttccatgcagattatccatgttaatcttactcaagaaagcccaaagcttattgatgtgaataaggcattggatatgacatattctgtcaaatgggaaccaacaaacataacatttgctcaccgttttgatgtgtatctgg

SEQ ID NO: 202600 - DNA, 286 bp, Zea Mays
tggagccacactctgtttcgcctactacgaactcaagttcctgattgcggttgtcgtagtagcggttggcatactactaggcctagagaagatgcttgtgaacctatgcgaggaaggcgttgcagtcatgcaggatggcatccaccgccaccgtttgagatgcccctgcggcgttcgaaagaaaaggcgatgggggttggccgtacacctggaagggagtggtggagagcgccatgtggaacaaagtattatagcaacactttgcccaaggaagccagtcaaccca

SEQ ID NO: 202601 - DNA, 387 bp, Zea Mays
tgtcaagactcatatgagaagcatatgttgtcttatgagattttagtgttggtttctttatcatcgtcgtccttagcagtgggcccagccctcactgccgccacctgcgtcggatggtgttggtcttgatccccggcgcaaatgtgactgttctcattcaccaggggcgcatggcgactccagtgacagaactatggaacgtcggccggtgcatgagcgacttgggcgaaacttggtttcatgtcgccacgtggcggcctcccagagtcatctgcaagcctctctggtgcaaatttccaaggcggtgggtgatgcctcgatgcatgtggctgcttcatgcaatttgacggctgggctcttggagttattcgaggagtcagatgcgtg

SEQ ID NO: 202602 - DNA, 373 bp, Zea Mays
ataagcaccgatctatgacttgaaagttgaaaccaggcgcagacggtggcctaaaataagcccagcatgccacaacagctaacatacgcacctgtcaactgtatctccgtatttggtgttggatctggtgtcgtcatcgttggagcaggtggaggctcgcctcttgcgatgggactcatagacgagggtggcctcaatgaccatcacattgaggaggacggactcgtcatcccacccggagacggtggtcatgtgccttgcttcctctctagggacaacgcgatgggggcgacggcggatgggagagccaagccttttatggatccatgcgaatcgacgacgaagcgtttctggcgacgacgccgagatggag

SEQ ID NO: 202603 - DNA, 316 bp, Zea Mays
ttggtgtttgttttgtgttattaatgcagggtgatatcctagagaaagccaagatattgcaatatgtaagagtgaatgatgtaaggacaactcgatatgtatacaatgatatgtttttcttcaaaagatctcaaacttgacttactggtatttataatcgtgacagtggtttgaaaatgaaaagcagaggcttgggcatcttcgtgaccgtgcaagtgaaactgggcgcagaaaggaatatcctattgactatactatggtgtggtgatgcctttattatcacttatattgtttctcatcgactactatgccgctg

SEQ ID NO: 202604 - DNA, 483 bp, Zea Mays
tatactataataaaaaatcctgattttgtgtaaagcctaattacgcggggtggactattataacggtaaaacaaagcaaggcgatcctagtagtacaaaactctgctcgctcgctcgctcgccctttctctgtccacacttctctcattctctgagttctctctcctctccccaccttctctctcctctccccacgaaccgcgccaccttttctgacgccgcatcatcggcgacttcatcgccgtcgacaagacgcatcaaggcagtgcctgctactcccgcctccgcattcttgccccacggagcgtgctcctgctctcggccgccgtcctggtgctgaacagctgacacagccggagagatccgcccggcctcggatccgtttcttctcctgctggtgccttggtggtgagtgaacctagcttccttctgccggttgattcgatctaggagctccgtttgttcttgggggcatttactttg

SEQ ID NO: 202605 - DNA, 361 bp, Zea Mays
ccaattttttcaatgagtggttggatgtggattttccgaagtggtcgggtatggagttggagacctaggtaatgacaggggaaattcccccgagtcccgtggaatggctggagcacatgatcaaggtcgatgtcttcacaccggatcgggtggatggagctcttttcaaggttagtaaccaagcccgaggcacatccaaaggcgtgtaggatgtctttgaccgccacaatttcatccctagaggggttgataaagatagcagcatcatcagcataaagagacgtcctaagattggctgtgttcagcggaaggggggagaggattccttgtcgggttgccagctcaaggatgcgctgcaccg

SEQ ID NO: 202606 - DNA, 333 bp, Zea Mays
gttgaacgcctacgtcgtctgattagcccgccatgtttgcccagttacttgcgtggtcagattgattaggcaccacgtgctcgggccgtgtggttcgtccaaatcttggccgtgttggaatgggtgtccacgtcagacgactggattcactgctgctgcagcaatcagtctgtcgagctgtcgagagatcacgtgctttttctgtgggttgacgagcttaaaatttgtactggtttttatgtgggttgacgagcttagagtgcgctagctagatctatcgttgctgatgcatctgccgggatgtttttttttcttgatttgacgagcttagag

SEQ ID NO: 202607 - DNA, 405 bp, Zea Mays
cgaaggtggtttggttcgactaaaatacaccttcagatttggagaccagtttgacgagccagacgatgattggctgaagagtgtcgaagctacaagtgatgaactgcttgggccgtactcgaaaacagaagataatgcactatcagcggccttcggaagccggaaaaagaagaggctcaacagagttttcgatgctattgggttcatgtatcttgactaccgctacccgttacgggggcaaaaaagaaaaggtgcaacttccggtaaagatgatgcttcagctgctccaagcgagcctgcgccgaagaggaaaaaggtgaaggtccttactcaccgaccgcgctttattgaaccggccacaatgctcgagtttgtcgatgagacctcttcggctactgaagccaa

SEQ ID NO: 202608 - DNA, 539 bp, Zea Mays
gaacacctactaaacgtaaccctgacctaaaccgaacgatctcagggcatggatttagctagcaagcactacaccgacccactcatacccacaacgggtttctgggtccgcgacgtccgttcccgagacaacaacaccgtagagctcaaacgaagggaacgaggagcaccagtaggtcatatagtatacatgatgcttgcgtgaaccggcttaggactgacgggaatcggttggtcgacacgggcagttcgcgacgccgagctcgcgttcctatctagctatgacagcaatgaccaaacgaccacttcggtgagcttcaccaacaaacatggacactagaacgctagaccagaggtgttgaaccatatcgtgctcgcttgaccacgtgaggttgctatgtcggcgacatggtcaccaggctcgcgaaagcactgagcaagaaacttgagtaaaccttgggtgtaatttgggggaaagtgaaggtgatagcaccacacagatgtgaacgacaatgatccacgatgatcttggctgggctt

SEQ ID NO: 202609 - DNA, 320 bp, Zea Mays
acgacaccacacaggtacccaagcacaacaacagaaaggaacacagtacgcaactgagcacagtgccacctctagatccaacaaagaggatgaagtcctccacactgcagcagccacaacacaaccaacaatggtgacggcaacgggatgaacgagcagggagagaaaaaggtggagcagcgagtctcacagtgcgatacagagagggagagagcgcccatcctttaagaggctgagaggaggagcgcttcaccgaacttctgagcatcacggccaacttgccgtccaaatcggtgagcaggtgagggcgccaccactcg

SEQ ID NO: 202610 - DNA, 1313 bp, Zea Mays
acagggggaaattggtgtcttctttcctttgatagttttaaggtctctggatagctctgatagccccctcagccagaaggctagtgttcttaggtgactgccttttcctttatggaatcccagctgcatacataatgcatgaacatacacagtttggtcattcgaggcatctagtagatttgtgtttaatgtcatttacttatttgactgattttccaatcaggatgttggagaaagtttgcaaagatccccaaatgcttgcagatgtgtttgtgaactatgactgtgatcttgaggggccaaatctttttgaacgcacggtaatcattttttcaattgtccagaaagcatagcttctgaaatgtgcctttttttctttggcttgtaacacatctgattgataatatatgtcctactaggttagtgcgctatcaagaatagcacaaggatctcaaattgctgatactaactccatcgtgtcatcccaaacagtttctgtaaaaagctcctctctccaggttaatatgattcacgttactcgggcctcctgtataatttcttgtttattgttgttttgacatgaagattttgaattgcagtgtttggtgattattctgaagtcattggctgattgggagcaacttcgaagagattcctcaaagcaagggagcattgttgaatctcatgaagaggatgcttcaaggagattgacaactgatgagatgaagaaccaagaggatggtcggaatcagtttgagagagccaaagctcataagtcgacaatggaggctgcaatctctgaggtgggggtgtctgcaggtttcataaccacttcggaactgaaatatcagattatttcttgaatgttttagtttgtaaatgtcacttctcctaaaccttttgcagtttaatcgtaaaccaagtaaagggattgaatatttgttgtcaaataaattggtagaaaataaggcatcatctgtagctcagtttctcaagagcaatcccagcttggataaggtgatttcaagattccattgagcgtcttgctgtaacaatataactattatttaatgttatttgtcaaaaaggtgtacatacatctaacttttgttagctgtatgcaggttatgattggtgaatacttgggacagcatgaggagttccctcttgctgtgatgcattcctatgttgactccatgaagtttatagggttgaaatttgatgctgcaattcgtgcgttcctgaaaggatttcgccttcctggtgaggcgcagaagatagatcgcataatggaaaagtttgctgagcggtag

SEQ ID NO: 202611 - DNA, 489 bp, Zea Mays
caccactacacgacatgcctactacgttaaatgacttgttcacaattcacatacatctttaccaaaacattcccacatcgcttgcaacttaacctaagcttcactacacaatttcaggacatctacttaattcatgaatatcatcgtcgcacacatcgactcgatttgaattaaccacacatgtctatcacatgaatggagcatttcaacaaatatcctaaaacaaactaacttcatcacacatcttacattacaaacatttgaagtgtctactcgaaatcgtaagcacaatcatacactatctgcgaaactccatttgacgaactatgtatgcatcgtcacgactcgacttataattatagagaaagcgacgacaacttggcatgtcaccacctctctatataagccaaaataatttctactatcgactaagagttctaagtattaaacacactgttactgtccacgcgcaaataaacctcaacttaa

SEQ ID NO: 202612 - DNA, 273 bp, Zea Mays
gaagatacaagccatgtatcagggagcaagtttattaggggcagtggcagagaggttaggaaagcacatgcggacaagaactcaaagataggtgaagtgaggtcgtgccatggagaatcttgaagggcatgtaattgtgggccatgtgattgtggatggtgggtgcctattgatgaggtaggtgtctgttgctagggcctcgacccaataaggggacgatatggaggcatgaaggaggaaggggcagatggaatttttaaacgtatggaggat

SEQ ID NO: 202613 - DNA, 271 bp, Zea Mays
aaaattagtgcattagaccaactcaaccgtgaacataagagctaacccaaccaatagtgtcatgatggattgcataatctgtctattcccacctaacatcaaatgaactttagacctacatcatgtagcctatctcatccaaatctatcttaaccacattcccccacccccgatgatatgcactcaccgcaaatcaatgagctcaagaccggagaagaaaatatcaacctcgtcaaggaaagagaggagtcaaacaagatcttcagatgca

SEQ ID NO: 202614 - DNA, 413 bp, Zea Mays
gctggcattcgatcttgatgatgtgatcgctcttgagctatgtcaccatctctatctctgtatttcgtaaggctctttctttctcctttattatcaagactacgcccaccactaagcctacctgaaaacctatggtcacctgaagatggagatttttcagacagttgttttggtgaagtatgcttatctttgctaggtgtgcggtcatagtgtgatgtagaaatttccaatgttacatcacgaggttggtaatcatccttctgtttaagcctttcagacgaccaattttctgcatccctgtcacgaagtctagaagcaggtgtcctttctctaccagaagatgctcttggacgattatttctctcatcatatggaatttctctctttccatgatccaccactttagacccatg

SEQ ID NO: 202615 - DNA, 276 bp, Zea Mays
caaatgcttcacttaatcagcctcacattttcgctgtatcttctgataataaagatatagagcgtgaatgtcctagcccaactccaaggtctgaatgcaaggaatctcttatggagaactcagtattaacatcagcggcgcctgaaattcttgtaagatcttctgcatccgcttctgatacatgcaaaatggaggagtttgtgaatcagcaaagaccaattgaagtggatgcatcgaatgcttcacttaatcagcctcctcgttgtcacattttca

SEQ ID NO: 202616 - DNA, 473 bp, Zea Mays
atcgcaaccgaccgatcagagatctatggctagggttttaagtagtgcagatcgcgcgacagccgctcgattaaggatctgtggtccaaactggattgcgtgaagggttctaatctaagccgttcctctcctaatcaacgccccgagatgaattcggcgaagagctacaatagcttctaatcctagcggtccatttacggatcgacggccagagaagcctccaacccaaccgaacccggaacacggcggcgctggctccatccacggtggagctcgccggcgaagaacccaatccgacgcccaggcgcactaagactcaatcccctgcgtcctacacgatgctacaagcttggtgaaggtgaacagggacttaccagagacggagatggctcacagacagcagctcacgacgaagcgcggatccgagacggtgctgcggtcacggcgagcaatccagacgccgaatgaggttt

SEQ ID NO: 202617 - DNA, 505 bp, Zea Mays
gaagtatgttggaggattgtggtacaaaaatctgattgccatgcattatgagtccctatctgatctgccatgcattatgagtccctatctgatctgccatggcgcaccctgctgccctatactgatctgattgtgcaggagctgaaactcttggttgcttgcacagtcttgctggaggtctttgtagagttgaaaggttggtgttgagatcgtatagaccgatccactggtggtttccctgcgcgaaagagcgtctgctactgtatttagccggccagccctatattccaccttgaagtcgaaaccaaatagcttactaatccactgatgctgaggtacagttgagagccgttgatcgagcatatacttgaggctgaaatggtctgtacgtaccacaaacttgctgccccacaagtatggacgccaatggtgtactgaatgtaccagtccaatgagttctctctcgtatgcagcgagcttgacatgtcgggctgcaaaggggcgg

SEQ ID NO: 202618 - DNA, 350 bp, Zea Mays
ggcgaggtagggtgtaagaagggggtcatggtgatatgttggggcataggcatttgtaatggttatcagggcattgaagagaggtgaagagagggtactggttagagagtggtttttagggtgttggtgtaggagacaagggagaagcaggaggggtccctagcggtgataataccaccatgggagccagcggcagggacagatgctaagtcatggatgtttggaggtaggaaggaaatacttgcgaaagtgtcggggtcacagagtttcaattcttagatgcaaatgatgaaagagtgagcaacaatcagagcatcacgaacaacggtgcatttatctaaatttcctag

SEQ ID NO: 202619 - DNA, 399 bp, Zea Mays
cccatccactggcaggcagcgtcaaggtcatccagcaggcggcgcgcttgctgagtctgttggcgaatagtgcgcccatgccaagcagcgtactgtgttatcccttctacaagaagcttcccctgcacgccgaagatacacagatcttggacgacaggacacaaggggattgccccggtagcaaatatttatagtcctaagtgttatattctctatgtccctgggcccacatgtcggggctcagtgcctttgtgcatgccccccttcagctataaaaggggaggcatgcgacattacgagactcagacccaactctaggcagacactctcaagttcatacaagctcccaagctatacatcacatagtggagtagggtattacgctctggcggcccgaac

SEQ ID NO: 202620 - DNA, 521 bp, Zea Mays
gtcaagaagctggacgggtcgtggcgcttctgcgtcgactaccgcgcgttgaacgcgctcactgtcaaagacgcgtttccgattccggtcgtcgacgagctccatggcgcacgcctctcaccaagctggacctgcggtcggggtatcaccaagtgcggatgcggcaggagggcgtccataaaacggcgttccgcacccacgacggcctctacgagttcctggtgatgccgttcgggctgtgcaacgcccctgccacattccaggctttgatgaatgacgtcctgcgtacctacctccgccgatttgtgcttgtcttctttgacgacatcttgatatacaacacctcatgggcggaccacctccggcacctctgcgtcgtcctcaacaccctgcgccagcaccgactctttgtcaagaggtccaagtgctcctttggtgttgactccgtcgcctacctcggccacgtcatttcagcggctggcgtcgctatggaccccgtgaaggttcaggccatccacgac

SEQ ID NO: 202621 - DNA, 341 bp, Zea Mays
ataatacccggtgggtatttacccattgccatctctagccccatgtgcacgtactgcgcgtggggcaaagctttgccctgaaggcacatcgtctcaactcaaagatgaggtcgagctcgtttgacttgctgtccaatatacgtatgagtagtcgcccacgcatgcaaggctccccgatacctttcggtcttccattgacgtcccgccgtgtaccatcgctctggcccacgatctcggatcggacgacgcatctgcaattgcaaccaacgagagtgcgcgcgagatcgtctcctccctccgattccatgcgtgcgtgcacttcctctctacgctagctcagc

SEQ ID NO: 202622 - DNA, 334 bp, Zea Mays
ttgaaaggggcactactcaggaccaagtgattctcatggctgccagagcgtctcgcacagaaaaccaagatgctattgatactgctatagttgggatgctagctgatcctaaagaggtatgttgctttgttatatgctcaaagcagataatgaggattatattacttactaaatgatgagatgcctctttgtccatgttttcatgaaggcacgcgctggaatccaagaagttcacttcctgccattcaatcctactgacaaaagaacagcactgacatacattgatggtgatgggaaaatgtatcgtgttagtaagggtgcacctgagcaggta

SEQ ID NO: 202623 - DNA, 416 bp, Zea Mays
tctaggcccgggtcgtcggggctcgacacggacgtgcccttcgccgcgcccaccaagcaggtcttcgacgtggccgtcgtgctctccaagaacatgggctccagcttcgtctcgcccgagcacctcgccatcgcactcttctccctcgacgatccaaccaccaacaacctcctaaggaggtacgttctcttgtttgttttccattgcaactgatctccagatccgctgcaatcgatgacatttacttatcgaccacattacacaaacgaagtttggcatctagttgtacagatatgattgataggctcgccccaatgaaaaatgatctcagttatcttcgcatcctttcgttgtttgggcctcattgctgcatgctgtcgattgctgtagtttgggagcggatcccagtcatctag

SEQ ID NO: 202624 - DNA, 285 bp, Zea Mays
cacaagtacaattgtatcatggttgtggtggataagttttcgaagtatgcacatttcctagcactagcccatccgttcacagctttaaccgtagctaagctttatctgtcagacatatataagttgcatggactgccatcgtcgattgtgtctgatcgggatcccatattcactagcaagttatggcaagaactgttcagattggctgggacaaagctgtgcatgagtagtgcctatcatccacagtctgatggtcagacagaaagggttaatcagtgtttggaa

SEQ ID NO: 202625 - DNA, 473 bp, Zea Mays
tcttaatagtagtatagatatagattgttgtggcctgtgtcgtagactaatggctcggtcaactggctgggcacagtatggcccatagctggttctgatttaatagaccgtgccgtgatggtgatgtgtctagatggttgtgcttgaatgggtcctgccttgttgtgcctagatcgtgtcgtgtccccggccagatgcccagcttgcccaacgccgtcgacctcgcattgccgtgcgtgtggctggcagttgtcaaaaggatcgtgaacctgctacagagaagtcaaggcgctacagcagccagcagggaaccaaggcaccgcacaacgatacagccaccgccacaaaaatgacagccaatcaggctgtctgctttgttgcatacggattgctaattcaactttacccaaagagtacaagtgaacttttggtgctggaggggcaaaactgtcaaaagcgcgacagaaataaaa

SEQ ID NO: 202626 - DNA, 539 bp, Zea Mays
cataattcgtggggacacaagaatattattaagaaataaggaatgaggtaattcagtagagcccgtgccgatcacaggaagcagggaaccattaccgacgacaattgatggaggataccgcggggaaaaagtttgtgcaagactgttggaagaggatgccatgtgggaagtagcacctgagtcaaattaccattcggtgaatgggggttgctgcaacgcctccatgctgaaagcataggccagtgaccgagtgtcccaggagggcaggccggccatggggtggtagaaccctggcggagcccattggctgaccacttcagtgtagcaagagcaggagccgcaggtggctgatgctggacgacgaaggcctactgttgtggacgagccggaggacgtgcgctgggacacatatggatggtactcgtccacgggttgtagacagatggccaagagctagccggtggcggagctgctttgggctactgctgcgcgctgtcgttgctgaccgccgctagggtggtgctgttgctgaccgccgc

SEQ ID NO: 202627 - DNA, 340 bp, Zea Mays
ttttatgtattcatgttggaactcttaatcagggttttctctacggagacgtaattaacataatttttatgcaaatataagaattatggaagtatgagcctggaatacctgtattatttactctattatatctaaattaaaatttgtatttgttgtggagacgatgtttttgtcgcccgttttcccaacatcaatgtgcaacatccgtcatcaccttattacccccgttatttatatttcgacaaatctcgattgtccacattgtaggcattttttctcttccacatgctccttcataaaaaccatttcttaattcatgccgagacctttgataattgtc

SEQ ID NO: 202628 - DNA, 863 bp, Zea Mays
gaaagtagacttgacgtcgaacaatagcagaccttataggagacaggatgggagaaaactcgttcatgcatttttctctatatgctggatcaataaaaacaggagagtttcctttgctgtaccagcaaacagggggaggagctcgagcagcaggaattgcgaatgtaaatgattcaacaatatcaagcattttctgaaagcgttccacagatggaagaacaagatctgcaaggcttgatgaatagtccatgtggcacaaagggttgttcctcttatcaagaatatttgatacatgatgctttacagtcaaaacatgtatcatgtttgtgccatagacaggcctcttttggcatctaactctattccaccatgcaatggaagctgccctttctctggattcctttattctctcctcctgtagtgctttctgaatatcttcaaaaatgtttgtcaaattacttccctgacgatccttattagagcaaaaagtatcaaggtcatggttccaggaagtggtactcaaaggaaaggcagaaatgacctcatcagcttcccaggaactcatgctaaattcattttgcgtaaacactaaattcatatcagacagtcccacctgagaaaatggactcttatcaaggagcatgcagactgaatagctgagctgcatgttaatcccagccatgtcaaatgagcttattattggccgaccttcaaaaagatctggatggttacagacctttctaagttgcataatgatgcttatcatgccaaaataattcccacttgccagtgttgcttgagtctctgagctagcaataaaatcttcatacaagtttctttgccttctagaaagtcggcaatat

SEQ ID NO: 202629 - DNA, 544 bp, Zea Mays
tttgggatagaattgacacaaaggtatttctcctgcctgaccccttcctgatgggtttggtgtcgagctttgaggcatgcagatatatgagatgtgaagagaggatctccaatccatcagattaagaaaaaagaataatcctctatatcagacaacaggagatcacgaaaacatatataaacctaagttgtaggtgagatgtgctacagcagatagaggattttttgtattccctttatacgtggcagaattttgtttttcctttctggagggtttgtccttcatcttcgtcgtccttcttgttcccgtccgtcgtccgcatctccctgctcatgggatttcggtaggtcctgtccgcccgcctgctctcacgatgccttccatctcctgcttgaggtggcagcgtttgcagagcggcgctgcagctagcgactcatgagctccggtgatgcagtagcggcgtgcggcagcagagcggtcggtgctctcacggcgactagaagaggaacaaagaggattgagaaaaaatggtgggaggatcccc

SEQ ID NO: 202630 - DNA, 1105 bp, Zea Mays
cgacgggagaggagagaaaaaaaaatacctgctgtctctctccaccctccctccgtttcgccccttgctgggaatcgattgggccggaagctgattgttgcattgcgaaagaggaagaggacagtggtgctcgccgtcaccatcgaagatgttctcctcgcccttctccgtgacctcttcgcacagcagcgagcatgagccggttgcaagggacagctccatcatcgtcgccgtcgaccgggacaagaacagccagcaggcggcgaaatgggcggtggataagctcctcaccaggggcagcatgctccagctcgtccatgtgaggggtaggcgcttctacacccgttttatttatctatttatttatatatgccaatgtgggtttcctgcatcaacatgtacgagatgatatgagaataaattaagtcgattactcgccttgctactccaaccaacctcaacagcctttgagctaggacagtttctgaccattaggagatcttcagatcagatgcagtatatacgatgctaaaccatttctccgatattacaccagaccaattttccttacaacaagctggttttagataaagtgtcaacctaaaagtttttctttatatcgtaacaatatgagatgatgccattttagatatcaaccaaaaaactgaatgcctattcctttgtaggacaatacaatgtgcactaaaaaaaactcattcttctattcaacatggtctgctttatgttacaatcttgatctgatccattaaggcttattatgttgtttcatatgaccatgctacagttgaagcaaacaaagatgagggtgacgcagagataacacagctatttatatcatatagagggtattgtgctcgtaaaggggtaagtgggcattgaatattacctctttttttatatctcaaatcatggaaaatgttaggccaagttagcatataaaaatgatattcacgtttttgccacctttacatcgcagatgcatctgaaggagttgatcttggatggcactgacatctccaaagcaataattgactatgccactagcaatgccatcacagacattgtcgtcggcgcatcaactaag

SEQ ID NO: 202631 - DNA, 405 bp, Zea Mays
ggccgacttgctgttgcccctgccggtgccgcaaggggtatggacggacatcgccatggatttcgtcgaagcgctgcctcgcgtccgtggcaagaccgtcatcttcacagtgatagaccgcttcagcaagtatgcacatttcgttcccctggcgcacccgtacacggccgagtctgtggcgcaggcattcttctccgacatcgtccgtctccacgacattccccagtcgatcgtctctgatcgggactcggtgttcacttccaacttctggagcgagctgatgcgcttaagcggtaccaagctacagatgaccacgacatttcatccccagtcagacggccagtccgaatcggcgaacaaggtcatcatcatgtatctcaggtgcttgacgggagatcgaccccg

SEQ ID NO: 202632 - DNA, 369 bp, Zea Mays
cagagacctgatatggcacttcttgtgctaaagtgcacagggcgtgatagcttctctgctacagagaacttcgaaaaggatggcatttcatctcttagcgaggcagtgactgcggtccgtgttagaattgaatgtggcctcctaacagaggcatttatgtatcataggagctactgctctaaggtgaaagagcaacactcagcaaatatgacacacacggaggatgcattcgaaggctcttggatttatcatgttgagatgatgatggtcgaattttgtactatctgcattgaaagaaatttagttgataaaatgattgatctgccctgggattctgaggaagagaaacatcttcacaagtccctcttc

SEQ ID NO: 202633 - DNA, 294 bp, Zea Mays
cgacacaaggacctcatcctcagcctgactgtagtttgcaagtcttcttgttactgtcttcttaacaattttgtttcgttgagttggaggagtagtattgttttcagatgcctgcaagttcacatcaatgttgcaagcgttctggaaggttgcatcatcatcaaattgagttaaatcaattccttcggtgtaaacaaaaggttggtggccatgagaaggttctccctcagtgtactggtccattttacgactgcgttaaaacaaacagcaaacatataccaatttagtactgaa

SEQ ID NO: 202634 - DNA, 391 bp, Zea Mays
agaccacgaaaccagcggtgcttataccccggcgagatatgggggctctgtaccgcgatctcaagtggggagggcacactcgatgatggctgcgtagcagttgccccggaagacgactgctcggcaaggattctgggcgacggcgaccttgaaatagcaccaggagaggatcgcgggtggaggacgacgtcacgaaaagacggtcggttgcccgccgccaatatggactgatctccgtccggcgagtcagggttgctgtccgtccatcgttgagacttggaccgcccaaggatgtcacagggagacgcttcagcggaagaggtaggggtgaggatcggggccgacgtctcagggggggagggatccgtagaggcagcagcgtgatgggagg

SEQ ID NO: 202635 - DNA, 339 bp, Zea Mays
ggagaacggcacgctacactgccaatataagacatgctagttagagagccccaacaatgtgtcaacatccgagcgaccttggaagagagtgcctcaacgatggttgattgtggtgcccaaaacaactgagcacaaggtgtcgatgtatcccacaattgtcaaattagatgatatatgtgggaaagagacaatgatgctggcgatgtggttatgctgaatgaagaaggaacagtgcgggagtgaacgctcctacccgaaggggagtagtttgggccgacgtccttggccaaggcaatggtccagacataaggtacagtgtgcccaaaggcagtggtccag

SEQ ID NO: 202636 - DNA, 315 bp, Zea Mays
gggagggtaaaggcggcgacaactgacgagtcggaggcagcatgatggcctacttgatgttctctatgacgacacgaaagaatctaggtgagggagcaaagaccaggaaagaggtggaaaattagaggttaatatacaacggcaacatcaatgaggaagagatcgtggtggttgcacggtgggttgcgcatgtaagatataagacttatattatctcgttataagatgaaacttgaggaagaaaacaatattttatatcaacacatatttagtcatgttggcatctagtcggaggctagcagaatgacctgctcg

SEQ ID NO: 202637 - DNA, 292 bp, Zea Mays
cctgagcctagcaaagaatctcgaccggagaaggaaaaaccgtcgaggaaagcttctgcatctcatcatcaccagaacaaagctggcacacgcgacacagctaagaatcccgaaggtgcccagggcagtgagaagacggaatgggcccgggaggacggtttcaaggagatctgcaggtcatggattgttctgaggaaagaatcgcggtcgtggtttctgagcttcctggaggatgcacttgaatcaggattcatgtccgagggccaaaccaccaagaacacgagagaacgcg

SEQ ID NO: 202638 - DNA, 298 bp, Zea Mays
ggacgagcgcaacagccgcgccgtttctactgtttgtttcacggtgaagactgtgcgcacccaacaagggattgcctagaaacgaaggctaccagggacagaatgtctcgggcgcaaccagctgacaacccaagagttgccgcacacacatatcagcaactcccacaaccatacaaccacggccccatgccacatccacctaaccacgcttaccaacaccaccaagaggtacaaatcgtacctcccccactcccacctccacccccgcagcagccaaacatccaccacccaaaccacc

SEQ ID NO: 202639 - DNA, 277 bp, Zea Mays
aatctagattctatctaatctattatgatctaatctatagtaagttacttaatgctggtacaaaggattaagccatactccaaatccacttaagcttaaactggtgaccaagatcaactcggccatacccaacaacttgacctacataacagatctatcttagcctcttgtcccaaacccggatggagacaccaaagagcaagactggaaaaggacaagatcaacctcgtcaaggaaggagagaagtcaaactcgatcttcacatgcattaccaccc

SEQ ID NO: 202640 - DNA, 365 bp, Zea Mays
cctgagtggaggaggcagcgatgccgatgcggccatggcttggctgcagccatcagtaatgcagcggagaaaatctagagagggtaggggaagccgtggatgtggcaggggggctgcctcggcggccatcgcggggaggaggcatgtgcgcacggtgaaggcattggtaggcattgcgagggaagaggcagacgagggtgtgggtgatgtccccgatggaaggcgattgtgggcttactttgaaggcgcgggcgcgacgatggcgatgagaatggcaggagacatgggctcgacggtcgcgacgggagggggtctcgtacaagggtggaggcgcgacaatggcggaggagtcgcagacgggggcg

SEQ ID NO: 202641 - DNA, 502 bp, Zea Mays
ggccaagtctctgcagtaaatatccatgcactgggtcagttggtgtctatccacggtgaaacgttatctgcttatccctagcagagggaatccgaccaagtgatgactagctgtgtttgtgctccggcgtggagtctgtgtgtgaagccacgtaaccaccatactcatgcagctgttgatacctcaagacccctcctcagcgtgattccggacatagtcactgcctgttcctttatccctgcgttcaagtgcgtggtcagagaaccttgctgccttcaagctctaagcctgtgttcgccgagtgcttgacaaaattgtctgtccacgctggtgtcaaaccctccacagcagcagtttggcaccgagcttcatcacacgcgctcgtctcatctccccgtcagccacacaagtgagctccccgacgctcgtccctgatccaccgttctcgacgtccagaattttgtcggcgttctcggagctcgccctggcgtgtagtccacgc

SEQ ID NO: 202642 - DNA, 756 bp, Zea Mays
aagaataccccccttgcggtgcacttgtgatcagtcgagtacttctcgttgcagtggtaacattctccacttgcccgtttcgctgctaattcttctggtgttagacgtctgaaacgcgaccgatttggagcagccggcctggcccctggtcctgaaccagtccctttgatggcggacaggttccggtgactttgtctatctctgagtgctgcaatgttctcctccttgcgctcataagcacgggccagactcattgcggtctgcaggtttgtcggggccagcagctcgacatcggtgcggaggggatctccaagacctgctgtaaacatgttcacctgctgcataggagacaagtcatcacagcgacaaagcaagactgaaaactgtcgctgatatgcctccacggtgcctgtcctataaagggctttcagttctgccaggccattggatcggatgggtggtccaaacctcatgtggatgtagtcaacaaatcgtgcccacgacagaatgccatgatcacgttccagggcatagtaccccactcggctgctgctccctccaagtgtaatgatgctagccaaactttttcttctgccatggttcgcatccctcggaaataggtgttgcacttgttgatccatgtcaatggatctgattcgccgtcgaaggatggaaagttgggtcgcggtggacggctgccaccttcgtcgtcacgaccccgaccgcgaccatagccatctggtcggccataacgat

SEQ ID NO: 202643 - DNA, 277 bp, Zea Mays
ctcaaatggagtagggcggctaccactctttgatctcaaaacttggaagggcactatagctatttggtcttggcattatgtgatgggtatatcatcgaaggcacacatacaaactaatatcttttttgaacttcacacaaatcaatacttgaaggcgacattagagaatttcaagccacgaaggttggcgatgacagaaaaatcggatctctcttctctccactcggaacaaatgtaatgccaccaaacaacagctccccagttacctaccgcccag

SEQ ID NO: 202644 - DNA, 445 bp, Zea Mays
cctgagccagggtcatttggtgatgctgaagttgtaaactgccaatacctgtttcgccgccgatcctgacctaggggcaaggatctgtaaacataaagctgctctgcccggtgaccaatgtacgatttcaactgagatcgccttttatcagcataagcatactgctgaacatacgaagtatctggggttgcgaggatttcctggcatacgccatttctctcataaggtagactaccagcattaccctgattatgctgatcaagcatctcacaattgttgattgtcccgacatgttcatcattctctctataagcatcacacgctggagttgaagtaatctctgtcacgttgttttcttgatatatatcaggcttcaaacccatgtcagagttatattgtactctgctagtaaattcttccttgaaacgcctcttgtcaagttgcg

SEQ ID NO: 202645 - DNA, 333 bp, Zea Mays
caaccgtgctaaggaacaacaccgatttgatgccattttggaggtgaggtgggggtgatttcaaatgcttcaaggatttcatgactagtttgtgttgatctaatttgttcttggtcgtttttgttttcaaaggatctacgccctcgtggcatgcttggtggccggacttgccctcacatctatcccctctaggactccatgatggaggctgggtactcagcggagcggccatggcccgattcgccgctcgcgtgaccggggacgccgatgtactaagggtggttgtgggttgatctctggaacaccaacatcatgcccgcctcttctccgtcc

SEQ ID NO: 202646 - DNA, 297 bp, Zea Mays
gtcaaggaggcgctccaggagtggtgaggcatggtcaatgtgggcgccaaccaaggtcttgggtgctacaagggtcggggtcccaatattatgccattggatgtgtcggccatcgtgctagaaggccatccagtagtcgtcgaggttctagaggatcggccccaacaagcacaaaaaggtgacacctaggacaatgttgtacgcccctagcggaatggcgtaggggtgatggggaagggctcagtgctgacatgaaactagtcatcggtggcacggccgaagcaggtaccttgtcac

SEQ ID NO: 202647 - DNA, 289 bp, Zea Mays
ctctccagtctccaccacgcgccttatccccgcctacttctccaccaccgctacctcttcttttctgcatcctccccacctcccgtcgtcactacacgacgccttgttcctacactggcatgccatggccgcgatctgctcgacgtaatgccctacagagacagcaggccctcaggaacggagggaagcagagcaggcccaggcggagcaccgcgtgtcacaaacagctcaactgtgcgaggaaacgccacagcacaggaggcacatatgccgatgtggcgggaaagga

SEQ ID NO: 202648 - DNA, 451 bp, Zea Mays
tggatctgaggcctcgctcaaggtaaccacgcaaaacttgcatcgttgatctcatattatgctggttctcttgctgcttcgttctccaagtttatacaagatctattagcatgatggtcggtccgtgcagtacatagaatgagtcagtcactgacacatatacttgcttcgtatgcgtgtaggaacgaaccaagtctggagttttctggtgattggataaaactttggcagctgcaagtctaataatctgaagctatggacacacaaatgtctgaggtacatacattttcttatatctattctgcgcacttgttcttttaattaactagatatatacatatattagtttggttggaaaaaagactatatgaaatgatttctgctagttgcatgtgcgtttattctttttcacacattgctgagaaaggaatgaagaagactataaaatggg

SEQ ID NO: 202649 - DNA, 329 bp, Zea Mays
gcaggatttacttcatgatggggccaagcttctgctgaaagctgcaaatgcgaggaattctgggagagagctgcaagggaacactgaagatggtgaccagatgatggatatggagtgaccgtcggtctctgggtgctggatggttgcttagtggcttgggtctcctttatctagtcggtcctgtttagactgcgttctggttttgcgctttgtcgcagtttggtgctgtatttttggctcctttggatgatgtccttctacttgttgtcatgaatttagacaatgcctggtagatgtctttgacctaaatcaggtcggttatgttttct

SEQ ID NO: 202650 - DNA, 293 bp, Zea Mays
gcattttatgagcttctctcaagatatccatcttcacctctgatttctgaggcacacaaagacggcccctgaaacgaaccaaatcattctcatcaatggtgaaccctcgtggtttaccatcaccaaccctctttcgagcttcctgcaatagacgatcctgctgctgagccgcacgcactctctccatgagagaggattgaataagcatctgagtctcctcgctagcggtaccgacataacacaaagcgattcccaaacggtccagatcagcgatcaatggcaaggccaccttt

SEQ ID NO: 202651 - DNA, 521 bp, Zea Mays
tggacagagacgaggcacagggccaggagccatgcactccaacagtgcctcatcttttctgcttcctacactactgcgaccatgccaatgcacctgcccgggaaatgcaacagcaattcttctcccccttcagaaattcatggggatggccaatggacaacaatctcttagcaccgtggaaccgattgctcgacggaatccattggttttgaccagagaactttgcaacagccccagaatggcaccaccttcggggaatacatgcatgcagaacgcgtgaaattggagcaacaagcgagagcttgtgcaacagacacctggagatgttcggagaaatgcacgagcccgggtgaggaagctcagacagaatcgcgaacgtgggcgaccaaggcaaagatcgttatgcaatgcaaagctgcaatgcgcccacgaaatcgagcaaatccggcaatgcagagccccctagccgcgattcccaaatccgttaagaaattgagtcgaaaaaatcgggggaaacgaaa

SEQ ID NO: 202652 - DNA, 464 bp, Zea Mays
caaatggggaacaggcatccgcggggacggggatgaggttgtccccgttaggctaaacagggcccggggaataggtttaggggaacggggcagggacggggaactggtccctagccccaccctatcccattgccgtccccgccaagccgtggtaccagtcccgaccgagaaacccccgaaccctttgctcccatcactaacgggtcgggtcaagctgcccacacaggtgacaggtccaagggtgacgcactgacgcacatccaagccgcaacccgagagcagagtgaggaacaacaaggggatttttttagtgcagtgccaggggtcgaacccgtgacctggtgcaagggacctcacgtcctcaccatcttcaccactggggtattacccggtctgcaagtaggagttgcattcactagccaagatattagatcttaacttacattataacaatttcaccaaca

SEQ ID NO: 202653 - DNA, 289 bp, Zea Mays
aagaaaatattggatgaagctcacctttccaaattctccaagcacccaggcagtaacaagatgtatcatgatctcagatccttgtactggtggacccgaatgaagagggaaattcctaagtatatatcggaatgcgacacttgccaaagagtcaaggccagtcatttgaaggtggcaggcaccttacagccccttcccataccctcgtggaaatgggaggatatttgcatggatttcattgtggggttgcccaatacctcccgtcaccatgattccatttgggtcattg

SEQ ID NO: 202654 - DNA, 437 bp, Zea Mays
ccaagttccaacaaccacaagctagctacttacacagcaatttgctacaacataacaattgaactttcaaacagtttttgatttataagaagaaacagtgattagaagttaatcaatattgttttgtgctaatttaacacaattttaggaacatccaaccatatcccaatgagtagaaaatataagaaacttacatgcacatttaaatatttctgaaatttacagaatggaattaagtgctgctccaaatgcctcagatcaacaagttacatcacaaaaatgattaaacattgggtacgatgaatattataaaagcgactagggaaatttgagcaaactagtcattcattatttatactccctcgatctcatattatttgcacgttagtgatttgaattttgttgcacaaagaggctcagttcctatgtacggcgct

SEQ ID NO: 202655 - DNA, 2196 bp, Zea Mays
ggatgcactttctacccttttctctctgtacattcgtgatcttggccctgctgttgaatttggagatgcacactggcttggaagacagggtattgcattagcgctccactctaccgctgatgttttggccgctaaagatcttcctgttgtcatgacatttctcatctcacgtgccttggtaagtaatttgtttttatggatcttatcattgcagatttgcagtgccacttacatagttacatttaacttttaatgcttctcatgacgaatctacaggctgatccaaatgttgatgttcgtggtagaatgattaatgctgggatccttattattgataggcatggaaaggaaaatgttcctttgctatttcctatttttgagagctacttgaataaaagggcaagtactactttcctattaataattgtactagcattattcaatatactacgttcctattagtaactttactaatatattattattgctccttgttttttatttgctatgcaatccatatgtaacaggcatcagacgaggaaacatatgatcttgtgagggaaggtgttgttattttcactggtgctctggccaaacatctatcaaaggtgtagatggatactgaactatcttttgtttacaagatacattcacagtactaaatatagcatttgtaacaggatgatcccaaagttcatagtgtcattgagaagttgttagatgtccttaacaccccatcggaggcagttcaacgtgctgtctcagattgtttgtccccacttatggtatccaaacaggtgtgttttgttttgtatcattggattttgggtttgaatgatgactatccattttcaacccattttttaagctttcctttttctgatttatttgattaaaatgctttattctcaatataaccaggaagagggtcaaactcttgtttctagactcttggatcggatgatgaaatgtgaaaaatatggtgagcgacgtggtgcagcttttggccttgctggtgtggttaaaggatttggaatttcttccttgaaaaaatatggcattgctgcaacattgcagaaaaatttggaagacaggttgtctactttgttacctcgtccactagtgctgtatataatgactttgtaaataaaatgagtatgcattcacctgtcacaaattttcactaaattatgttctgcagcctttgtatcttttcatgttttgttgttctctaggcatttgaatacaatttatctagagtattcaatgggaatttttgattgacaaacatcatagcgctaaatttttccatttgtgtgcagaatgtctgcgaaatctcgtgaaggagctttacttgggtttgagtgcctgtgtgagaagctcggcaaactatttgagccgtaagtgaggcacctcttcacttagaactgttgctctgattccaagtggttcattatgtttgctttcttgtaggtatgtcattcaaatgcttccattcctacttgtgtctttctctgatcaagtcctagcagtgcgtgaagctgccgagtgtgctgctcgggcaatgatgtctcagctcactggtcctggtgtgaagcttgtccttccttcacttcttaaggtatcaatatatatgttctatgctatcaaattgtaacatttgttgcatccaaatgttctggagagtacaagtggccagttcatcttgttgttatacattgaaatctgacaataacttaactttccgccgaatatttaggccatctgcaccagaaaccactagtttgtttccgttaatttgaaagagcagaacatattgaggtccatctggtaaactttttttttaaaaaaagtctacacattctggattttttccacttattgtcatttgcactgttcgcacctttatgttagttgttcgaatgaagataaaataggtattcagatactttacaaaatattatgccagccacactcatttgtaaaagctacatgaaacgaatttatttggcttgtctgatacattcaaaattttccttaaagcacatatttggatgatccttaatatgattttcagggtctagaagataaagcatggcgtactaagcaaagcagcgttcaacttcttggtgccatggcatattgcgctcctcaacagctatctcagtgtcttccaaagattgttccaaagttaac

SEQ ID NO: 202656 - DNA, 428 bp, Zea Mays
caccggcgacgtggccgagcggctatcaccggcgtgttcgccattcaccgtgagggcgccacgccttaggaagtttatcgcgtcggtatgagccgtagtgaccatccagtaaccgtcgtagttcagtcgctctgcggttgccatggtatatcgccgtcgtgactcattcccctcttggccgtcagcgcaattcgtccaaattgaacaccaccgctcaagcacactataaattgagcacaccgacaggtccgtagggtaatcaagcactgatccaccaagtcgtgcccccaattactcaccagcaagccccaatttcggttttcccccaaatcaatctcgagcaccacgcaaagtgatctcaccgtggtcagcgtgctcctggtctattcgtgctccctgctctcttgtttcagcatccttaggttctc

SEQ ID NO: 202657 - DNA, 1278 bp, Zea Mays
tgtccatattctgcttgcacatccaaaggtaatatgtgggttcatcataggaccactcttcaatttcttgtaatatgttaattttatctgaaacataaatgaattttgccatccaccttatttctaaatcaaagttgattgtagagcccatatttgctttgcttctattttggtccctgatccgccaaatttttttaatgcatctttgctaacaccttctgtacaccaatttcattgttacaagggttgattcttggctccatgaaatataatcatgtagcatgtttttgagtgttaaccttactcttgatgttttattctggagtcatttagctatccttgtgtggcattttgtgcttgatttacatagcaaccaatgttatcaagtcatccgactaatcgcgattagtcatgttgattggtgtcatggcgatcagttatgcactatgattagtcaggctgatcagtgccatggcaactaggatctattagacgatttgataacaatgatagcaaccactgcaagctgccaggccaattattaatccaaacttgctgtaaaattctgcagttgacatgagactatttttctgcattggagttatgctgcttgaattttgtagatctacgcacatgcttgctgttaaactgagtttgattatctaggttatatcaagatagtacaatagatcccttggtattcttactgtcttataagcatgacttttgaggtgtctcttaggtgtctaggcgtgcccccaatgcctaggctatgcttataagtgacataatttatgctaatgttctgctgacggttgcccaaatgcccagtgtatgttctgtatgttatctgatgatgattaaagtttttgcatgtgtatatttttgtggtcctgtgatttgggattttacatgtgtatgttgtttggaaaaattctatctgtgcacttattactctttttaataccccattgagtacatactgattcataatgttattctttcaatatatatgctattcagcaacgtgtacctactttaggaacacttataattcaatcatcggtgctcatactaacacttaatgactcatggtcaggttgatatctttatggacgtggcctttgatagtttgcatgaagatgtgaggctgttaagtatcagattatcatcaatgggcttcggtttctttcctgttggttctttggaatctcgtcttgctcacttcatctgtcaacagtgtgaagcatcattgcaatttctcttgttgttgtgcca

SEQ ID NO: 202658 - DNA, 498 bp, Zea Mays
gggaagggagggaaacgagcagagcctagcggaggacgagttgggttttggcaggcaacaaaagcaagcgaggtggaggaggcgcaggtggttgggcgaggtggacgcctgggagtaactagggtgagtaccgcattaaagattggactcagcaagcgcggttactccagctcccgcaggccggggaggaggaagcgaagcgcggacggaaaggaagggagaagtgtggttttgggcaggggaacttgatgaggacgacggggcgacggcaccgtttgtatgatatgacacagagagaaggggagctcgaagactttgccagccagcattgggtttgcgttatttgaatgaagcctggcaaggaatctgccgcagagaagtaattaagcggagcctgatgagaatactaaattagcggaggaagatttggcaacgctgcccctccttggctgactgcattcctcgtggaagtttctgtggctccctctcagcactccg

SEQ ID NO: 202659 - DNA, 312 bp, Zea Mays
caagccacgtggcagcattggtctctgcatgagcggggagcgcaagcgcacaggataaggcctagacacgtgtcagtaccagacccttgcttatgccagggtctcccctatcccaggacctcgttgtggcccggaccttactcggagggatctggaccccatccaagggacccggcatgcttacttgggagtcctgggtcgtaattgggggtccggcttgcgcgtacaggggtccggtgctccctcgcggaggtccggtccaactgatacatcctgggatgtatcatcttttctcgccacgtggtgcccctt

SEQ ID NO: 202660 - DNA, 491 bp, Zea Mays
aatcactggaacttcatatgcttacaatgatccaagatcttgctgcttctttgttgatggagtttgagaagtgggtcttgcgtgcagaatccacaggaactattttgaagaccccattggattcacaatccagtcttggctcagaggaggttcatactttaggtgttccaagtatttttttagcagtgttatgttgatgatgcaaattgcccaggattgtattacttatacacgacaacatacttctgtatttttattaggtaattaaggctaaaaaaagaaggctgggtcgtgcgcaaaagataataggagattattgcctcttgcctggatcacctgtggacgccaatgcacattataccactgctatagagcttgcaagattgactggtgatgttttctggcacgctggagcccttgagggtagtgtctgtgcattagtggtaagcttttacataaagtcattctggttgttaaagttcaactatatt

SEQ ID NO: 202661 - DNA, 322 bp, Zea Mays
ccaaacatgtggagatcgacgtacatttcgttcgggaacatgttgctcttagcaatgtctgtgtcctacatgtaccaaccacttcccagtttgccgacatcttcaccaaaggcttgtatagcaggctaggatagagagagatttggggaggaatccgggatgaggaccaattagggtcctgttgtttcttagtttaggaggtttccttttgcctcacactccttccctttatatgtaacagcaccccctctctatcaatacaagatacaattcctacattctagtttactcacactactaatatcaactttcctaacagcat

SEQ ID NO: 202662 - DNA, 611 bp, Zea Mays
cgtggatcgatcaacggcccagatccttcactaatctcatgtcgtcccgacctaatcaaagcccttgatctgagatgaacggctaagggagcatcttccaccctccgcccaccagggcacggcggccataccggtcttgacggcagtccgttgccatgatgacaacccggcgcatggattccctaatacgcaagctaaccggtgcaaaaggaagcgcgagccatggcgaagctacccaggggcttaccaaagaccaaggcgaaggttggagagccggccacgacgaacagcggcacgcggtggagcactatctccggtgagcgaatcgagcgctccgcacgtggtgggcagggacggagcagacgcggaggagaaggtttcttccagaagagggctggggctagttgctgcgctgccccatgaaggccatctgcatcaacccccacggcggacgtccccggcgagcactgaccgacgtttcactgccccaaaggcgaactcgaagctatctaatcgatcctaatgagttaacgagtgtcaaggcagtggtaataccatgaatcgtagtgccgaactccctggccacggcagcgagcgcggccacggcggtg

SEQ ID NO: 202663 - DNA, 631 bp, Zea Mays
tatatatatagtttaggtatttagagccctgggctttgtgtaggtagagaaagccccaaccacccacacgaccggccaaccaggtgagttaagcgtagccaaacgagactactcaaacaatcgtcagaccatttacgatctcctgcacaaacgtttatgatggttacattcccgttttatgcaaactaacacaactcagcgcaacttatggtccacggctccacgcccacgtttccgccccagtccgcacaccatggcccaccagtcgatcaaccgagtctgcatcctggccagaccccaccgcatgccccaaacctaaccactcgcccgaacatctagcaaccctaattgatttcctcgtcgctctcgccgtcgtgtgctcccacaatcgccgtctccaagcgcccccgcccctgccacaccgccgtcttcgtgcgtggcgtctcggtcccccaacatcgtcgcacggtattgcctcatccatctgtcatttctcgtcttcgtgcactcttctgtcgtcgctccacatcaacagtgtcgtcagatcccactcccgctcgccattgctcggcgatttggtgcggtggctccacggccctcgcctccacctcacacggtcctacgcctctcg

SEQ ID NO: 202664 - DNA, 445 bp, Zea Mays
gcagaaagtaaagtagacatgcatctcgtcatggctatatttagaacgtggtacatcgaataagcagcctcttttacccaagttatattatttcctgatgcaaacaataaatagaacaaagcatattttttttattgcgatttctatcttaattaactatttccctgaaaaataactttttgcacctgatgtgcttatgttcatgtattaattatagtattattttttctgctttatttcctgaagtaaatagtagaaaattattaaatgcatgtggagtatatattgtgtatacttaaatcgctctaaatatttgctatgtgttgagccttcgaactcacgtcgaccgattatattgtataatgggtactcagacacgccgatcaggctgcgttggtaatcgacttagttatggcattagctgaatattgactgcgccctggca

SEQ ID NO: 202665 - DNA, 325 bp, Zea Mays
ggagcacgtggtgcgctggcagccaccaccatggaagtgggggtgtggatgaccattgcatatggttcagttccttcagcagcatgtttgttctgggcttccaggaacatgggggaagggacgaccagatttaatgtgaaggccgatggagacgaacatgtcgttgaggctgcgaattaggatgaggacgagggtacggttaggaacatattcaccaaggtcctcagggcgtcggccacgcccttgatgtgccgatagtagtcggtgactgagatgtccccctgggccaaggtccaaaactcggaatcgaggtggagggtgcatg

SEQ ID NO: 202666 - DNA, 383 bp, Zea Mays
gagtcactgtttgctgctccaaatcttctgctggagaacataatattgttgttcaaggagaagtttgagctctgcgtggacaaactaaattttgaattgcttttgccaaatttctacatggttcgcacactgtcaaagttcttttctcctttcaaactcctggagcttgcaaattggatgttctcaaaattggatggtcacaacttcagttcacctgcttttgtttctgctgttttgatgtgcctatacattattgatgtcaccatggaaatgctgtgcttttatctgcaaaaaactgatcagagatcacaatcctatctatttcggcacttggagattcacaattctgatatcaatgccattcagcaagcctatcacatcat

SEQ ID NO: 202667 - DNA, 611 bp, Zea Mays
ttgcccgagtaagaagtggactgcactggctgaaagaaggagacgccaacactgcctattttcatcaccacgccagacacagaaaaaaaaacttcattggaaaactgatggtcgataacagagtaatttctgagcagcaggaaaagaaagaggtaatctgggatttctataacaagttacttgggacagcagcccccagagagtcaattttaaatctggaagaatttcatcgccctgctttggacctttctgctcttgatcaaaatttctctatggaggaggtctgggcagcaattaaaactctccctgctgacaaagctccagggccggatggatatacgggaaaattttataaaatatcttggccaatcatcaaagaggatgttatggaggcgttaaatagggtgttacaaggtgatgtatccaaacttcatctccttaactcagcttatgtgactctactgcccaagaaagctgaagcattggaagtcaaagatttcaggcccatcagtttaattcacagctttgcaaaaattgttacaaagattctggctaacagattggcctccagacttcctgagatagtgtcagcaaatcaaagcgcttttata

SEQ ID NO: 202668 - DNA, 658 bp, Zea Mays
tctaggcaagattgggtgaacatgagcatgaactgcttgagatgaatacaaatagtgacaagctaaaacagacatacaatgagcttcttgaattcaagctggtcttgtcaaaggttgtatctcattcgtgtgacttgattgtattactgatccatgtgttttcttatgtatgtttaatgaaaggttaatatctccactagtatacttttgactttaatggtacacagtaaattttttgtggaaaataaacatgccataaaatcatactgtaggtaatgttaggtgatttttgttacattatgaactgcaacattgcttggcaatcacaattgccttctgtagttaatcatttccagtaaaatatcaaatttggtttaaatagtattttttctcttctttccattccatgttttctcaaacaacatcttgcaggcaggtcacatccttgcttcttctcacagccatgcagcttcagctgagcatgagctagatgaaaacatatatgacaatggaatacatgagggaaatgcctatctgctcgaacaggtctgattttagccctgattcataatgttaacactattacattgcctgttccgccattacaaaaaagaactgttcccagggagtgcatcaaggagcacatggacattctgga

SEQ ID NO: 202669 - DNA, 288 bp, Zea Mays
gtagcgccaagcgtaggagccatgggccgccgtcgatccataccctcggcttgtcgcgtcctgggtgggcgaccggtgacaggggagtcctgttgagtgccgctgctgcaccgcggtaagtaaatctggttcctttaccatgctccaaccatggcgccaccgcgcccatgcttgcgccgccgcacctgctttgcttcgccaccctggtgtttggggttgagaagacaagctctcggccgtcagatgtgtgacggttggctgagattcaacgctaagataaccctttgc

SEQ ID NO: 202670 - DNA, 313 bp, Zea Mays
cctgtggaacgtgctgagctgggcgtggtcctcctcctggacgagctggggtaccctggggcggcacgtagcgaggacgaatactgctgctaccctgcccctaggcaatggccttcctcttcaagtcacccagttgaacacgcttgtgttcaatagctagagctttaccaaggagtctctgaaatgatggaaatgtgtgtgcaacctgtgtgtactgtagtgacccattgagtccttctgtgaagtgctcttgctttctttcatcatcggccacctcatcaggagcatatcttgatagttgaatgaacttgtc

SEQ ID NO: 202671 - DNA, 328 bp, Zea Mays
aggccctaattctataatatagactgaaagaacaacttcattgacagtgacgaacataagggcagataatcatgttagattagagacatatcttctaggatcttccttcttccggatgacatgcatgatccccttgtgcgcatgaggttctcaaccaaaatatcataccatcaattcaatgcaacattggcacaaatcatggttgtaccgtctatgtccaaatgtgcattgcaggcatgtagctggatagtggatatatcatagatctagggatcaaaactcaagaaaaaaaccggatagtggatgaaataaccagggagcttctccc

SEQ ID NO: 202672 - DNA, 335 bp, Zea Mays
ggagaaccaccatccaaatactggcgtgctgcgcactcatcatgcaattccgtaacctctgcccgaaccttgcccaactcgtcgagggcgtggtccaactctgtgttgagcacggcagccaagttgaccatgctgttcagcctaggattgccctcaccaactggcgaggcaatcacacctccaacattgtcggtcgaacgatgagggtagtacttcaggtcgaggccatcaactaccccgctgaacaacaagcaatactgagaaagtgcccgtcgtactgcatcttgcatggctgcctcagcagtatccctctcagtaatagaatagtgctttga

SEQ ID NO: 202673 - DNA, 401 bp, Zea Mays
cttgatgggtccttcagcacgatgactctcgctctgcccacctcggtctcggactaggtggctgactccgatgcttcctaccacaccacccctgacgccggtactttatctgccactcatcctcctcatccctctctcccttcatcgtcatcggatgagtcggtcaaccacgtcacctcaataggtgatacggtccttcccggctcctttcgcctcaacaacgttcttgttgcccccaacatcattcagactcctttctattcgtcaatttactactgataactcttgttctatggagtttgatctcttttgcttgtatgtgaaggatcttgctaccaggacacttcccgcgcgttgtgacaactccgggccgctctacacccttcgcctgcctgcctgcc

SEQ ID NO: 202674 - DNA, 284 bp, Zea Mays
gccggtagatgaacagagaggtgtttgacttagcttcagcaaaacctagcgagagcaaataagtggtaaacttgcttcaggccatagagggacttgttgagtttgcagaccagggaagggtgtgcagggtcatcaaagtcgattggctggctgcaatagatggtctatgtaagagtctatggaggaacacattcttgacatccagttgatgaacggtccaagagcgagagagggccagtgagggaatgtcacgaacggtagcaagcttcaccattggactgaat

SEQ ID NO: 202675 - DNA, 464 bp, Zea Mays
gagtcggggagacgcgcatggcttgatgactcaatctatctccaatgcaccgctgtccgcttcggtggaactaagctattcgttctaacatgaaacttacctcctattttgtgtggagaagatagcagcgggaagcaagcaatgtggtgcagaatgtagtggccagccagttgagcattgtgatcagcctgaagagcagtgcacaatggattatggcaggatggatcgattgactagcaataagaaccagattttggacaagaatactgagaattcaaaaaatacaaaggtacttcaccttcataaaccttaaaggaaaatgaacgcccctctgttagagttattaggtctttttcttattttaataaatacaatatttctgttttaaataaaaaatatactatggtctgagttttaaaattgtttgtagatgttgaaaccatgccggaaaagtgagtttaaca

SEQ ID NO: 202676 - DNA, 353 bp, Zea Mays
gacaaaaataattctaatctcaactgagccatgatgggaagattcaggaaatgcatacatgacctgggaataaaagatattgaccttcagggaaggaagttcacctgggcaaaggctcatgacgtcttggtgcggctggacaggatgttctgttccttagattgggagcagaagttcccagatttcttgcttcagtgctctgcatcggaagactcagatcattgccctcttctccttggattgaaggacaatcattggggtaagaggcgatttcattttgagcccttttggccgaaatttgaaggctttcatgatgcggtttccagtgcatggaactctgtccagaacatctc

SEQ ID NO: 202677 - DNA, 385 bp, Zea Mays
accatttgattttcaggtactgactgcacctatcttagcagtaccaataatgtctgtcttagcacctgtcttagcaccatttaattttcacactaattaatgactgcacctgttttagcagtaccaatacttagcgttaccatttgatttttaggtaatgactggacctgtcttagcagtaccaatactgtctgtcttagcacctgtcttagcaccatttgattttcacactaattaatgactgcacctgtcttagcagtaccaatacttagcgttaccatttgattttcaggtactgactgcacctgtcttagctgtaccaatactgtctgtcttagcaccatttgattttcacactaattaatgactgcacctgtcttagcag

SEQ ID NO: 202678 - DNA, 287 bp, Zea Mays
gagaagttaaagaatcatcattagctcaaataccatgaccagtaagtagtgttaaagtttaccatgttgtatcactcaaagaaaataataaatgggaaacatatacagggtccaaggctggcccagaaacattacaactacaacaccactgtctacaagcattgatgcatactgagttgagtggtagcatagcgagtacctagttccttatgtctaaatgcttgtttaaaaacacacagaaaacagtatacatataagaatgatcattgaaaaaactttttttctct

SEQ ID NO: 202679 - DNA, 277 bp, Zea Mays
atagggtccatggactgcgggttctaaatcctaaaaacataaggtttcttttgtaaagtgtacccgcgaaggggtacagtcagatctcggccattggatcagacgcgaacggtgtggattagattgattttatcccgaaccggtacgctgcgcgagacgtcggattcacatctgacggttcaaaacgtatgcacccgagttctaacttcgtgcatccgatccaaaacgaacggctcacgctaacctaacccaaccggtacccaatgtctaatctagg

SEQ ID NO: 202680 - DNA, 413 bp, Zea Mays
ctaagcactctatacgcacagggaattcatgtgaatccaacagttcccatcttaccttcaatcgtgcagtcatgccccccggcgtcgacgtccagcggtctaagtccggcgagatctactccctgcgacaccggtcgtccctggcctccaaaaccgatgtccacgcatccagcgccccggtgagatcctccgagcgataagacgagaccatgcggcatcataagcgggtagcggcgcacagattttctctcccacattctctcctaccccatggatgttctcggttagtgcagctcccaggtcgagccctagagatgaggaggaggaacaatgccccggttatataagcactaggaggcgggccccggtacgcaacaaccgcgcgagttacacgcagcgcagagtccgttgcg

SEQ ID NO: 202681 - DNA, 300 bp, Zea Mays
gacagttctcatcaaccaggatcaactacatatcaaaaccctaaacttgaaactactgagggtactgggatatcagtactattagtccctaagtcaaacaacaataaatggcctattgtagaagggagggccctgactgctacaaatatgttgtgttcagaacactattatgcaagagatggtgtcagtatgatgaagcgtagctttggactggacaacacttcaactgcttcttccagtgatcttggatgttcaaggcactatgagtcgtcaaagcattgcttctgtgtcagatatgtc

SEQ ID NO: 202682 - DNA, 402 bp, Zea Mays
aaatataattaactgctcgtatgaaataccatacggagatgtaccgacgtttgtcacgcgcgtctgaaaatctgttcccaattagttcttgtaaagaaacattgcaggcatggaagataccagaagtgcaaaaatataatcaagtgcttgtatgaacattgtagtcttgaagttccatcttccattggccacgccgtgtccggtgcccgtgcagctctgtgcgtgttgccttggttctacactgcctcatggtcattgaaatcccgagatggccatagccgaccacgctgttgccctacgtattggctcgatgctcacgcgatgatggtgcgcatttaccccgtcgcacacttgagaaggttcagatgacggttccatcgccaccccccaatcccatcttca

SEQ ID NO: 202683 - DNA, 460 bp, Zea Mays
agcaaacaaacaggagttcttgatggcattccatcgtaggtcaatagatgctactcgtagctgcaaagatgtggttgttaattgctcgagccagcttgatggggaggatgctgctttgttaccagcaatctcttctgcttctgaacaacaggataaactgatggagaatactatgcaggaaacacttaaagaactgtcagatttcttaccctcgtgggtgagccaggaacagatcacagacctgctgatgagttctgaaggtgatgttgttaaagcagcatcgattttttttgagcgggaaagagatttctttgaagaagcaaatgtttcttgtaatggcacacccaagacagagaaaaaccattcttctaatcatgggtcgtctgctgatgtaagtagtcagcaagaatcttctttattttcacagaagcctgtggaatactctgcaaaactggtaaat

SEQ ID NO: 202684 - DNA, 349 bp, Zea Mays
tgtacagggtgtcacctaagactatgtagtgggccgactgcctcacgagtcgctcagcggccgacttatcatccggctcttcttcatctctgacgtacctgataatcggcgtcctccagtcgtctgggtcttgctctgcaggtggttttgcttgttctattgctttacattcttctctgggacctgatgaaatgctgggttgctgtacttcctgaacaaagacatctagtggtgcctgagcctggcttgatcctagcttggataatgcgtcagctgccatgttgcggtccctccctacatggtggatctccaagccttcaaacttgccttcaatctttctgacggttgc

SEQ ID NO: 202685 - DNA, 466 bp, Zea Mays
agccaatgtgtgagttgttctctagtggtattgggtcaagtttggcaagtgagagagatacaccgtttaatctaaaagggtgtgtgaatgtgtgtggctgtatggggtttctgaactcacccctttactcttcttaaacgatacacaactcttctacgtgtttgagaaaacaataaagtgaacatcaacactacattaatggctagttattggcttgagatttaattaatagcaagcaagcagaggggcagtggcacagcaagcaagcgttatgcatgtcaagaagatggagggtaaggagcacactcaccatcagaggaggaggcgaggagctcatcttcctggagcagctcatgaagaggggcggtggcttgaactggctggcgcaagggggcagcgctggctctggcggaatgagggatggacttgtcggcggcttgacctattcagcagaggaggaatcgtg

SEQ ID NO: 202686 - DNA, 328 bp, Zea Mays
gtgcttcgatgctgctgacaccgctatcgccatgcgctgggttacaggtgtaccggaggcgcatgctgcggctgggtcaacgcactgcgcaatcaagggtaatgaccttatcctcgtattcctcatcttctttgctctgtgtggctatgtcgaattggggagggatcaccagagcaggtggattgggatcgcctgggagggcaccactgtcgaagcaagcgccgtcgtggtcagctcggtagaggaagaagagccgataaccgttggatgggaaaaggacgtctaggattagatctggtatgtgttggtcctcgaccgtcgatcttac

SEQ ID NO: 202687 - DNA, 1595 bp, Zea Mays
tcatgatgtgattgagcacccaatggacttcggcaccgtcaggaagaagcttgccaggaatgcatatcgctcgtttgagcaatttgaggtcagattgataggctttggtcatatatttaggtagcgaatggataatgaaatatcatgttgtgatttgttggccatggaatagttacctttcagttcattttacttttgttgtcagcaaatttcatgtgtaacggtttcccaacgttagatttgcctaagggagtcaggtttgtcgtgcagcctgacaaatgaagtgaggtagctggacttctccattttatcatgcatttggaaccacatttcttggtcttccctttcacgacaatttcgtgcacatgcaaggtggatagctttccgctttgtctgtttgtactacatttgtgctggctcatgcaaatagtcattaaccagtgttattctgccctgcaaaagttaccttttccaaaataggcttacattcacagcatgcaacaaaatactagtgatttctagtcatagaatcaccattggtggacatgtgaatgaatccaggctatatgggatatactggttccattgggcttgagcgagtcgctgaccatgtctcatctggttttgttgtgaagagctaagatcatgctgtacctttttaagtcctagtaaaggatatactaaagctgaaacatctcgatagtagctcaaagaagtttgttgaaatcgagtaatattcggatacgtcttgtagcgaatttaggctgggcaagttgaactgatctatgaaattccaagatgtactttgttactcgctcaagtcacaaaagaagttcttttggcctctgtgcagtaagcttgttaaaactttgatcatcaggataccatgaatatagactctagaaggttcactacaaatattacaactttgctttcgagtaagtttcattccggtgatctatctttgtccatggatggctagtctgggtgtggtctacaaaccatcacagagctggttactaatagggatgtaaatggtatgaatatttcttgatcgactattcaactgaaggaattcacatactaaatggatatttgcatccgaatctggtcattccatccatgccttatccgaatactcaaaattggatatatatgtatgtcgatatccatttacatcttatctgacactacccgtacccaaatctgaatccgagaagaaacccaactatctgtgttcgtatgtgtagatatctgcccgtgtctgatctgtttacacccctggttagtaatcatcgaactagtatggccatagcttgactattgaagcaaaatatttgaagatgatgcgaatggctgaatgaagcactgaaacataactgaatgaatctgacctgaacttctgtttacaaatgtgtattgaataggaaaagcttgtaccaatttgttattttcttccttcttttttgggaatgacaagtgcttcaaatgatgagcactagtgcaccttattgatcgttatctgcgcaatggtttttattttaaaattgcaggacgatgtgttcttaatttgcagcaatgcgatgcagtacaat

SEQ ID NO: 202688 - DNA, 367 bp, Zea Mays
ggtcgcgatcgtgcctttgctgcttgcaccacctccaatggtggccctacatgctccctcgtgacaggtttgtcgcctcacaccggtcgagatgaccgagcgcctcgtcaagggttgtgttagaattgtgatgaaccatatgtgtggggccataagtgccaacatttgttctatcttgaggtcgctgactacacccgaggacgtgggcaccgaggtggccctagatgatggccctgacgccccagtcatctccctccacgccatcaccagcatatgcatcaaggacaccatgcacctccacacctgcatctacggtcaccagctccttgccctcctggacaacaactcgatccacaatttcatcaat

SEQ ID NO: 202689 - DNA, 372 bp, Zea Mays
gtgaagacagggggtatattgctctcgtctgaggatgctaccagatacagaagtgttgtaggtgctctccagtacctatccttgacccggccagatatctccttctgtgttaatcgggtttgtcagtttatggcttctcccacagtagatcattggacagcagtaaaaaggatcttacggtatcttcgggcgaccatggacatgggtctttggttcaccagatcatcatctttcctcttaagcgcatttagtgatgctgattgggccggcaatcttgatgatcgacgtagtactggcgggtatatcatttttcttggtggcaatccggtctcatggagttccagaaaacaatcaactgtctctcgttcaagc

SEQ ID NO: 202690 - DNA, 445 bp, Zea Mays
atttgttgtcaaaatagattcatatatcattcactcttaaacatttactctaatttacatctactaaaccatctgaagatttatgatgaataccatcgtttaaatctgctagatgatcgtatactagaactttttgtctaactactacttaatctgttctttagttcttcccactcctgttccatacggctcatacgactgtttgtagctttattttcttcttgtagctctctattttcttcttgcattgctcttttctcatcctcggactgtttcaacttttctatcaattcagccttactaatgcatggacttctaagatgtcttgctttcacgccaccaccatatccaacaatgtgatcctgtctctttgaagggaagcacttatccataagttctgcattagaaagagaaggatctaatgatatttgttcctcaagttgtg

SEQ ID NO: 202691 - DNA, 378 bp, Zea Mays
ttggcctcggccaccaactacaccgcgaatcctgcgaatcccgcccggctgtagcgcacgtcaagggacggcttggctaacacctcggtaagacttccgcctcaaccaagcagaggctctgatctcgataagcgtagcagagaatctcgacgtcatcacgagccaggacactgacgcaccccgtaagcagcttttggcccataccccggcgctgttacaacaactacggcatgggcgacctctctcttggggacacgggcgcacgaacaaccccttggtctctgcattggctctctacgagaaatcagtaggcacgaatcaacaacacagttcgccgtcacatcggcctgcagacgacagggcatctctccctcggat

SEQ ID NO: 202692 - DNA, 504 bp, Zea Mays
aacagatctaccaaccccacgcacggcggtgcggattcctccgccgccgccgcgacacagcagattcacgaagcagcgcacggacggacgcagaatcaaacatcaacggatcgaaataaataaaagcaacgagacggccgcgtatgccaccaaccacgcacgcacgctacagccgaaccaaaccgccaagttgccaaatcccgtcggctttttttagcgtctcgcgggtcacggcaagagggtgcagcgagcggatacctctctctccgtctagccgcacggaaccggtggctgcgggctcacgaccgcgttgtggctccgcccttttctccgccgctaccttcgcgactcacgcccggggatcggtgtcttagattttggctgctcacttccccacgcttatccccggcggcggctcggcgaggaggggatcggtgttgtgggttggtgggagcggagtgccgcctctgtcgcggcctcgcgggatgccctgcctgccgagcg

SEQ ID NO: 202693 - DNA, 397 bp, Zea Mays
tagaccactatgctaaacttagataaaaactaggcgcaatagattagccttgacaaattccaccctaatcatgttacacgggttccatactgatgacgctgctttgagagttgctcctagagacgttcgcgtggaagcggcttcgtgagcaagtccaccaattgatcaccatttcggacgaagtccatctccaattaccaattgctaatgcagtctctaatgaagtgagaacggatgtcaatgtgcttacttcgatcatgaagcaccgaattttcggcgagggcaagcatagacttgttgtcgatgtagagcagcgacccaacgacatttaatactgagtcaagcttaacacttggtaccggagctgtttcgtcgttgctccctgcctcgctctctc

SEQ ID NO: 202694 - DNA, 571 bp, Zea Mays
ctcacccgcaatgatccacgccgatgtggttgtcgccggcttcacagaggaaggtactccatttgccgaggactactacataagtgactacactgagtgcaagcttgggaaggaggactctccagtgtctggggtttgcccagataaggtctatgagggcgggagcaacgattcaatcctggtgtatgggcaccgccaggatggagtgtcctttgtcaggtatgcgaggaagcttgatgctgaggatgccaagtatgatgtgccagtgggtgccacggaggagatggtggtgctttgggccattggtaggttgcggccaccagacacaatgcgcccacactacctcccacagaaccatggggggccaagggacacgacctttgggtttgcccggttgaatttgtcggagacggtggacaattgccttggaccgttggatgcggataataaggaggatcaggagaggatcattgcagatcgcaagacaccacttgtggtgacatctgctccagccgtgcgctacccgaacccaccaaaccctgacaaggtgctttacatcaacaagaaggag

SEQ ID NO: 202695 - DNA, 272 bp, Zea Mays
aaattttgactgacaaaactcagagaactgccagagtctatcagattcaccaacatctggttatgcataaaaccttgcaccatcatacatccatcactttccattccactgatagcatttagagacagtttatacaattcttcaacctccttgtcttcggactccagatgctccaacacaggatcagtcaacaccatgcccatgtcttccacagttaaggcatgcaactgaggcaccaccctcttgggacacttcccttggtgacctggctc

SEQ ID NO: 202696 - DNA, 334 bp, Zea Mays
ctcgtaaccgtcaaccaacggcgaaacagctagacaacttgcgtctaaatggattgcacgggggacctaattttatctcctggatccgagaccatgtaagccttgtatacttcgtcctcatacatcgtgtataggtatgacaattgtaacactttttcctttattgactgtcagttcgggaatgtaccggatgactcacaaaagtgtcctgtgggatctccttcacatgagggcattgattctcccgcacgtcggcgtagtgtccattcggacctgcgtcaactttttattggtagtgtgatagtgaagagttatggccgttacgacgtaaacg

SEQ ID NO: 202697 - DNA, 441 bp, Zea Mays
gaccaccatgtccgacgtggaggatgatcctggctcctgtccaactttgccaaacttgaaaggactctggcacaactcaccaccatgaattctcgcccggattcccatgatcagcacctagcgctcctggagaagggccttgcggacgagacaacatcgacgacaaatgcagccaacactgctggcaagacatgcccatatacctctgctcacacggccgacgaccagcccttgggtggcgtgggcagcttgggtgctagcagtggcaatgagggctacgattgatggcctgcatggtggcggttctagcagcaatctagccaaaggaactgcaaaggaaggttgggccgaggttgacaatcaacgcctcttcagtttcagtggcaaaatctatgtcggacacctctatcctttggccacagttgttgtcccatgtccatg

SEQ ID NO: 202698 - DNA, 478 bp, Zea Mays
cgtgactgagcccgcaccgggattcgtagacgtgcgcgacacagttgaaggagtggtctcctgcggtattcgcggggagtaagtagccgaggctgggctcgggcgaggtgtactttcctctcgaggtccagtcccgcgctttgtcgaatgcgtgtatgcgtgtcccatcagtagttggtaggtgacgtgggggaacaacagccgttgtacttaggcatacatcatcgtagttggtgaaagccgacgagaccgcggtcttgtcgctcctgttcgcctgcagcgctgcgtggggtaggtatgctcattaaatgctcatgtcccctgtgaccttcggctgagacctgcctcggggatgccttccttgctcgagacgggctcgggcgaggcggagacggtagttatggggagagaggacctcggctgggacgaggattctactgagtatgtaccttgtccgagggcaggtccgggcgaggca

SEQ ID NO: 202699 - DNA, 479 bp, Zea Mays
ttagagccatctaaacactatatgttcttactcttttattatattaaggtaaacttactcttactttcaatagctgctctatcactgtacaaaattcagctcgtagagtgtgttgagatttttttttgtacatgaaattgcaatttcatctgcttttgatgccagttctgcaatccatcaaagtactagctacagtgtgctcaatttctcaaattatgttttcattgttgaatcatggtcaccttatccccaccttgcataaagaataaagaaaggtatggattcttgaagtgtgcttcaatagttaatcatccaacctcaatgtccaccttgacagtggtaaacactgattgatagcaccaatacccatactatattgaatgtagcatcaccttgcattgtgtagctgtattgaatatagcaccaacactcatacttgtaatcatttgactgagtgagcaccctgcagcaatcttttt

SEQ ID NO: 202700 - DNA, 413 bp, Zea Mays
gggatgcaagttttgcgacgagatggcggcctctttctttcgcaacgtcaatatatgctggatattctggatcgagctggtatggcagattgcaagccctgttctacgcctgtcgacacaaacccaaaggtttctgcaactactggtactcctgtttctaatccatcggattttcgcagcttagctggagcacttcagtaccacacttttacccgaccagacatagcatatgttgtgcaacagatttgtcttcacatgcatgatcctcgcgagcctcaccttgccgccttgaagcgcattcttcgttatgttcgtggcactctgcatttgggccttcagttgcgcccttcttctcaggctgagttaattgaatactctgatgccgactgggctggatgtccggacacacgtcg

SEQ ID NO: 202701 - DNA, 531 bp, Zea Mays
cgctctcggagtcggctcgacgggtatcgccgttgcccggggaacgcattcgtgcgctggggaagccaagaggcccgtccagcacggggcaatttcttgccggtgttcgatttccgccgcgctgcgtggacaactgcctccgtaccatcaaacgccgtcgggtaactactccacttgcccagctttgtctccgctacgtgtatgttggcttagatcgaagctttaggctcaggatcgggtgatgggggtttccggcgatggcgccccgccgcgggtgggcaagcgccgccgtctcaggcagcgggcggggggcgagagccgtggaccgtcggatcggtgcggacggctgagattaggttagagaatccccttcgtgggattcggtcttgtccaccggatcgcgatcgggcggtcgaggatggatctagggaactttaaatcgacaccgtttatttctaatccaacgcatagcactgcgtaccggttcgctcgagttatgatctaatctgggccgtaggtataggatcgggc

SEQ ID NO: 202702 - DNA, 707 bp, Zea Mays
gttggatatcactaggcgttgggaagaattgcatgcgacgagtctcatcgggagaaggggttaggggtcgccaggaaaggagaaggccatgctaggatctcgaaagtagagccacacacaggaagaatctcgaacctaggatctcgtcggcatcatgcttgtgataacaagcactcaggccgtcggattgacgagcctctcctagtatcacctgacgcaccccagacggatctatctcctgctcgaacattgtcgcttctcgcaacggcatagggcggcaatgtgggagaggggcactcacaacatagggcgatagtgtgggagaggggtgcccgccgccccgccgcaagggcacgatgaggaagagaaggaccagaccgaaggaacaaggctgcaaaaagggctacccttggcgtaggaatggggtatggagggaaggaaagagtagatgtgggagtgagaaaatggctaaccgcctgataggggtcgacgggtcgtggtcgacgctcacaagaatgaggactgaagagtgagatttgagggccttcttaatctgatggctttaataggggcctgttggagttgtgttttttagctgaactctcaaattttggtttagtggattgtttgactgacatgtttgagctgaaaacacaaaagactcatgtacattgtctgacatatggctgatgttacatgcgtctttt

SEQ ID NO: 202703 - DNA, 600 bp, Zea Mays
tttttgttgttgttgacaaacatgtatttgtatccgggagagcagtaacaagaactgtacacttgtctatatctgcaggattcatctatggttagaaagagagaaattattagttcattcatcactgaaatacttcttgcattgaaggaggtaatctaaagtttacgtttggttctggaggatttttcaactattagtttataaccaggaatgcttatctcaaccaggtagctggcagaagttttagctgtgcaatattcatgttcaaatgttacattcacctgtattagaacaataaagttgggaagtttttttatgaatggtgtttcagaaattccaacctaaacttaatacttacgttattagtttgcttctcacctttttggacatctatcagtatgatttatataatatgcagtttcatgtttggtcgtccatgagagtacttgtttattctgataggacagcttttgctaatacatgtggcataccaaataaactcatgtgattaacagtgaccggctgatgtttattgacaggccaacaagaaaaccagaaacagagcttatgatttgcttattgaaattgcccgtgcctgtg

SEQ ID NO: 202704 - DNA, 345 bp, Zea Mays
tcgtgtactagagagaacgaggaccataacatcttggctggaaacttgatagcgcagaagacacagagcatccgagaaagaccaaaagtggagcaccatttgcatggagaaggtctgaagctatccacgaagttacttttgagtgggagcttgtcccttgtgtgggcattccctttcatggggctccaacaaggattaggggaaagcttgcatgctttttgatacctcggtaaaatactgatgcttcattggatgtgaaaggatcacgatgcccaagagagggtgaattgggcttgtctaaaattctaacaaaagattaaaccctaaacatgagcccaacttcac

SEQ ID NO: 202705 - DNA, 386 bp, Zea Mays
aagacatgctgtcaaaagtttgcttggacttttctaatggagacacacataattgggagtctatgttggaagaaaaccggaaattgttgtgctttggagcactggtattaccatggcttttgaaattgttcagtaatgaagcatgtgatggtgaaataatggatcatctcactaggagatgtcgattttcaacaaaagtaaaagcagcaaccagtatcatatattggttagttataaatggtttggcccccaatgataatataatcatgattcttgcaaagtctataatggagcctcccattgatgaagagtttgatgtacttggctgctcggttcttttgaatctcatggaccctttcaatggagtgaaaataatagaggaagag

SEQ ID NO: 202706 - DNA, 329 bp, Zea Mays
agggtcgcaacctcgaccaagacttcactgcaagtggcgcccaaatccaagcgggtgtcccattggtcggcgtgggctgtaccgcactagcggatcatctccacgcggcgacttggccacccaagttccagccacacctgccggagaagtacgacggtacctcaaacccgtcggaattcttgcaggtctacgtcaccgccattacgacaactggtggaaacactgtcgtaatggcaagctacttccatgtagccttgaccgggccggcccggacctggctcatgaacctcaccccagggtcgatctactcctgggaagagctctatgca

SEQ ID NO: 202707 - DNA, 351 bp, Zea Mays
cgatcaccaagagtaacaggctctagactttcacttgacaatggcatgcctaatgtgagtggtgtgtgctctagatggctctctcttgcactaatgtggctctaaccgcgagattatgatttgctaatcacctcactatgcaaagaagtcttgcaagctctatgtaatgaattccaagtggttggttagcaagacactgaatgaggctattggagggggtataaatagtcgtccaacaaaaactagttgttagtgttctatatagtttgttggcacattggaccttccgacaatgtcagccaacggctagttctgataactagtagttactgtctagagggtctggtgcac

SEQ ID NO: 202708 - DNA, 867 bp, Zea Mays
cggaagagcaaggcggacagcgacatcgttgatgagttcaacgacgcgatacggtccgacgaagcgtggcttgagcttaccacccgtatcttgcggcagtgaggacgccgatcgttgccgaagacgaaggagagcccagtcgccgacctggtagctgaccgagcggtggtcgcggtcgtattgcagcttctgcgtagcctgtgcctgctcgaggcggtagcgtacatcggcgaggaactccgccctctcctccatggactttgcgactgcttgcaccctggtgtcgcccggctcataggatctgatcgagggtgggtcgcgcccgtacaccacgcggaacggagtgtcgcgcagggaggactggaacggtgtgttgaagaggtactcagcccaaggtagccacctgacccattggcgtggtcgatcccccgtcaaacaccgtaggtacatgacgatgacgcggttggccgactcggactggccgtcagactgagggtggaacgccgtcgtcatgtgtagctttgtacccatcaggcgcatgagttcgcgccaaaatgcggaggtgaagaccgtgtcccgatcagagacgatggactgagggacaccatgtagacgaacgatgtcggtgaagaaagcctgggcgacggattcagcggagtacgggtgtgccaggggaatgaagtggcagtacttgctgaaccgatccaccacggtaaggattaccgacttgccgcggacgcgagggagggcctccacaaaatccatcgcgatgtccgtccagacaccctgtggcactggtagaggaaggagcaggcccgccggttgaaggtgctcggatttgtattgctgacacactgtgcacacgcg

SEQ ID NO: 202709 - DNA, 669 bp, Zea Mays
cccgctcctgtgccacgctgaagcaagcaaaggccctgcgacatattatgctgctcgaagacgaaccggcagtgaggagcgcagggggtgaccttgtcttcattggctaggcgaaagttccttaaggacgagcttcggcgcgtggtgttgaagtcactgagcggtgtggtgtcgatgatgtaccgccggctggtgaagcgcggattgaggccgcggaggggattgaggacgagaccgcatgtccgacatcgctccgggcatcggctaccgtcttcatgtgttgccagtggttgttgatggagagatccccctgcctcatggagaactcatgcaagaagacgatgtggacctccttgttggccagaaaaagccctcagtggtgatctagagttggcacgctgtctgatcgacctccatggcgaggtcctggatggctggatgtccggtgtgatggacctgaggagccaactgtggatgcaggcattgtccatgattcactggagatcattgcgattggccggagcagtcccttcgatgtggccgtgaaggccaaacttccccagcagggacttgaagaagggcgtcaacttgtggaagtttggatgtttcagctcaagaacaacagggacgtgagagcagatgacaataattgcgtagggagcgacgatg

SEQ ID NO: 202710 - DNA, 305 bp, Zea Mays
gttcttacatgtgaaggttggggcaaagaagcgagggcggcccaaaggcagcaagaacaaaaaagctgtggttgaggtaaattagggctatggaatgacacatgtgaaggttggggcaaagaagcgaggatgccctgactgcctgaaggcagcaagaacaagaaagtggtgattgagatcgattagggctatggcatgctgatcgctgcatcattcgacatctgcatcagttgtaaactacattgtgtatgtgtatgtgtatggttcttttcttgcttgcagatgacttgggcactgtaagatgg

SEQ ID NO: 202711 - DNA, 393 bp, Zea Mays
cgtcgcacggggtgcttgggcccacctgtcagctggttgcaccggaaatcgtggaagtaagtggactggccacatgtttccgccgcatttgcggtgatcattgcgccaatgtacgaaagccatagataaaacccgtagcacctccccgaccgcgagtcttgaaacaccacaccctccgcggaccagccatccctctgatttatcgcgagaaccccaacgcaagggacatcgtcgtccgccgtcgtggacctgtgcgtgcaccgacgattgaaggcatgtttagtgtcgagatcattcattggcgcacgtgggtcgcgggtgtgaagtattgaacttggtggcacgtccaatcgtccgggatttctcgccgtcgacggtgatccgccgcgcgcc

SEQ ID NO: 202712 - DNA, 523 bp, Zea Mays
caccgacatatgagagtagaccataataatttataaattgaaattatataataaacaatatgatacctggtggaggatgtggaaaaatagtggcatattttgttagagcgttattgaacaccctcatatcagatatgaacattacaaatgtctacaaattagcaatggccatgtgttagaaaattactcaccgaattatttgcagtaatttcagcttcaacttcaattggttcatcatcttcccgaccttgagcatttaaatcgatgtcaataccaacacttcggccaccacgaatgatccttccggcactcctactaccgcgtatcacaccacgtttcacagaactagtgccacgaccggcactacgccctgccagtgtaaatcctgcgccacgacgacctgccgtcatagaaccacgtaccatggttggtctgcctcgttcaggtgtcgtaacatcaccaactcctgattcaatgtctgctggttccgacggaggatccatcacaatacacctgtagatag

SEQ ID NO: 202713 - DNA, 500 bp, Zea Mays
gtaaacagaagtagcgatgatgtgtaaatactttcaccttcagctaccacagagataattttttcctatttcctatattggaaacctgtttgctcattaatgagctcctgtttatctatcagggccccaaagctgaattgtgaagcagatagctgtcctgtggaaataatacatccaccagaagattgcaatctaaattcttcattgtcgtttacccttcaggtacactcaattttttaacactcccatgcagctcccaggtagattctgtcataagatgctgcttatggtatcttctatttaggtatgccgtgttgaagatattgatgtatggggtgtcgtacaaggaactgtaattcatttcaatagggcaagaagtgtcactgtgcatacatctgggaccatcagcgcaacaggctttggtaatttgttagttttctacttttaaaagaattctctgtttgcttgtttcctcttgctgcagttcaaatttatggggg

SEQ ID NO: 202714 - DNA, 320 bp, Zea Mays
tacaattcaaattaactaaataattccaatcgaacttgccaactagccaattgcgtgctaacctatttttcataccaccactacaccacatactgcatactcagaacaactcattcacatttcacatatatctttactaaaatctttcctgcatcgcttgcaacttaaaactaagctttactacgcaaacacatgacttccagtttaatcacgaatatcatcatcacaccacattgactcgattcaaaataaccctacatgttcatctcatgaacggagcatttcaacaatcattctaaaatgaactaactccattacac

SEQ ID NO: 202715 - DNA, 1593 bp, Zea Mays
ctagaaattaagttaaacgatgaacttgctgatccgggtatggactgtgtttaatttaccaattttaaacatactgcagagttttggtttatcaattagtttcactgttgcagaccatgaagagcaaagcaatgtgttcggagaacggagagttagcttggaagcaaatgccaacgagcctgaggaaaagaacctagctaacgtcatatcaactgatctccacaccaaaactctgcagcatgataatgacagaatagctgaagagactgataaaggtacaaccgaattaatcctgcccagactgacctagaaattaagttaaacgatgaacttgctgatccgggtatggactgtgtttaatttaccaattttaaacatactgagttctaagtcaaattgttggctacgtgtaattctaatcattagctttgtccattattgtcatgttatatactgaaaggaagactttgtcgttccaaaatcaccaaatggtttatcaattagtttcactgttgcagaccatgaagagcaaagcaatgtgtccggagaacggagagttagcttggaagcaaatgccaacgagcctgaggaaaagaacctagctaacgtcatatcaactgatctccacaccaaaactctgcagcatgataatgacagaatagctgaagagactgataaaggtacaaccgaattaatcctgtatccataataaaaactccgcaacattgatgagtgaagataatatgtatgctgaacatctaaatccacctgtgccaactgattattcactattttttttctaaagatcttgcttagtaatcttgcttcaagattttcaattcactaaattaaacttgctaaatctccagatgtttcgtctttggttttccctattgaagagcatgaagaaaaatatgcagtgagccctatagctgttgaaaagagcgtcagtcgggaagccagtgcatgtgaatctgcaggaaaacccctaactgtcatcttttctaacgatctccacaccaaacatctgcaacatgattgtgatgtgctaattaaggagactggtgaaggtaatattgcattaatatttgttccacaacttgttactgatctgcggagatggtgatgaaaacttgtgctgtttgcactgtgtttaatttaccaattttaaacatactgagttctaagtcaagttgttggctacttgtaattctatatatttttaataggctttatgtttgttgtatctgcaacagttaggcatatgtttcattgtcatttgttgtcttttaagtatctgacatttattttttaaatgtattctttccctttctcagatgttttagctcaggagaattgtaatgaccagcctgttccggcccagactgacctagaaatgaagttaaacgatgaacttgctgatccgggtatggactgtgtttaatttaccaattttaaacatactgagttctaagtcaaattgttggctacgtgtaattctaattatttttaataggctttattgttgttctatctgcaacagctaggcatatgtttcattgtcatttgttgtcttttaagtatctgacattt

SEQ ID NO: 202716 - DNA, 446 bp, Zea Mays
aaagatgcttatccaattccaatggttgatgagcttcttgatgaactgcacggtgctcggtatttcaccaagctggatttgcgctcaggatatcatcaagttcgcatgcgtccgggtgatgtggagaaaacggctttcagaacgcatgacggcctctacgaatttctcgtcatgcccttcggcctctgcaatgccccagcaacatttcaggctctaatgaatgacattctacgaccatttttgcgtcgtttcgtcttggttttctttgacgatatcctgatctacagcagctccatcactgagcacttgcgtcacctccgtacagtgctcactgttcttcatcaacaccaactatttgttaagaagtccaaatgtgattttggtgttccatccatctcctacctcgggcatattatttcggccgatggagtggcgatggatcctga

SEQ ID NO: 202717 - DNA, 478 bp, Zea Mays
tgcctcgcccggacctgccctcggacaaggtacatactcagtagaatcctcgtcccagccgaggtcctctctccccataactaccgtctccgcctcgcccgagcccgtctcgagcaaggaaggcatccccgaggcaggtctcagccgaaggtcacaggggacatgagcatttaatgagcatacctaccccacgcagcgctgcaggcgaacaggagcgacaagaccgcggtctcgtcggctttcaccaactacgatgatgtatgcctaagtacaacggctgttgttcccccacgtcacctaccaactactgatgggacacgcatacacgcattcgacaaagcgcgggactggacctcgagaggaaagtacacctcgcccgagcccagcctcggctacttactccccgcgaataccgcaggagaccactccttcaactgtgtcgcgcacgtctacgaatcccggtgcgggctcagtcacg

SEQ ID NO: 202718 - DNA, 296 bp, Zea Mays
ctggtgtccactcctgttgacactgcaggagaagatatcacctctgctgtcgttgcggcacctcaggtggatgccatgcacactccattgactgttgctggcatggggggaacagattctgtcgcggcagaatccgacagctcgcctgcaccagaagatggatcctctgcggctgcaccagcgactgcatcagagactcctacaccacctggaccacgaactcgacttcgtgatggcattcgcaagcctaaaatctatacagatggtatggtcaggtatggatgtttcacagcctc

SEQ ID NO: 202719 - DNA, 305 bp, Zea Mays
ttggaccttgcacagcttgacttgagcagctctaatttgtaaattgcagagtctgatgtctgaccaaggtgcttcgaggccgagcaggagcagtcgtcaagttcccacaaagagcagtgctgtggttgcaggaggttcctcaagtgcagctacaccgacgagtgctgctgcaaatgaaatgccatcttcaagtgttcaagctccaccatcagaaggtacagaacatgtggtcgtaaatgatgatgatgataatgtacaagttggatgcaaaaggaagctgaaatctgatgtgtggcttgaatttg

SEQ ID NO: 202720 - DNA, 340 bp, Zea Mays
caatcctagacaatccaatcaggaagatccttgcctattacaaccaaataaccaaactaggagagagcgcacaaggcaacatgcctgtgcagccgcactacctaaaacccaagggtcctgcctactgtagcccatgctaacacaaacatccgatgtgacagagactaaaatttagtgagggaaacaaaacggggcttagactagacttctttcacatttctatttgcttaattcaaatgatgacagtgacctcacgtgtaggtgctagggactaggtctaactcatgaaatattcaaaagagaacaccttaatgacagcaactaaacaaaacaaattatc

SEQ ID NO: 202721 - DNA, 480 bp, Zea Mays
gagcgtggaggggaggcgacgggcgaggagtgcgacacaaagggagtgagggaaggaacggggagtgctgtaacagtaaccctagcgagatctgagtgcggcacgtgggagggagtggagggcacgtgttacagaagcgagccaggctcggttgagaagtccaccccgagcgtatgaattgagccaagttgggtgggtgcttttgcatctactaggcgaggcccaagtactaatgcatgcaaccaaacatgttgcttcttgcacttatgaaacctggctcgggctgtatacaaggaaccaatcgcgtccctagggaacatcaccctcgagttgttgcttggacttcacaagctagtaggcaagagaataaacagtggcatcgcttacccgagagcattagcatgctcgcactcctgcgcaacaacaacaacaacaacgtacattgcggtggtgatggcagcaacaaggacagggtgggca

SEQ ID NO: 202722 - DNA, 353 bp, Zea Mays
cgcgtgcgccagtgccttcttcctcatctccgaccgccgcgtgtctcgtccaaattcgcggccaccgcccgtcctctctataaattgagcccgtgactagctccgtaagatcgtcagctaactagccaccgctaatcggccacaatcatccacccgtgtgctcgaattcggagtttcccccaaatccgatttccgccaccgtgaaaccaagctcaccgtcgccagccatactccggttagttcctcccctctgctcccttgtttaagccttcttatgcgtctacgatgcttgccgagccattgaattgaactaagagccctctggtcgccgggaacacgaccatatagtcgcc

SEQ ID NO: 202723 - DNA, 637 bp, Zea Mays
gaaatctggtgtatggcctttggatccagcaaccaattgtcctaaaatctaatgcatggtctttggagtatcattttcgttgtttcttagtggtaacttggctgcttaccgcggtcagggttacttgtactgttgcactactccatatcagcagactttgtttggtaagaagctgaccattcaaaactaggcaccaatgcaatatatcatgattgaacaatttaagttatccagttttatttgctttcaacgccatacttaaactacgtgctttcctggtcagtttgtgtttatttcaaatattttgttcattaccgagctagcaaatagcaatgattagtttctcaaaacatgtagtgtgttgtgtcgttgcatccgaattgagaaggatctttgaatatgttcctatagttgttacctacttaccattgtgttttcttatagttaatctttgcttctctaattaccattttgtttttctcagagttaatcccaagcagtgcagactctcaagcatccgtgttgcctttttcttcttgtgcacacaagtatggagcatctgtcttttacaacctcgtgttgcttccagtatactgtctttccatgaattatgtctacctttgaattttggaaatta

SEQ ID NO: 202724 - DNA, 483 bp, Zea Mays
atcttagcttacatttttttcctaagtttgttgaactattagatgtttaagacaaaggtctgtaataatttattactctttattatttgagcattgtgcaatggtattacatttatgtaactattgcatacgtgatttggatcctggcatgtacatagtttgcattcagtttaccttctgaaaccggtgacatacacaccagaggtccagtgtgccaatattgtatacaagacctgtccggtgcctaccatgtcagatgctcgctagagctaattgttgccaattattcagtctctggggtccggtgtgccacgaggctcgggttcattttgcatcctctctgggtccagtgactcgtctgatgctcatcggacctggttcgatgcacataggccaacactcaggtccgatgtgccaccgttgtacattggattagtctggtgctcctctgtacaatctgattttctgtttctttgagttcct

SEQ ID NO: 202725 - DNA, 393 bp, Zea Mays
cccgcggcacgtcgtagccgttgtgcaccatccacctgatgggcaggtccttgacgctgcctcccgagctcaggctcggcttcacgatgccctccaggatgtcgatgtagtagtccggcgggttcacgcgctccggcaccacgatgcccagccctgtgaagtactcctccaccttcttcaccggcccgtggtacaccgtcatgccccccttggccagtaggatcaggtcgtcgaacatcctgtacagtgtgtagctgggctggtggaccaccatggagatgttgacgccctcgagagcctcgcggcggagggcgcggagcaggagcagcgaggatgcgctgtccagtccagacgtcggctcgtccaggatcagcaccgacggctccatcacca

SEQ ID NO: 202726 - DNA, 301 bp, Zea Mays
aggatatgcaaaaaaatcctaacaatctaacacttgcaatagcaaaattggtaaggttagagaatacaatacaagcctttttgttgtccatgctttggtatgtactctgcacttctctttgttgttcttgtagcatccatgatccatctctcttatcgaagatccaacccctcttcttttctttcaagctgcaagctacattaacctatgaatattgacatattaaaacagtaatacataaaatagcagcagcagacaggtatatcaaattaaacccacaatacattggtgggaataaaat

SEQ ID NO: 202727 - DNA, 308 bp, Zea Mays
caaggaccaggacgggtccgtcgacgttggcggcgacacgcggcaggcgagcgacgaggtggcggacactggcagcggcacgcagtcgacggaggtgagtggggacgcaggcaagaaagatgatcgtagcggtggcgacgcttcgcagacgaaggaggacgctgatggggacaccgacaacaaagatggtggcgacgcttcgcagacgaaggaaggcgctgatggcgacaccggcaacaacaaggacgacggcgctggcgccacgcagacggccgaacctgtcactactgtcggcaacgacgtcaacc

SEQ ID NO: 202728 - DNA, 367 bp, Zea Mays
gcgaggaggacagggtcacgccagcgggtgtaggtggaggaagtcgggtcgaggacgacgggagccagagagcagatgttctggacacccgctgcctgggcgtgaaggttaacgatgatggtggcctcgtactccgagggaggagcgaccactggaggcgtcgggatgggcttgacgacgggggagccgagcaagtgatgttcaacatcaaccaactgtagggcgagggcattcgtcgtgttgcgctcgtgctcttaggcgagggcagcatcacgttcgtgttcccgagcagcggcaacagtcaccgtggcaacagtgagggccacgaacaaggtggagcgagcgttagcgacggcggaggagaggg

SEQ ID NO: 202729 - DNA, 278 bp, Zea Mays
atcaatctctaataatcaaagtgttagcaacattaatggttttttgggagtgtctatgtttagtgatcagccaggaagtaaccatgttatcagacctactgtctttggaacaaataatacggtggaaggaagagatgtcaacctcaattcatgtgtaaatacaatatcttttcctattgctaatgcaaataatgaaacatcagctggcctgaatgaagctaatcggttatctactactgcaaaatgttttagtggcagttctaataacaatgatggtg

SEQ ID NO: 202730 - DNA, 287 bp, Zea Mays
ttcgccaagctcccagggtcaatgtgattgagggatgtggtatgctacttgtgaaagggttcaaaaaggccaggatgacattgttcctacattcctggaatggggatgacacccccaggacaaggaaggtggcacagttccacgttcctggtgacatgttgtgtatcaaatgggaggccaaatcaccacgggattactctaggaagggaagatgatgttgataatttgagtcattgttgcaacatctgttcatggtttcatgcctcattttataagtcatattgccc

SEQ ID NO: 202731 - DNA, 289 bp, Zea Mays
aaagcaatgctgatggaccctcctgttatgcaaatggactgcaagttgaaaaatgacgtggataaaacatcatcaattgactatgataggaaggtgaccatctcacatgatgattatgggtgggcaggctctgatgtcaaaccaaaagatgatatagtatgtaaccctgtggaggttagtaatgcttgtcaaacaggcataaatgaggtattagattctgcttccaaaaattcacctcttaacttgggtgatttacctcagggtgcagaactaagaaataagaatggtg

SEQ ID NO: 202732 - DNA, 319 bp, Zea Mays
cggtcaactatcaatcgtgctgatgctgctggtacacctacatcgacgccgacaccgagtgcagacccatcaagtgccggcgatgctactgctagtggcacaccaacaccatcatcaagtactaatgctccacctgcagcagcaccaccacaatcaggtatagataatgtcattgtggaagatgatgatactgttattgttgggacgaagaggaagctgaaatctgatgtttggctagagtttgaacaagtaactgttggtggtaaattaaaagctcaatgtaattggtgtaaaaagcaattagttggagatagtaaag

SEQ ID NO: 202733 - DNA, 522 bp, Zea Mays
cggagggtgaatgtgaacttccggatgtctccaattgcttctgatcctgtccactccattaccaagaatagcactccatgtatcttggagtagagggaggaggagggagctcagccagtcatctatggattggtgccccaaacaacaagaccggccgagagggaagagcggaggccggaggggtcagctcttgcacttgtcaggggaggctagtctaggctaggggatctctgattgcctcctatcctctcctagccctgccctgccgcagcgcaacgactccgaaatctgaatcgccgcctccctccgccattcgcgtcagtgacatctattccttcaattcattcagtcaggtaacatcctcgacgcccccagcatctatttatgtgtttccattccattgtacattgccagttggcgtatagctgattgcgatatggatcatggatcgacaggcgacagcccatgcccttcacacaatcaaaatcgaatgttggttacacaactggaaaaataacgcac

SEQ ID NO: 202734 - DNA, 285 bp, Zea Mays
cggcctggtgcgccgcctcgctcaggctggtggaggaaggtgaagacgcatgacccctgatttgataaccaacggccaggatcatagcgcagcactgtttcagactggggccatctgggccgtccgatttggggtgaaggagtaggatttgggcgaacttcataatatctaggccgtcgatcttgaatctgacggatcaagtctcgtaccagttcggttgattatagatctgatctacgccattgatggacaattctacagtccagatcaagtaaaaccttgcgc

SEQ ID NO: 202735 - DNA, 487 bp, Zea Mays
atagagcgtgggttgtgtggttcccaaggaattgtgattcgatagcgagccagatcatgcgagcagatgtgccacgcttagagacaatgtcttcgaggttgtcggagatggcaccaagaagccaggtgcggacgactctgaagccaggaagacgtgagaacaatgtcttcgacgtagagaaggtgtccgccttggcctcaacaaaacccagtgagagcaagaaagtggtgaaacgactgtaccaagctcggggcgcttgcttgaggtcgtagagggatcgattgagcttgcagaccatgtcggggtgaatcgggtccgcaaagccgaccgactgagtgcaatacaccgtttttgtcagagtgccatggaggaagtcatttttgatgtcgagctgatgcactggccaaacctgtgagagagccagagttagagcagttcggatgataataggcttcaccacggggctgaaggtcttgtcatagtcaac

SEQ ID NO: 202736 - DNA, 336 bp, Zea Mays
ggaacaacccgcaatgcatcagtgggaaccaagtcagtgtcatcagcagaagccagaactctgtcatcaggtgcgctggcctctaaagcgactccttgacccaaggcttgggctatcgccatgcaaccagaatgtggaggagaagaccctacgtgaacatccatggaagtgtgggagggagaacccactcggacaccctcgggggctgggtcacaacttgcgctacccatccgagctggatcatctccggcaacaccctcgggggctgggtaagcgccagcaccatccttaagggccaagttctctgcaacagccacctctaaggctgaaggaccc

SEQ ID NO: 202737 - DNA, 353 bp, Zea Mays
caacaagttagtaacactggtacaattcgattagaccatatttctataaacatgtgttaacctaaatgggtgccccaaactaacttgaccatatacaactacccgactatatgcaactaccttacccatcatatggttgcataacccctctgtatcaacctaacaacaaaacagacattctaaccaacctacctcgtgaaatctatcctacccacaattagcttaaccacatgtctctaactcggatgatcacaacaagaccaaaggaaagaaggtcaaccttgacaaggaagaatgtgaatagaatcagaacttcagatgaatcaagatccaccatccaagatgaagtcttt

SEQ ID NO: 202738 - DNA, 371 bp, Zea Mays
catccccagcttcccgcgggcgaatattgacccatccactgcgcaaacattcgcaagggcacaagctcccaattcgcctggtttctccgttcccgcgcctggatttcgtttcgtgccttcgtcagttctccccaccgctcggtttcgctcgcgagagagcaccgaatctctgctatatgcaagcaacgaaggacacggtaggacgtatgtgcgcagctttctatggagcacccaatattgtggctcctgtgctactcgcctactccgtccagaaccatagcaggacgtttgctttctgtgcagcacctgcacctgctatcgtggcttcgtctactccgtccagcacctgtgcagccccggctccctctgcg

SEQ ID NO: 202739 - DNA, 383 bp, Zea Mays
tgaattcttggatgaacttcagggtgcaagattcttcaccaaattggatctgcgttcaggttatcatcaggtccgtgttcaccccgatgatgtgcacaaacagccttccggacacatcatggtcattttgaattcttggtcatgccatttggtctctccaatgccccggcaacattccaggccctcatgaatgaagtgttgggacagttccttcggtgatttgtgctcgtattttttgatgacattctcatttacagtgcatcatggtctgaccacctaatacatgtcaaggcagttttggagtccctgaaagccaacaagttgtttgccaagtagtctaagtgttcctttggaaccacaaccgtcacctatctgggacatgt

SEQ ID NO: 202740 - DNA, 274 bp, Zea Mays
accctcctcacctgtaccagaaggatacaacatagcctgactgggaacagtgaactgaaactgaaaatttgagttttctgggccaacttcagtcaactgagctttgttattactgtcccagttccatgcctcatcttcttcaaacttcacatccctactgatgcacaatttttcagtaattggatcaaccattctgtagccttttgtccctggttcatagcccaataggaccattttagtggatctatctaccagcttatctactccggggcct

SEQ ID NO: 202741 - DNA, 980 bp, Zea Mays
cgacaagttcccaaagtactacggtttggtaaagagcgtcgattcagaagactgcacagtccacataaggtggctggagcactgtccgcgcgaacaagtggaggagcacctggcacaagacggcctgtccattggctgtgggttattcgaagtcagcaggcagagtgagacctacgactgcacagaagtcttctctcacagtgtggaggtgacgggtaaagggaaaagatatgagatccttccgtgtgctggccaggtgtgggctgtatacaaggactggagccgcacatggagcttcgaagattacagtagatgcgagtatcttctggtcgaggtcatggaggtttctgatggtgatataacagtgtcgtgccttactaaagcggagggctttagcactgtgttcatgcaagagcagaacggtaaatccaggagaatagcaaggagtgacttgactatgttctctcatcaggttcctgcctaccgcttgacagacgaaactggcgatctttgtggttactgggagcttgatcctgcgtctttaccggaagttttgctggtcaggaagaccaagtgaaacattgttgagctgatagagaggggttttggcactgtgaaaagtgaaggtatggttttgaacagagcagtttagcatgattgaacatgtggcattttttttccagctattgttaactactcatttgttttctccgcagttatgcgctggtgacaaggctgtggtactggattgttgtttatttttggctagttgtaccttgtttcgtgtaaacaggctagtccattagtttgctacctgatgccactatggcaagccttttgctggctcggtctcgctttaggctacgtttcatcatctcacctgtttgtctttgctacgtccattgtggacatttttggtgggtataccagttggtcgcggctgtcgttcgcagcttactagtgtttgcacatggcacgcc

SEQ ID NO: 202742 - DNA, 278 bp, Zea Mays
gtaaagtagtgcaatggtcgatataaaaggtaatcatggaggaataaacatggatttgatgatggcgtcgccgaaggatgccccaaagccatcagaccggaggagaccgtccccggaagatgcccgaagcacgctgggtcggaggatgtcacgtggcccacaacacggagggagaaccccgcatgcgcctccagggagccgtcgcagtcgcgcctacagatcggggagttgttgtcgtcgtgccttcggatcgaagaactcccaccgtcgcaccgccg

SEQ ID NO: 202743 - DNA, 321 bp, Zea Mays
gaaaagggcaaggtctaattcgaaagactcccaaggctcaggctacaactagggtggactgcgggttgaatagtttgaagtggagggtctctttaagaaaatacctggccgaaggggtacgggtgaacgcggaccgcccagattagatcctatggtgcagattagatctgggcgctttataaaccggtacgcaacgtcaaccatacgatcagagatccacggcccacgaatgcccacgatccaatctaccgcgagccacacgattaaaatctgatggctcggacttaaaatggcgaaggggtaccctgcttctattttcag

SEQ ID NO: 202744 - DNA, 285 bp, Zea Mays
gttacctagtaggttgggcagtcggaccaacaatggagctttacgagttatccatgaaaccacgaccccggcccagtaccccagacccgatgaacgctaggcatagttgagcactggaaaaacattataggggttgcgtaccggcggttaagatgatgaagacgcctgtctgctcatggtgactccgcggtgtccctacaaccctggtgagcagtatcgcctccaccggtagttcgtcgagcttggtagcctatgagatgtgtacaacgcgctggagaatctgca

SEQ ID NO: 202745 - DNA, 1199 bp, Zea Mays
ggctgattcaaacgaccagagtccggacactcacactcccctgctgcgcctgccgcctgcgtttcggccaccgcactacttccccaatccccttgatatcgcccacccgcgctcgccgccgccgctgggcggcgatggaaaccctaatggtagaccgcgtccacagtagcctccgcctcttcatgtaccgcaacgccatattcctctgcgagcgcctctgcgcacagttcccctccgaggtagcccccttttatccatgttccttaacgaggctagtacgtctcgattcggtgtattgcgcgtgggaatggtacatctgggggtcggatcaggcgtgtggcagtgatttgagcgcggggctcacctccgttgtttagttcgattcagtagtcttctgtcgttttttttgaagtgtctagggttgcattaggagtagagtagcagagtggtgagcttttggtctgtagcttatctaggcttgaattagaacagctctctatagctggtgtagggaactggagtatcccgcgtgattcatctagggttcatagtgaacttttactggagagggtgattttctgcctaaatttttgaggcaatttcacaggtaaaagctctactggtgtttatgcataatgggcattggttacagtaacgtgtatgcctgtgagttcttttccttgtcagaaccttggggtgacaatatttatagcccattaggtattcagttgcttgaattctatgttcttacaggacatgctcacccactttcttttctaaccttataattacttgagggtgtgggttttaattttaattttggttcttgacgtggttcatgggtcttcatgtgggatgaagttcaggaatttgaatgcatggttttgtgttttagtttttatttaggttcttgatgtggatcataggtcttcatgtgggatgaaagtcgacataacttgaatgcatgtttagtgtgtatgagactatgcattcaatttcttagcagatgacctcactgattaacctgaatctgtgcctgctttacaatgctttcttttcaattagtaattcttgctcacaaaaaatcttagtttattttttttaattttaagtccatttgcaacatagttgtgggcactaaatgttcttgctctacctcctctgcacagaccaatgtgcaattgctagcaacctgctac

SEQ ID NO: 202746 - DNA, 503 bp, Zea Mays
caagcgaatgtctaaactcacaggttatcgcaccccaaaatcctgtgttaccagctggatttgcttctgtccttccatgggttcctgacactacttctgctgttatgctccgagtgttagaccttgactcagctattttgtatgtgcaaaatcaaaagatggagagggatgatggaggttttatggtaagctaaattttgataatactatttcttttttggttggaagtaaggtatctctgttgttcgacttacacatggcatcaaatatatagcttcatgttttggtcaaaacctacctcaatgctctgctaatataccttcaaatcatgaaatgttttcatgtgtttgattatttatctgggcagacttttcagtctatatatatgatgctatcaccagtccccttgcaaattgcataattatgtatttatattttcccttacctgcagaaatttccatcaaggtatacagttgttaagagcaaacaagaaacaattccac

SEQ ID NO: 202747 - DNA, 1625 bp, Zea Mays
aaacacgtgttcctatgtttcaaaatgattaaataatttatcaaaagtaaataaatatatttgtgttgaaaaaataagaaatataaatatatcataatcaatattttaaaatacaacatatgaaagtctaaactacaaaaatgattgtaaagataactctaccattatgtaacaacttaatgtatcgacctatgttttgtaaattctttggatataagaccgcttctattttatttgacagcaaaatccttactatatacaataccctgatgtttcctttcatcttctgccaaaaaaatcaggaatagccggataccatatgtgtacatatactagaactttgagtttaaaaaaaattataagaattatgttatgtaactttctgtgtaaattctatacatgcaaaaaaatttgctcagcctctttaaggcgtgactgaacactatccactaattttttcatgttttcatactcagtcatgtttctgagtacgttatattagacatctgtatagttaagaaaaggttcaagatattaagcatttatgcaatattttttctacacaatatgaatgcttcatacgttaagaaacctacagataaacttgtatttactgaaatataacacagcatcattcgttcattaaatgtaatgattaattaaaaaatagatatgtatacacctttaatttttccacagttgtaagtttagtttacaatgtccttatcattttctgtaagactaacatgtttcttatgtcattgtaaacgtgttagtcagtttcatttatctaaataacgattaaattatatagacatatagtcataactaaatattagagacttttttaatcacgctgtctaattaaatgacatttttcagtcatttcgttgcatgttgcaatataagacagtaaactgtcatagtcgtctcttacatgtttaaactcaattataagactttcaactttgttcaataaatcaatgttttgtttcgcagctttattttgcaatgactagaaggacagcagcataattaatacatcaggattttaattaaacagcaccaaataaaaattgcattgttcattaacaaacatctatcatccagcgtctaaagttgaaccggagaatgagcatatgtaagaaattaacatgcccagttcacatgaggtcacgcagaggatcacgtgagtcgtgagatgttatttgtctttttttctccttccaaaaaatggtatttatgcattcttccgagtttgaatcgacacatccacgaggatggtaacagaagatacgcaggcaacggtataatgttctaactgaagcacaacatctagggacgagttgaactgggcatgttaatttctgtcgtatactcattctctatttcaactctatacgttaaatgatagatgacagataatgaaaaatgcaatccttatttggtattgtttaattagaatattataatgtcttaattatgttattgtccttttagtcttttcaaaatgaagctgtgaaacgaaacgtcgatttattaaaaaagttgaaagtcttaaaattgagcttcaacatgtaagggacgaccgtgacagtttactgtcttatattggaacatgcaaa

SEQ ID NO: 202748 - DNA, 507 bp, Zea Mays
caccattgccctcaatgcccgcgacgaagggccagagggtggggtggttggcggcgcacgcgaaattgaggaggagagagaagagaggagattcttatagtgcctagggacgaggccgaggtgaggatttcggtcaatggctccgaggttcgcggcaagctccgccacggccgggattccgttgagggcgaatacaccgagcggatgggcagctgacctacgcggctgacaggtgggtccctgatgtcggtgctcctctcttagtggctgctagtggggccagcggatcagtaacaggcagccacgcgcgggcggagtgggtgaagggccgcgcggcgtggtttgctgatgggccaaattcgtagctgccggcccaaacagggtttcttcttctttttatattatttccttttctctctcttttcaaattcaagttgtatccaatttaattcaaactcttgtgaccaaatattctcagatgatattgcgccataaacattactattt

SEQ ID NO: 202749 - DNA, 315 bp, Zea Mays
gcatatgtgaggttgaagacgtagtacacaatcttctacttgttgtgctgcagcattcaatgcgaaaaaaagatgggtggaaggtgagatattttggtatttgtttctatcagaaagtaacatattttatagagccaaacttcctttttgcggtatcttctgcttgggatcactctctcttatttgagatattactttgttgtagcctcatactttttgtaatgtggcaatatttcaggacgtagaggcaacaatacattgtgcagaatggctttcaatggttggaggaactagcaccggtgaccaaagaattag

SEQ ID NO: 202750 - DNA, 350 bp, Zea Mays
ggggtggagcagaagttggcaacaattcaattgtgacagtagttgaggatttctgatgatttgtggccggagtagtagttccaagtgactgaaatgtcaattgtctctctggatgagatggaaggcctacaacatgaaaacagtttaattataaaaaatacatgaaaattattcttaaaatgcattccgacttaacctgaattgttgagggtaggttgggatgagccttttgcttctgacatcatagtagaatctgataccagcaaatctagtggcgatggtggagggcgtagcagtggcataccctttgttacaacaggagtacctgttgtgtcaaaggtcaaagtagt

SEQ ID NO: 202751 - DNA, 416 bp, Zea Mays
gtggtactggaagtgggggaagtgcttctagaagtggaagtggaagtgctccaagcacaagtgctcttgcatgcgctcctagaagtggaagcacaagtgctccaagcacaagtgctgcaagtgcaagtgaaagtggaaggggaagtgtaggaagaagaggaagaggggggaggcttgcacaatggtttggaatttaatgatcaagatagcatcatgaggtgctgtttcttttgtatgagatgttgcttttgtatgacaatgtaatggattcatggtactttgtcatgcttttgtgagacttttgttgaactccatatgtactactttgttggatttgttatgtgacattgtgttattctatatctatctgtgttgttgaaaatactatcgaaattctgttgcaatacagtcaaaat

SEQ ID NO: 202752 - DNA, 432 bp, Zea Mays
tgcctactcccctagctccctcgaagtggacgtactcgatggtgaagtcgtcgtacgttggagtcgtgccgtcgtccaccgccttgtcccatgcccatcgtcgcccttcgttgaacactacattgcgcgccgtttgcacacgctgtgttcctgggtcatatgtgcggtaggccttcgagccctccgcgtagccaatgaacaccccagggtgctcctgtcgtcgaacttgccgacgtggtgaagctccttggtgaacgcgacgcagccgaagacccgtaggtgagagaccgccgacttgcgcgcatgccaagcctcgtacgatgtcatcccgttgagtgccttggtgggtgagcggttgaggatgtagaccgctatcaccaccgtctctccccagataacaaccaacattcccctctgtttgaggagagttcg

SEQ ID NO: 202753 - DNA, 649 bp, Zea Mays
gttcagtatgtcaaaaccaacgttttccactattgtgttcagcatgtagaaagcagaatcttcagtgctgctgcgtgagaggagactacgggatattgccaagatatttggaagcctgccctcttggtttagctcatttggaattttcctaaggaatgctcgcagcaagcgaaccaaggcaggaacacatggtggccggtcccaggtggcattactgaggagaacaccaaatagctgcatatagttctgcgagagaggtggtcggctcaaattgacgagttgtgcaaatatctgaaaagcatatggccagaactctgagatgtcctcgaccaatatcctctggagcactgggaagaggctggcctcaaaagcagggagtagcgctgggtcctgctcaccagtccggccaataactgctgccagagcctcaaacaagtagtggttgaagtcagggttcttggggttattgcacacttccatgagaatacccacaagtcgagcagtgatctcatgaacaatttgaccagctatattagcaatcccaagcacccgcatcaggcacttcatcaggtaggggttctcatatgaatcagggaaacctagtgctgtggacaggttctgaatgatctgtggggcaaatggattgata

SEQ ID NO: 202754 - DNA, 355 bp, Zea Mays
gcactatcaacatgatgtcaagtgctgagcagcagttttcagttcctcttcctccgcagcagctttttgtgccttggacttccagttcgtgtcgatgcagggttttcctcagtatcaggccacgcctactcctacaccgtctactcctatgtcgtctcagtttggagctccgcgtctgcctcacccggcggctcagtggggttcttctgttaatttcactccgggagcttcctcttctgcgggtatttctggagcttatgtgctacccgcggcggatggcaggaagcaaggagacgtggtgacaggtacgatttcagttgattcgtttgcagcccatgctctttttgactctagc

SEQ ID NO: 202755 - DNA, 328 bp, Zea Mays
tcgactcctcgtagattttgtgctgcagcctaacactgaggatagacacattttcagcttatcattgaatggcagatactctgcaaagtcagcttatattggttttttccttgggtctaccacctttgggcactataaaagggtttggtgatcttgggctccaccaaagtgctgttttttcatttggttggtggcacataatagatgttggacaactgatcgcttggcaaaaaggggattgaatcaccctatcagatgtcctttatgtgaccagcaaggtgaaaccctgaaccacttgctcgtgaattgtgtcttctcaagagttttc

SEQ ID NO: 202756 - DNA, 453 bp, Zea Mays
ggcctaagcccattacacaaagactccattacaattcaaccaccataactctaatagttataattctgaatggtttacataattacattatatcatcatcacgcagagtgttgcattgtgatagagttctgttgctattcttctgtaatgtctttcttttgcttgtatgtccagcagaccgaagtaattgcagcagctgcagctggtgttgcagctgagggtttgtctcctgaagaagcaaaaattcaagcagagaatgctgctcatctctcagtagcactagcagagaatgcaatagttattctgatgcttgtggaagatcatctgagatcacaagctcaacatttttgcacatcccttacaggtgatagcatcacatcgtccacatcaatgacttcattggctgccagtcggtcaaattctttgagcacagctggtaaagaacccatggct

SEQ ID NO: 202757 - DNA, 313 bp, Zea Mays
ggaaggggtgatagcatagctctgagagttaaccaagaaactgactgtacaatcttgccaaatttgcactttgagacccatcataccataagtggcgctaatccattgatcatgtccaataaaatgattgagccatgccacatccgatacagtgactatactccttgtcaagaccagaaccgagcaatggcctttcctagacaaaacatgacatacagagaaaggcattgtcctgtagagaatgagaaactgcattgtctcatcccagcaccaaaaggatatgtcacccctttctcttggcccaagagccgtg

SEQ ID NO: 202758 - DNA, 296 bp, Zea Mays
aatatgtgaaaaagaaggccggccccagtgaccggccagcaaagcgacctcgctcgcccattcgtgagcgatatcgggtaagaccgattggaccaccccaccaatcggaagaaatggaaggttatactgtccaattgagacctaacatacctacatggacacctccacccccttatccacctatgccatatccatacacatatttacctccaccatatgtcccaaatcaaatgtggggcatgccaccatatccaattgagattcaacaggttagcacctccagtacaagaccgatt

SEQ ID NO: 202759 - DNA, 419 bp, Zea Mays
ctgctaggaaagctgaccgtggtccagatagattgcaagcatcacccattgtaatctccaacggaagaaatatacgtctagctgctgcgagtatacatgtaaatggaagatttttcgctaattcatcttctcttcgcttgaaatgggaagccactggatgtgaagggcttgcttactttgaagaaaccaaatctgttgaaatgcttgatgagtcagcttgggagagatctcttgtcctacagaattctacaggagtggtcagtatagtttatatcataagttgcattgtattgaactttggtttctttaattactcgtccaaaaatgaatgcaattcttacttcccgacaagtcaaacagtttgaagtttgaccaaatttatatgaaaaatactaatatttatgataacaaattaatat

SEQ ID NO: 202760 - DNA, 360 bp, Zea Mays
ggcccagcgcgtgcacttaacaaacacatcagtgggaattggcccactggactagcccacagcttccgcccccgtcaagcccaacggcacaagtagtgcaactctggaaagcagagggcagaggcaacaccttccggtgtagaggggtgactaggtggtggtgagcgtggtattaacgcctcaacggcatctatctgcttactttgctactcgcaaatcgcaagtaaatcaaatcaaatggctagctgtactagcataaattcggatttcagtagttggtgcacttgaaactgcggttctttatgcctaacgtggttatcgcctaaaacaaaaaacaagaggctaactttacttcgattt

SEQ ID NO: 202761 - DNA, 302 bp, Zea Mays
tgcagacatgctttccccagtctattcatgtgccatcaatattccaccactgctaccaaagtcgaaaccattaatgatgatatcgacaccgcccataaacaacatataatgagacgtcaaggagacaaagatcggtacatatgccttccttgcatataaaattgattctccaatccatctcaacaaccctagtatgtgaaggatatcttgtgacagctctctcctctaccaacctagtttcccatgctactccatcttctctgctctctatttacaccgcatcgacctcctcacctcgtgtg

SEQ ID NO: 202762 - DNA, 523 bp, Zea Mays
caacagccgagtaacaatctgcaacagctcctccaacatccattactgagtcagcaacaacaaagctcaacttatcttgaaggtgagcaggaaaaaatgggtgctggaattgtaacagtggcttttgctggaaatgaacaggtcaacattccctttctccctctctctccctccctccctccttagatcacaatcttattcatctgttcttttctcgaatttgtagtttctgatatctgtcaaaaccatataattcatactttcctatggtttgtctcacaggtttctaagaatcgaaatgggcgaaagcgcaaacatcctatctcctcgtctggcccagccaatagctctggtactacaaatactgctggtgcttcccccagttcaacaccttcaactctttctgcacattctcccggagaaacaatatcaacaccattgcagcaccaaaatgcgagctcatgtacgactttagttgtttatggttctgagggtccagtaccaataggatcgccgaccaatc

SEQ ID NO: 202763 - DNA, 330 bp, Zea Mays
gggcttcttgtgagtaggtggcggcgtgttagggctttggctgatgttcgttgtgggaagtcggagcagcttatcattataacttgtgataagtttcgcaacgatgacgtgcggtgggctctgtcggttgtgtgtagttgggttgcttaggtttagttgtctaggttgctgtgtttaggtcacctgttctcctttaataaactgtgactgatgtttttaggcctggttttcctaataaacttggtcaattctatttcttcttagctgaaaggcagatctcttgccattgtgttaaaagaagtttcctgccatcctagtactggatatttc

SEQ ID NO: 202764 - DNA, 305 bp, Zea Mays
ctcacgtctctgagatccctcaaatggctgatgcggtcggtcagcgggcgcggcagctcgtcgtctggctggagcaatggctcgggaggcagcctcgtgcacttctgggggtcggacggggaggtcaagtgcgaccttggggacgactggagacggcggagcgtcagagaagggagggggctgccaccaccgtcgcccgctctggttccatacctgcccaacggcgcgcccctgcggttgtccaagaagcagggggtgaccattgccaaagggcataagaactatgagctaatgctcaatctgca

SEQ ID NO: 202765 - DNA, 718 bp, Zea Mays
gtttggaatgttagaggtctgaattcgtctatgcgtcaagattctgtgagagaacttattgattcttcaagagtagatgtggtctgtcttcaggaaaccaagatgcaagttatttcagatcgattcattctttcattgttggggacagactttagtgattttatttttctcccttctgttggggcagccgggggcattcttgtggcttggaggcgacatgtgggtttcactggacaaaaaagatgggataattatagtgtatcagttcagttttgtaatgacagggggactgattggtggctgacctgtgtttatggtcctcaaggaagcaatgagaagattatgttcctacaagaaatcagagaaataagggctgagtgtctgggaccgtggatgttggctggagacttcaacctcatttatagagactcagataggaacaacaataatttcaacagagcaatgatgggaaggtttcgaagcttaattgaggatatggccctgaaggaaatccccttacatggcaggcagttcacttggtccaaccaacaaaatgtgcctgtactggtcaagctagacagagtgttctgttctgtagattgggaattgctcttccccaatgttcttcttcagagtactgcctcacaagattcagatcattgtcctttactcctggggcttagggataataaatccggaaaaaggcgtttccactttg

SEQ ID NO: 202766 - DNA, 377 bp, Zea Mays
cggcagacgatgtggaatggtgtagagatccccgttgctattgcaccgaaggaggaccgttttggtttggagatccttaacagaaaaaccagaagcgccaaattcaatggaacagttattgttgcgagtaagctgtcgaacagataacaaattacgaggaagctgaggagcgacaagaacattattaagatgaaaatagcgatcagctataggtaagagagatgtgccacggccagatgaagggatggactgcccgttaccgaccgtaatggagcacggtggggaaggataacgggaaaggagtataccgtcgttggaggacatgtgggatgtcgcttcgctgtccataacccaagaaggggagtcctgcaccgcca

SEQ ID NO: 202767 - DNA, 352 bp, Zea Mays
cagcgatccaggtggaattgaaggcggtggcgtcagcaacgttttgtgatgcaagggatcacctgatccgccgcgtacacccgctcccgttgtcgcaatcggagacggcaatatcggatcagcacctccagccacaacaatcgccaaggaattaggggaggagcatcgaggcgattcaaggtgcggcaacgacggtggggccatggatctagggttagaggatcggaggaaggaggagacggcggcggcgcggtgacagggatgcgatcggtggctgcggggtatagggtggcgcggggtcagggaggcgcgcggcggcggcggggggcagggaggcgcgggaacaggacgg

SEQ ID NO: 202768 - DNA, 545 bp, Zea Mays
cttgccattggtcaaaagggcaagggtccgaatgggaaggtctcagttggaggattcaccagttgatgaaattgatgtttctaataagaagccagagcttgcaacagccttggaccaatgtgataggaatggtaaacctgcaagtcccgccaatgattactcagctgatcaggtgtctgcagtcgtaagttctgctcctaatctgtcctgcaaattggacacaactatcttgtcaaaggaaggtcatcttccttggaagaataaagaataccatccaaaaattttagcattagatgtggaagctgctttgcctccttcaaaacgcctgcatcgcgccttagaagcgatgtctgctaatgttgctgagaataccaagaatatacctgaagtgacaggaccaaatgaaatgactctaaatggctctttgttgacagcaagcagcctttctaataaatctgcagatgcagtggtcacagtatctaatagacctgtaatagttcaaagccctgaaccttctttagacacacagtttgtgcataacccat

SEQ ID NO: 202769 - DNA, 1414 bp, Zea Mays
atgagttagcacaggttgttattttgtagtctgttctccagcttatcctattttattttatctagtgctatgtattcttacctcttccttttttcaggctcttgtcggtgtatatgcaaaagaactgcatgttaggcttgcctgcttaactgctataaaatgtgttcctgtgcactctgtgcaacgagatttgcaggtgtcaacaagcctctggattgctgctcatgatccggagaaggtttgtaagataacatccctgtgaacttgacttggaactcctctatttttttacgttactcatgtgggagcttccagcactggttctgccctttttagtgaaatatgttgaacttttttcattctagagcaggaaatgatgtttattttcttgctcttcggctcatgtaccttctctaggtggttgctgaattagcagaggaattatgggaccgctttggttttgatgccatcactgattactctggtattttcaatgcactttcccataaaaattacaatgttcgtgctgcatctgctgaggctctggctgcggcattggatgaaaatcaagacaaaatgcaagtaagtcgcctacaatgcaaattttctgttctgtatttgcaccccttctgctactatatagatgctcaagggttttgcaagacgagcaaaggcacatttaaacaccgacattagtttaattattactattgggatgggatgttgttttactcttcgtgaagacatttgaactggacatggacccactgaactaagatggcatgtagggacaaagaggtaatagcacatctcaaaatcatagaatgacatccatttaaaagctggaagatataatgccgtgtatttgggtacggtcttgtgtttctactgtatctttaatttcacattcaaataaaacttgaatagaaccacgttgatcggagattttttttgccaatttggagtaatttctttttattgcgggtgtcatattatttcaggatgcactttctacccttttctctctgtacattcgtgatattggcactagtgttgaatttggagatgcacactggctcggaaggcagggtattgcattagcactccactctatcgctgacgttttggcctctaaagatcttcctgttgtcatgacatttctcatctcacgcgccctggtcagtagtttgctttgtttatgtggatcttaacattgcagtgccacttatatttaacttttaatgcttctcatggtgaacttacaggctgatccaaacgtcgatgttcgtggtagaatgattaatgctggcatccttattattgacaggcatggaaaggaaaatgttcctttgctatttcctatttttgagagctacttgaataaaagggcaagtactactttcctattaataat

SEQ ID NO: 202770 - DNA, 724 bp, Zea Mays
atacgttcccttgtgtcagttactaatacaaccaatttcattgttgatttacgtctaaaaggaagaatttctcaaagtgcacgggcagatgaacagggagacagttttggtaaagaggatcaaatcctgattggaacgctggagcccaattctactattccagtcccactatcaggcctctcacatcctcttatgccctatatgttgcagttaaggccggcaaaacatcatgatcatgaaaattactcctggagtgatgtccaggagaggcgcagtcaaaccgagtttagaaaggaggagatcctagatttatgtatatcagatctgtatgaatcggaaaacttgctattctgctcacaggtagatggcacctcgaattcttgtcatggactgtggttttgcttgagcatagaaggcaaggaaataggcaaagatgtacagatggaaccaatatatgattggtgcatcattattaagtccccgttgtgtttgacatactatcttcccattgctgcacattatactgtcagttctagccacctcgataatgaagattcaagttgctcccttggcaccttaagtccgggtgaggctgtaaaggttcacaatgttgatccaagaaaccctttgtacttatccctggttccacatggaggatgggaactgatgcatgtatggataaaattacttccttttatagatgccttgcttttctatttttttt

SEQ ID NO: 202771 - DNA, 511 bp, Zea Mays
ttcgcctcagagcgggccgagcttgagcaggagcgtgaggacttcaaggaggacatccggaaggtgtctgactgagaggaggaggtgacccggaaggagagaagcttggtcaagaagaaggaatacttagaccaaaaggaggaggccgtcacagcgctccatgataagctgaaggcttataatacagtgccggagaaacagcgggacaagcaggttgcggctgaggcgaagctacagaagctgtagcaggaacttgccgacaaggccagcgacattgctcgcgccgaggaaaacctcaaggcgagggaagcttccttggcgaaacgggcaactgacctcacctgacaagaggaggacctcgccttcaaggaggagatgtgggcaaggcggaacaagctgctggatgagcttgagctccaggcagaggagaaagggaagcgtttggatgggaaagtgcgggcactggaggagcaggtccgccagttctaggcagcgcaagctgtacaggcga

SEQ ID NO: 202772 - DNA, 637 bp, Zea Mays
gtcgcataaagggcaggacactgggtgatccaggccacgcttagcaagtctgtcagccgtccaacatctatcgtgctccacaagccaaaggaagaatttacactttcctagagcccaggatttccaaatgcgttcagcaggctcaaagctaacagagccaagaagcaaagccctgtaagctgaactagccgagtattcacccgattcactaaacctccaggtatgcacatcaggaacatccggctgcagaaccatcccctcgagtaagtcacaaaggtccatgagattagcaagggctgtaacggaaatagcccctctcagatcagccaaccaattgagatcaggcaaggcatccttgaccaggcgtctagaagcaatacgcttgggcaccataccgaagacagcaggtgccacctccttaatacatttgccattcagccatcgatccttccaaaatagagtatcagacccatctcccaaatgagtgataacagccgcagccaacaggctttgcacaatgtcgcaggtttgaatctggaagtccgaccatggcttagtcctatcagatttttgcagccaaggccacctagcccgcagtgcccagctcatgatccgaagatcactaatacccagaccc

SEQ ID NO: 202773 - DNA, 440 bp, Zea Mays
caagaccggccagaaaacgcaatgactatgcctctccgttgctcaacacctaattctaccctcgccgacactaatccctcacttgattgcggagatctagcccacaatctctctatccacggtgatggcacgaactgcggatgaaccgatgcgttcccggtgatctaaggtggtttagttcaattggctatgtcaatgagcatcctgagcacaccagggtgcagtaacgagagcgaggagaacgtgaacgaacctgcagaaggctggccacaatgagctcattcacggtggcgtagagaacagaattgggggaaatcccaaattggagagatgtgggggatgattggtggtgagggctggttcactgtgtgcacaattacttagcggagcaggctagggcaccaatttatagtgtccaagggcggtggctcccaattttg

SEQ ID NO: 202774 - DNA, 464 bp, Zea Mays
cgccatgatatccattactggattggtaaagatactagtcaggtaaatttctcatgtcatttggtgatactgttttggaaaggtaattgactccaattttgtccatggtaggacgaagctggaactgctgcgattttaacagtagagcttgatgctgctcttggcgggcgtgctgttcagtaccgagaaatacaaggcaatgaaacagaaaaattcctgtcctattttagaccatgcatcatgccacagccaggaggagtggcatctggattcaaccatgttgaggtcaatgagcaggattacaagacccacttatatgtctgccatgggaagcatgttgttcatgttaacgaggcaagttatctgcgtgactgtcttttttattcaagtatgggtattcatgtcgtataataagacttgccattttacaaccaggttccctttgctcgatcatcccttaatca

SEQ ID NO: 202775 - DNA, 634 bp, Zea Mays
gcaggctgctccgctcgctgcggttgttctccaattcattacacggttcaattccagcagggattggaaagctgaggaaactacaggtgttggacgtatcaagaaacagattaagtggcctggtgccaccggagctcggaaattgctcagatttgtcagtgctcgtattgtctagccagtccaattcagtaaagtcacatgagttcaatctgtttaaaggaggaattccagagagtgtgacagctttgccaagactccgggtgctatgggtgccaagggcgggcctggaaggaactctcccgagcaactggggaaggtgttctaatttagaaatggttaatctggggggaaattttctttctggagcaatcccaagggatctaggacagtgcagtaacctcaagtttctcaacctcagctcaaatagattatctggtttactggataaggatctatgtccgcattgtatgactgtattcgatgtcagcggaaatgaactttcaggatcaattccagcatgtgtgaataaagtctgtacttctcagctaatgctggatgaaatgtcatccagttattcttcattcctcatgtccaaaactctacaagaactgccatcagttttttgcaactccgg

SEQ ID NO: 202776 - DNA, 362 bp, Zea Mays
gaagaaaagggggaaactgatgacgatggtcatgtgctcgttagcattgagcttcggaatgactagatctttgtgcaacatgaagccaaggtcaacatgccaactgtctatatcagaattcagggtggtggctgaacaaatcagcactagagatctagttcaagaatacttggctaacagaacgtctccgacgttaagtgaatggagcatgccgaagctaaagggaacaaagaaaacacttgagcttgtgcgattgccttatcgttttaagtttgagaagcagttcaaggagccttgccaagagtggctagaaatgattgagacaatgtgcaatgaaattttgggaaactacaccaaaaaag

SEQ ID NO: 202777 - DNA, 621 bp, Zea Mays
tgatgattaaatgaatattatcgaatcaagcctccaacgcccaaggtacctgttcatgatcatccacgttttgatggtacccaaaactaagttgggtcctcttaagttaggagcaacatacttaggcattgcctttgtatgaatagcgggatgttttgcaattgcaacaaatgaggtgccattgccatcctttcttagcataatattcttatgaattaaaataggcttcgaattgttacctaagggacatgaatttgccatgtgtcccctttcccaacatgtgtagcaagttctctttgtttgagccttctctttctttctcaaattttgcttcacattgtcttgcctcttatcatttgcttgagccttcttctcaagattgttgggacaccttgaggcaaagtgacccatatcatcacacatgtagcacttgatttgagccaaatcatccttcttcttttgatttgtgatcatcatgtcatattgattatatattgaatgccttcttctttctcttcttgttttccccacatcaccattatattcatggttaatcttgatttgcttttggggattcttcttttgctcaactcgtgactttggttgaggcttcacttgtgg

SEQ ID NO: 202778 - DNA, 372 bp, Zea Mays
ctggaaatggcctacctcctccaagtccgacacctgctcccatgccatcactaccattgagcgtgagtggtttcctagacgcacactgatgccgcccagatcagaggccaccactgctgccatggagatggtcgccatcgaggacctcaccagcctccccttgtgacctcacgttgactatgaatagccggcctgggtcgctggagggggcatcgattaaaggggatggtggggagcggggcgaggatggcaggggcaatcgtggcagctgtacatggggtgtggacaccgatggaaggacgcgacaattgcggatgtggagcggtgatggaggggtgctgatggaaggggatggcggtgagcggggcgagg

SEQ ID NO: 202779 - DNA, 552 bp, Zea Mays
cacgatccaccttattcttcagtctcaggtatattggacattccctatattgtctataatacttttaccacatttgcatgaagaattgactagactgttgattctaacaggtggacatgcatttattgcctgatcttataggtactattctaaaagaaagatttgataaattttcatcccaagaactgaactctaggatttatctggctgagtggaggccgttaacaaatatgctgcatttcttgaggaaaatttctgaccagcaaaattatagcctgttcaacacgctggaacattctcctgagtttgatggtaactcgttgtgctctgtatctagacaggttgaagaattgttgaatcaagaacaaactaattcgctggatgatgtagcaaccgcattcttattttcaatcatatgtgcacctccaaaagatgttatcagtgcctttccagatcttcttgatttggtgaaagcacattttccatctcatgttgctttcttgtcatcggttctttttctacaacatgattatctggctaaagttgctagtt

SEQ ID NO: 202780 - DNA, 841 bp, Zea Mays
aaaaaataacgcagaacagcatgcttcttctaatcagggaaaagggaacatggaggaatgtaaagattctgatggaaacaatgcaagtgaatcgagtgttgcccaaaagctagtgtctgttattgtgctccctgcttcagacacaggcgatgtgagtaactttgtagaaaatgatgttgagaaatctagcagagatcaggagaaggtagcaaagaaggaatatgaagattctgtcgtggcaaagaaggatcacgaagatgctatcctcagaagggcacggtatatagaggtatacctagtatctaatcccctcctttctcatagtgctcttttttgcttctaaaaaggggaaacacattacttgggacaggcaaatattaagagggctggtgaatggtctctctgcaatatttctctagagaagaagcagaagagccactgggattttgttctggaggagatggtctggatggcaaatgacttcacacaggttcttcctcaagtgttccttctataaactgaaatattttgcagctccccatcgttgattcgtaaagcttatttgaacaacttgcttccataacaggagcgtttgtggaaaaatacagtcgcagcacagatgtcccattggatttcttctagaggtcgagcggcatttgaagaagcaagcattcagagaaagcagaaatctgttgctagagttctagccaatggtattatgaacttttggtgttcagtccatactttacgagctagtggtggtattcctaaaccaatgcaaatacagcaaccgaatgagctagaggaaaataagcttggtggggtcaaaaccagaaaagcg

SEQ ID NO: 202781 - DNA, 356 bp, Zea Mays
ctagccgtgcgcgcaggctgagctaatccatgagagagatgaggaacagagaaggttgccgccgcgtgacagtatcacccaggtcgtcgccagggcccagattaatggtcagtgtgcatcgctggggccgtttgcacatgttagtggccttcccatgcggagacatcaacaggaccgcgacaaattgcttgccggacttggggaaatcaccgacgatcacaccatgccgtggccagccttgtgggtgcctttctcgcaggtagtctactaatccatagcttggcctctccctcctctttgtttagcaccaatttatttgggaatttgggacctaatgcgccagcaaactcctcggc

SEQ ID NO: 202782 - DNA, 384 bp, Zea Mays
ctgattagtcctccgatgaatcacagttacacgtcggcctttaagctcatcaaccagattttccatttgcctcttgttcaaagttgtccgataatcaaggtacctcactaatttctgaacaagatccatcaccggtccagctttgtaaaacggcatgacagaatagtcaacacacaggatcaacccttgctgagtggatttaagggactgctgggttcctttcatagctacagcaccctgcccaatgtctatactgctgcttggtgagtaaaatcctctaccaaggataatcttgttccatcttgaggcctcacgcacaacaacatcaaggccctgcaagacctctctaggcacaggtaaatctgagagttgacttaatggcag

SEQ ID NO: 202783 - DNA, 298 bp, Zea Mays
cgcataggaaaattttctataggattttaattctttaaagttcctttaccgttctttgttccaaaggagtccgaagttatgcatgttgacacgcctatgggcaatcactttcatcaatgccggggaagaaccagaatgaatcaccgattgtgaacccgtccgaccaaagcggccaatgcggcaccgacttcctcaccaccagctgatcatcacccagccccgcgcccaaccgcgactccgtccagaaccaaggttggtcaccaccgccgccgggaaagtttaaccacccaatgcccac

SEQ ID NO: 202784 - DNA, 349 bp, Zea Mays
tagcaggtactgcctaacaaatggcttgtcaactcagttgtcatgttacatgtgtactctctactgggtaccaaattgggtctggaatagtgcttttgccgctttgctatgaaaagacctgctgttgatgtagtagtactactagtgttacctattgatgccttcttgatcgacgacccatgatggggcagggccccaattgtactagttcatgcgtatacgacaaaggttcaaaccggttgataaatccgacaaacaggccaaacggtttgaccgtatcatggatttacccctttgaatttaggttattttataaattttgaacaaatttgataccaagtttcctatc

SEQ ID NO: 202785 - DNA, 482 bp, Zea Mays
tcaattgtggggttgttcctggttgaaatttcatttaactgcttatctgctttcatttgtgattatgcagccattggatgttatattggctcaaagtcatagacagattgtagcattgctagagtttgtacgatatgattatcttccccaaattcaacagtgttctatcaaaattatgggcatcctaaggtatattcaaattatttatgtttttttccttagtgctgactgtcactttgctattaaatgtctacttttaattccacacgtgaaatttctgtaacaaattgtagtatgctagtttgcttatttgtgttattatgtctggcagttctagaatagttggtttggtacagttgcttttgaaagctgatgttggaaaaatggtaatagaagattatgctgcttgcttggagttccggtttgatgattttcaggtcatagaagacacgaaagatgatgttggggttctaacactgcag

SEQ ID NO: 202786 - DNA, 358 bp, Zea Mays
ccaacaagatgaagtcagcaatgacctcccatgttaccactccccttaaatccccaatccatgaagagctacacagagcatcaaccactgtcctttgctttaccagccttttaggaaccaaactaaaaacatgaggggccaagtctgcaatcctctgacccaagagccatctgtcatgccaaaaaagagtggactgcccatcacccacaatggaggccattgccaaagagcacaagctatccaagaaccggtttgattggaacggcaaatcagtccaaggtttggaagaataagttttttggagccaaatccatcttacacgtaggctctatttaagcattgaagatcagagatacca

SEQ ID NO: 202787 - DNA, 319 bp, Zea Mays
tacatagctaccaaggcctcacctgattctggccagagtgacttggaagcaaattattggactcatcaaataaatgcctatctgacagcccttcacagagaaaagcatacattagatgtcaggtcttcaaaaacgacttcaggtcgaggtctttacttgtgctttctgcaagctgcctatccatttatctttatatgaccctcaaacttattgctccatctaatttcctgcagtagccatatcatctctgataagctctgtagcatctgttttggtaatgcatccaaaacttggtacttctgcagcagaatctttggcc

SEQ ID NO: 202788 - DNA, 441 bp, Zea Mays
tgcacaatttttggagaagacgcgcggtggcaggagaggggaaagagcactggcacaaaggattcgtggcattcaccatggcaagcttaccggcgacgacccagctatctaaagcggcttagtgtgacgtggtaaatggcctgaggcgtggtgcaaccatggtgaagggtgcaaactccggtgacggccgcttggccacatcgccggcgcaagtgggcacgacataggacggaacagtgcttcaagctcatccgcggtgaagatcttttcaccccgaggcattatctgggcaatagtgggcacgaatcgcatcgccggcgttaatcatagtgtaaggtcaccaacagcgatattctctacacctgaagatcttttgctattgtaccatgagaaatccaattcagagcctctgtccgacgaacttgcaggacccatatctca

SEQ ID NO: 202789 - DNA, 321 bp, Zea Mays
tacaacatacacgtggccaccccacagtcatgacaaagctataattgccactttgaagagaaaagacaaatgacccgacccaacgaacttaaaaacccgagctaggagcagtaaggaaagggaacaccttagctcatgccatggaccaatgccgagattccttcccagcaagacaaaaggactgtaactaggcttcgagaaacgacattgaacacagtctatttctgtggttcaacaaaaaccagccagatagggcctcaatctggcttctttgagttatctaagatgattaatgagcttactcgctaatttagatatgca

SEQ ID NO: 202790 - DNA, 323 bp, Zea Mays
agaagctgaggctaccagattggaggatattgatatactagaagaagaacgattgaacacggtgattcagtcagcacggtatcaacaaactctgaggcgctatcacgaccaggccatacgacaccagtccttcgcagtgggagacctcgtcctctggcgaattcttacgagggagggacggcacaaactgtcaccactatgggaaggactattcatagtagcagaagtcactcgtcctggatcatatcgtctcactcaaatggacgacacggaaattgggaactcatggaacatagaacatctcaggaagttttacccctagc

SEQ ID NO: 202791 - DNA, 320 bp, Zea Mays
gttctttcatggtaatcagagccacctccttcaaaccctagccacccccagcccatagcagacgccaggagatatcatggcaagctcatcctccatggctatacctacacctttgctagggcaaactatagctgagaagctaaccaagtcgaactatgcgctctggaaggcgcaggttcttcccatcattcgtggcgcacaactgcagggctacattgatggctctgccaaggcgcctgaagagcagatcgacgtcaagaacggcgacaagacagtgaaggaaagcaacccggagtacatccggtgggctgccttggagc

SEQ ID NO: 202792 - DNA, 297 bp, Zea Mays
cagggagggagggaggctgttgtgtcttccctcctccttgagtcgtagggtcggagcggggatgtcaatgctcactagtgtagatctgttaaggtctaccgacgccataggttgaaattgggcacgtttccagtcaccagggcgctagaggtagaccgagacctgtctaggtgtacctagggttggcggaagcgcatcattgtatattttgcgtctgtgatcgagggtcatagtcatggggagggtttgcatgtccgatcagggcacgtggttgatcctggctcggtcacttgacca

SEQ ID NO: 202793 - DNA, 386 bp, Zea Mays
ccactccactggcaagcagcgaccaggccgtcccgtaggcggcatgcctgtccattccgttggcaggcagtacgcccatgctgcggagtgcactgtgcccatcatcactcgtaagttgccagggaagcttccgctgcacgccaacgctacgcagaccgcggatatcaggacacaaggagattgcactggcgactagcattagttgctccaagtattacatccgttatgtccctgggcccgcgtgtcggggctcagtgtccttgtacgtgccccccttgagctataaaagggaggtcacacggcgttacaaggcagactcggtcacacttagactctcagactcacaagttcataaaagtctcaagctcaatacatcacacagtgga

SEQ ID NO: 202794 - DNA, 1075 bp, Zea Mays
ggctgatcttacaggtggtcttccattcaaagatgtagtcgctactatagatccaaattcactgcaaccattgaaaccagcaccaccatcagatcctgtggttgtatcttttctcaactctcacagccttggtgacgttggtgcttccagacaaactattggaatcaagaagacatcagtagaacataaggtggggcgtgatgtatcaacagacaaaggtatatactagaattcgcctgggctatttcactgtagtttaagtaaactttaagatattttttatgaacttttcctccttatatgtactgttaggctcctccgaacaatctgtgcaatcttcatttcgacgatcctctgctagtagaccatcttccagctacaacagtcattcagaacaatcccaaaaaggtctttaccaggacaatgctatctctctgtagtacatgttgaaatgtcccttcgttcctctgcatataatactatacttgattggcacttcctatcctgcctatatgggtgtggtcatgtggctgcttcttggtttcaaacctgcccttctttttcttgtctcttattccaggggtgcgggttatgctctcatacacttaaatttgggctgcatgtgtttactaataactagtaatgtttcaaaataaccaaaactttagtttatacctaattagtgtttggtaatctaacctggcacttgagtgacagcttaacagagttgttcattttgtgaaccttgcttgctattactaaggttcataagtatctgttttgaacttttgatgtttggagtagtatctgtgctcctgtttgatgagtgaacttttcatttgctatttgagtctgaaaactactgatgtaaatgctgcactgtttttaattaaccatatccatttttatgcttccatctgttatctcaattccttgtctttttattgattattgttttcaatcatctgtcatttagttattccaagtaaagaatggaaacctaaactgacttgcttggctgcttctcaagcaaccgaggatgctaccgtacatgataatgtacctttggctgctg

SEQ ID NO: 202795 - DNA, 275 bp, Zea Mays
ggtggattagcctctctatattttccaggtggtggttttctaatcccttacaaccttctaggtcaagcacgcgaagagccttcatgtttgaaagagatggcagttgcttcccatgcccaaagatagtcactgatctgacatgagatagcgatgttgactcttctagcaccaaagctggtggttctccgtcaccacattggatagataatcttcgtatcttgttctgtggacttgatgtaagttctcgagagtctaacaaagtaacaaagttctcc

SEQ ID NO: 202796 - DNA, 383 bp, Zea Mays
cccacgcgcacgtgtaactgcatggtcgccaaccggcgggaccctgtggacaggctcgctctgctcccacctcgcgcacggggagtttcagtgactagtgaactctattgtcaggtatctcatctacctccagttcgcccatggagtagaacacgagatcgacgggatctagcgctagacttgaatacgccgcgaccctacactaataaactatggatccgcctcatcagccgtaacctggattcaaatcgcacaaaatctctaggaccaccaaatccgcccctgtcgtaggtttgttacgatttgtgcgcagattgttacgactctgttgtgccggtcgtgcatgcctcctcccgcctcttcctatataacctatccgtgac

SEQ ID NO: 202797 - DNA, 311 bp, Zea Mays
gacgttctggatagtgaagcgagtgagctagactcatatttggtaaattttctatctcctttattttaactgcaaaattggccaatttttacttacatactaaaatagttgtagttatctatgtattgcagttatcaacatgtgatttttatggagatttccttctgctggatccttgtgatgcaccatctgtttttgactttctgcaaggaaaacattctggtaaagaaaatagtgtggctcgccaaggcagtccagcaccttctaaaagccaagccaatgttttcacttccccaaatgcaagatcagcg

SEQ ID NO: 202798 - DNA, 454 bp, Zea Mays
cggggaatggactcgaagaagatgaagtggatgttgcagtcgggagacttggacaggaaggccgcctgtcccatgtactgcaacaccaggcacgggtagatgaggcccacgaacgcgatctgttcgattaattaacaggcacgattaattaattctcatgcatgtcatggcaaacagacaactaatcatacgtacccttatggatgcagcagtgaagtggccaagatctgcatacatagcttcggtgccagtcatggagagtagcactcctcccagcgagatccagccgtctttgccggtgcgctggaagaacctgacgacgtagtagggagagagcgcgcgcaggatcctcgggttccagacggcgatgttgtagatgccgagtgccgcgagcaagagcagccaaaggacgaccacgggcgcgaacaggaaggccacgcggcgcgtgccccag

SEQ ID NO: 202799 - DNA, 505 bp, Zea Mays
gttccttctccagctttgtctgccctcattggtctgcaagaattgtctctggcaaactttgatcagactcttgaagacatggtcccagaagatctgttgtcagagccagcagatggtggaatgatggaagtttgcgctgatgtgcctgatgccgggttggagttatcccgagcggcgtctcgtgcctcatcgaccttggagcgcggtcttaagggtcaggaggctggtctggattgctctgttcccatggaagtggttgaaggtccttcagccttagaggtggctgttacagagagctcgaccctcaaggatggcgctagcgcttacccagcccccgagggtgtcgccggggatgatccggctcggatgggtagcgcgagttatgacccagcccccgagggtgtccgagttggttctctctctcacacttccatggatgttcacgtagggtcttctcctccgcattctggttgcatggcagcagctcaagcttcgagtcaggaag

SEQ ID NO: 202800 - DNA, 279 bp, Zea Mays
cttcttcgccttgcttcaaatctaagaactcaatgaatttgatttccatcagggctttcggaatataatgcgttcgaaatacctcacggaactcagcccaagaaatttgatgtccctctagctgcagcgcaaggtattctgcccaccaggccccagcttgaccctggagttgttttgctgcacactgagttttctgaacgtcattacaatagatgagtcccaacttctgctcaacggtatgaagccaatcttctgcctccaacggatcttctgctctag

SEQ ID NO: 202801 - DNA, 274 bp, Zea Mays
cctaacaagttcgtggttgatggcatcattgccaaattacctcctacttggaggaattttgccacggctctcaaacacaagaaggaggcaatgactgttgaaagtctaattgctactcttgatgttgaggagaaggcaagatttaaggatgtgcctcgttctggtccaatggatagtggtacctctaatgccaacgtggttgaaggcaaatctggtgggaaaaacaaaaacaagtcgaactggaaaccaaaggccaagcagaacacttatttta

SEQ ID NO: 202802 - DNA, 330 bp, Zea Mays
cacggaagtctgctgatccagggtggaagtatggattttggccggatcttcaaaataaagataaggtggaatgcaccctatgtggtcggttgttagtggagggataaagaggttaaagcaacatttggcaagggcatatggagatgcaaagttatgtcccaaggctagcagtggattaaggaaggagatgacaagttatttggaggcaaacaagagaaaaagactaatgtttctagatgaagatgaagaagatgatgaagtggtggaggtggcagcaacagatggggcgaatgatacatctgttgtggagtctcaagcatccaaggtgca

SEQ ID NO: 202803 - DNA, 288 bp, Zea Mays
cgcatgggaacgagggggtcgatcgatcgagaagaagcaaattaaatgcccttctcagctcgattcgtgattcgtgaatgtgatttgcgcgtgtgctgtaggtacgtacgtgtaagtagcctcagtttcgtcctcctcatcctccttttatatgtttggaaacaggatgcctcatatcatagcattctacttcctgcatggtacactgtagttcaaggcttcatgtatatatagttgtattatacatacatgtaacatgtatataggctgcctacgcacatacatgcg

SEQ ID NO: 202804 - DNA, 951 bp, Zea Mays
ggggactgtctgggccggctcctctgcagcccagctcgtgccttcatccgccagcccacctcatacaactcctagtcacttccacgcgggacccatcggtcagtggcatcttcatccctttccccacgccgcgcggattcctggctccgtggctcggactccgtacgccgcttcctcaatcccatcggggtttccgtatcccacgcgcaaagctcgggttgttgggggcgagctgcaggatcacctcttctataaatcccggcacctccccccatgccatcctccatcaaccctcgagcatcgttgtcgccattaaagatcggaggaaagcgctggtgggtctcgtccttgccgacggtccaacctcgggcatcgggtcagatgggcggtcgggatcttagcctgattcctgggacccgttccagtgcatcgcggaggtgcgtatagatgataggggtgctgggattgctcgccggtcacgtgactccgccgtcgggccgcatctccaccatggacaggggattactccgtgttagcgcaggtgaggttactcccgatcgactcgcctcttcccctgcatggtgtagcgtctgttagtttggtaattggaacactggtgtgcgaatcaggcttccgctggccatggtccgccgtgggcgtgcgcgcgccgccgtagttcgggtcggctgggaagctgggaaagaagacagaccatagaccgttgatacgtgatggacggctcagatcgtgcgttgcgtactgccctgggcgatttgatcgtgaccgtagatccgtaggggaacgattgggatatggtgtgaacgtggcgctctgtggatcacaggatcgtgatccgagcgcatgtgtaatgtgtagcttgctataaaatccaggccgttgaatgtaatctgaacggctgtgtgcatccgataccccttcggccctggaaac

SEQ ID NO: 202805 - DNA, 1194 bp, Zea Mays
cgtatatgaacgattggctgatggaaatcatgatatgaaaaagacaagcagagaacatctagagcaatttggttctgctggcttgcgtactctttgtcttgcctatcgggatcttagcagggagcaatacgaaagctggaatgaaaagtttgtacaagcaaagtcatctttacgagatcgtgataagaagctcgatgaggtgaatgggttaccatcttttggttattactatgacgattgacatgagttctgaatgcatttgcttgaaccgtggtcctttctgttagaacttgtgctactggatctataatttgtttagtaccacttcacttgcttggatggtttagggtttaagcgggtgcatctcatgcattgttggaagcaagcatgattcagtagtgttagtgtgctgtttatattgtaatgggccttgacccacattcctggatatatataatatatcccctacccaattagggttagagtttctttcttccaactagtagcatgaaacatttctagctctagacattgtcattagtatttccctgaaaagtttatttgtgacatccattagcacttttctattgtttaccataacatattagagttttcctgcgtttttccaaaaaaaacatattagagttttcttacttccattgtaaatttaatgagacttatccaggctttctttttataccaaagctacatggggcacgctgcctgtgaaggcgccaaagtagccacatgcagttattgcagttttgtctagtttgttgtcatttgctgcaataccaatgctaagtggtttgaacatcccgtaacggtaacctcagttagatattaaataatattttaaaataaaccacagtggttatgttaaaatcattttggtgaacatgttactgttatgtgagtgatgatatctgatgttcatttcctatttcagaatctatctttttcattggtttatgtgaactttatcatgcaaatcactggctatctgcaattctgcattctagaaagaataggtgatccttcaagttgaagctaaattgttcttctactgctgacaccattgtgatgcaattttccttctttatcctgtaggtggctgagttgattgaaaaagaccttatattagttgggtgcacagctatagaggacaaactgcaagaaggcgtgccaacctgc

SEQ ID NO: 202806 - DNA, 292 bp, Zea Mays
tggagctcggaccggtcaccgctgccgttgggattcttctgcgactgcgctcggcggtgggtgaaatcgtgatggcgttgttcgagtggtcatcggtaagcgtttcccctcgctcgcacctgctcggcgtatcatcattagcgtagcgtgcataccactgttgaagccgggtgcgggcaattgctcgccgtggtgagagctccgccgtgaatccgcctctcgccgtggatagtctccctcggaccgtctcctgcgctggtatgtcgttcaccccctttgtcgcacttgtggc

SEQ ID NO: 202807 - DNA, 433 bp, Zea Mays
ccagggtcttggtgttgtttgcaacaaaaaaggtggatttggtgtagatgactttgttgttgaattctttggggaggtatgccttagtttttaatattcatccattctactcctagatcgagtggcagtagtatagccatgaatatgttgatttataaactttgcaggtctacccttcttggagatggtatgaaaagcaagatggtattaaacatatacaaaataacagtgaagatcaagctcctgagttttacaacattatgttagaaaggccaaaggttgtgttcagtctctgattttaatgagatgtaacttgtaactggtcatttcaattcatggtctttttatcctattaacattttagttctgtcatgatggaagggagaccgacatggatatgacttggtttttgttgatgcgatgcacaaggcca

SEQ ID NO: 202808 - DNA, 466 bp, Zea Mays
atgcggtttggaccacctctacggaccaacggtatggctgatctcaaggaccttcggcgcaccggcaccgttgaagactatcaacgtcagtttctgtccattctctgtcgctgcgaggatatgacacagctccagcaagctcagatgtttaccgcaggcttgggtgaaccgcttcggactgatcttgaactgctgactccaactacattgcagcgggccatgcacctggcacgcgcctatgaacgtcgtatggatctgtcctcgaccccatcaaggacgccatatgctacatcaaaaccaacgacatctacaactgcagcaaaaccctcgtcatcggctaccagcagaccacgtttgcgcaggctctcaccggaggaggttgccgccaaacgggccagcggtgaatgctaccactgctctgaaaaatatacagccgatcacaagtgtgctgctcgcggagtttttc

SEQ ID NO: 202809 - DNA, 292 bp, Zea Mays
tgaattattctaacactttaccatttgttagagttaacataaccaagggagaactaacaagtagacttactaatttttatacaagtcaattcacgcgcgagaactaaatacacatttaattaacgcattcaccacacgaacacagtttcacgccgcacactagtttctaacatgcttttcacataactcataattcaactactcactaacaataaatcacgcacgacaactaccacatcaaccgatttatttatttggaacaccgcctgcctagcgtaccactagttcccac

SEQ ID NO: 202810 - DNA, 536 bp, Zea Mays
atttattcggtcggttgatgcgtgttggttgtgctgaacttgtgctgattcgcgcttaactggtctgttggttgaatggcagctcaggtgacgtcgatggagcccgcggtggctacagcgggtgaagggcagcggttcaagcggattccgcggcaggcgtggtcggggaacctcgaactgggtcctctggtagggctcgttagctccctgctcgtccgtgcttgtggcccgtggtggctgatatgatggtgccggtgtgattttattgggttatttggggattgctgtgccgttgcgtagtcaatgtagtgttgagggaagcctgaggtgtttgaaatgtggtagaatggtgttcggatctcaatgtcatgctgcttggtggttagggttcaggggtttctaaatgcgttaatgctttggtgagagctcaggagtgtaaactgatgccactgacacttagtggtgcagtgccacgagtatcacattgttgaggtcaaacctgcattgtgttgcacaagaatcttcgaattgctgtg

SEQ ID NO: 202811 - DNA, 384 bp, Zea Mays
tgagaccggggcgtcaaaccctcatcaaggggaacgacactgtcggtttcgtgggttggagagtgcgctagagacaactcttggtggatggaccagagtcgaatcaaagaagactaagaaccgtcgcctaagagcactgcggacacgtcgtccggtgtcaggtgacttatttgatcgttgtttcaactgcttcgcggacgatcatttcgccacttcctgacgttttggaccaagatgttttcgttgtaaggcacttggtcatcgctcctatgcctgccctgggccagtgaaaagtgacgggaaggttccagttcatcgacggttgtcgaggggatcggtctggaacagattatcgctggtagtgccagcggatgccgatcaggc

SEQ ID NO: 202812 - DNA, 441 bp, Zea Mays
ctgaaacccttagagaaacctttagccacccacaaacttgttaagctcactccacctaaatccgccacccctgctgtgagagatggattgcttgtggagcctgtgagagccccacctcagaaacaagtgtggtgtccaaaacctaaccatctcaggaacacacttgacaccctgccagatatctctagtgatccccttcctagagcccctcaggcatccaaaaagacccattcccacaaacagattccacctaagagagaggtgaggtttcattatgagtattgtgagagggatgtacatttgcctccttttagctttaggaggaagacagatgagtggcgggtttctgagttgaggagaaggaacatgaaccacacttctcatggtgttcatgatcctcctgtttagagacatactgctaggcctagaggtgctttgcct

SEQ ID NO: 202813 - DNA, 883 bp, Zea Mays
cgcttggccgatgctgggaagaaggcagacgccaacgcggacgtgaagacgaaggatctcgacgaggagaagctggccaagtgccgggaggtggtgcggctggaggaggaccacgaggcgtacggcgccctgctgcgcgacgcggaggggaagctggagcacgtgtaccagatggcgatgcacgggagggacatcaagaaggtgggcggcggtgatggcaaaggggaagagggttccggggcggtggacgaggaggtggtgcgggtgctcaaggacgcgggggaagggaaggtggtggagcgggtgaacctcgccgatcggcagatgcgcctactgccggagcccattggccggatccgcggcctcctcgcgctcgacgtctcccgcaaccagctcaaggttagggactcgtacctaagcattcgcgccgtctccctacatcatgcattgtgacgtccacgaattttctgaatgagttgttgggattggtcgaatggcagtattttgtagtgatcatatcgaagttcattctcccttgcacattgcacaaagtgctttgaaattaaagtggttttctgtggaattaaagtggttttatgaaattcttaaaccgattcacatgaaaaggtctgtacaatttcggttaaattttcgcgttcaaacggatctaaattaaactacacatgtggcgctgtggcagttcagttcacgggcgaattccctgtttggcgccttcaacagtgatgttccttgcttgaattcgcaggtgattcccgacgcgattggtgggctcgaacacctagaagaactccgcctcgcttccaacgacttggtttctcttccagactccattggccttctctccaacctcaagatcctcgac

SEQ ID NO: 202814 - DNA, 351 bp, Zea Mays
aataacaatatgagcatatttcctcaggtgtcagatctcaacctaagcatcgtgtggtaattatcatgcttgactggtagcaagcccctagcaaacaaaacctcccgaaacgagttcactgcttgctcttcttcagcatccctgacatcttctatagctatccttggcactctgcagtccacttttctcttccccctcttcttcagggagtgtgtgagtcttgtcgatgcatgcaaggctttcttcttcagtgaccgcatcctggtgtgccttggctcgtcctccgagatctcggcatctgccctattcctcctctcatcgttactaacagatatctggatgctatccaca

SEQ ID NO: 202815 - DNA, 531 bp, Zea Mays
ccaggactttgtcttcgtgcacaactggggactgcaggtgatggagcggcgctgctgcgctcacacggcgtggacggcaagctgcgtaggtgatgcgggcgcgggggcgtgtgacgtggttggcctagggattgaggagttggagcaggacagccagagttgcgtctggtggtgctagcagcggcggtagcatgggaaagaaagagaaaacagctacacatatggatcattggaaaccacttcagcatctaggcgacggggcagcgcggcctgggagcctgtgccttagcgtcgtctaagtcaggtgcccgcctagctgggtgtggtgaggcagcagaccatggcgtctgttgcttgccgcttggacgcttagtcggcgcctaggtgacgccatggcatcagtgtgaatggtgctactatgcaaaccattgtaggatttgatgattttacttgtaagtggaagcagacagaacgggaactttttgagagaaaaatattgacaagaaaacaataataactgtgtcggggcat

SEQ ID NO: 202816 - DNA, 312 bp, Zea Mays
cctaaaccgtgcaaatctcttcatcttcctccgcacgcaaaccccgcaatatccagattattgttttagctacattatccaggaatagtggtaatcgtcccaaagtggaacaaggtcctctaacttgactctctaagatcacaatacattgactatagcctgttgagaggagtaattgatgagaaagtatattgtagctgcaactttttgacctatcccataaccaatattttgacattgtaaatatttgtcgtagggccaatgaaaaatcaaacatgatccatgaaggcacttgcaaattatcacatggtg

SEQ ID NO: 202817 - DNA, 825 bp, Zea Mays
atgtggaagatgcttgcttgtttttggcatctcataaaggacttttgcactcttgttaccggggcttgagtcttgcccatgcacacgcaaatatggcctacaaccaccatctacgtcaaaccgtggaacaacatggagaactactgaatccaagatgaggggtctgctaataggaggccattctgaaccacctccttgtcttgttatatagtgcaaatatctcaaatgtgaaggctgaggattcaagggaaaaaactgttgtataaagtcccttcgagcctgcttatagaccatttctagtgtcttctgctcaccagtgtatgttttgcgatacaaaagcagtccagccaacatgaatgcaagaactggccaaccccctctctcacaatgcatcaaaagcatattatgctgaccttccaccgatagccaattttcacatgatttcaagaaatggtggatcatctcaagctgaagcaatggacacccttcatactgttgtgggtagtccattactgtcatgtcatactcagataatatgtctgaaattcggcttcttttgtccccagaccaaaaattggataccataaatgatgcgtccggaaaaaattcctgcaactgcgcaacaatgccgctcaagtaatcccggtactcatcctcacccatggaatcagtcgagaagcagcagtcgaacactgaaaaggcatccgtaaacatttgcacaatcagatacatatcattgaattagtcacctagtatttaaccaaatcgaaaggcatatagcacaacagggtagaagcacctcatttcaacaattgcacctcattg

SEQ ID NO: 202818 - DNA, 306 bp, Zea Mays
gacgtgtcggggctggatgccagcatactcaagagagaattggtgacctggcccctaggagatagtctcaactgggacccggacctgcacacagccttggccagaaagttttagtagtgcacccatagggcccgccagctggtatcttctatcctttgattcgtgcaatagggacctgcaggatagtctgggaagccaatccatgtgtccggaccccctggaacatagctctgaatactagggcacccgcctagagtggtggagcatgtaggcttagggtatgggaccaggctaagcggctacaca

SEQ ID NO: 202819 - DNA, 382 bp, Zea Mays
ctcaatattcgatggtgtacagaagagtttaccggttgtttcacccatcttgttattcactatcttgatattcaccatcctgatcagaatgtggccaccaatggccaccatcgagtttttgacatcacacctggtaggcaggcactgacctctagacatgctgccttccacagttccactcatctttctaccatccttggttgcagtccttcctccccccagttcctagagcccagaggtttggcgctgcacatcactgttccttcttcagtccactcatgtagtcatgtccatggatgaggttttttcctcttgaattcagtgggacaaccgttatgttgtgtttcttggaaaaatgtctttcgttagtgttggtcttcta

SEQ ID NO: 202820 - DNA, 401 bp, Zea Mays
cggcggccctcaccagcatccgggccaccgtcaccgacgtccttgcgtcggcctccactcagtacccccgatggcgcgatcaggtcttgcagacccttcgccgttacgccctcgccgaccacgtcctctcagcggtccctgacccgtcagaggattggcttctgatggacgaggtggtgctctcctggattcatggcacccacacggccgaacttcaggacatcgttcgcgttccggacgccactgctcaccgggtctggggtgctcttgaggcccagttcctcgggcatcgccagactcggattctgtacctcgagaccgccttccgtcagcttactcagggcgatctctctgtggatgagtactgccgtcagatgaagacgatggcggacactctttgc

SEQ ID NO: 202821 - DNA, 346 bp, Zea Mays
ttcagggtcactcactttcagttttggcaccatccaggctggtcccttctaagttcaagcggggtagaacggtgcaggaggctttggttgatggtcgtgggtcagagatatcaggggtgttctggatgctcaagttctcatggagtaccttcaactctgggatgtcatggaaacagttagtcttgcgccgggggttagtgaccagcacctctggaccccctcaacctcaagacagtactcttcgagatcagcttaccagaggttctttataggctccatcgcttttgaacctgcccataggatttggaagtcctgggcccctctgaagtgcaagtttttcctttgg

SEQ ID NO: 202822 - DNA, 311 bp, Zea Mays
gggccatggatctccaatccgacggccgtaatagcgtaccaattcgtcagtagatctggccgttggatctcgatcgtacgggtggattcagggtgcgtgtgtcgattcagcagagctcgatctggatcgttggatttgtgctggtgggctcagatttgagaatggcgcagagctacctccgaccgtagatttcggatccaaggggggtccaattgcgtaccagttcaggctttgcgcggtctaatccggaccaccgattactgatcgtgcggtcgtgatcccgcgataccccttcgcccagacctttttgc

SEQ ID NO: 202823 - DNA, 426 bp, Zea Mays
acactttcaggagatttctttacctatgcggatagaaatcaggattactggagtggttactatgtatcaaggccattcttcaaagctgttgaccgtgtactagaacagacactccgtgcctcagagattttgggttcatttgttctaggatactgtcagaagtttcagtgtgcaaaactccccatcagtttctcacacaaactgacagcagcaaggaggaatttggctctttttcagcatcatgatggggtaactggcacagctaaagatcatgttgtggtagactatgggacgcgaatgcacacttcactgcaagatctacagttatttatgtccagggcaatcgaagttcttttaggagatttccacgatagatctgaccctacattattatcacattttgagcctgtgcaggaacggtcaaag

SEQ ID NO: 202824 - DNA, 293 bp, Zea Mays
taacggcggagtccaaccttgcggaagacctagcggcggcgaggtgaaaaccctagcgacgtcaacgggggacgagcggatacggaagacctggcggcgacgaggtcaaaaccctagcgacgatgcagcgacatcaacgggggacgaccggatacggaagacctggcggcggcgaggtcaaaaccctagcgacgatgcggcgaggtcaaaaccctagcgacgatgcagcaaggtcaaaaccctagcgacgatgcagcgggggacgagcgcatacgcaacggaatggagcaatg

SEQ ID NO: 202825 - DNA, 491 bp, Zea Mays
gtagtagcaagagcccgaacttcagcttcagcactataacgagatatgaccgcttgcttcttggatttccaagcaataggagaggatctaagaagaatacagtaacatgtagtagaacaacggtcaacaggatcacttgcccaagtggcatcagaatacgcatgtagccgaagtgggctatcagaagcatagagtaaacatctggatcgtgtcccgcgtaaatatcgaagcacacgaagcaaatgaccataatgaactgaggttggtgtggatacaaattggctcaacatatgaacagcatgagcaatatcaggtctggtgatggtgagataaacaagactacccacaatatgatgatatcgagtggggtctgctagtggtgtcccatccttcgaacgaagttttaaatgaatatccattggtgttgcaactgtgcgagtatcagtaattccagagcgatcaagaagatcttgtatatacttggactgaga

SEQ ID NO: 202826 - DNA, 342 bp, Zea Mays
cgcagtgcccccggcctccccgcctgcgcggcgcagtgcatcgtctaccactaccgcggcgggtactgcgacatgctgccccacggcaggcccggcgactgctactgcaccaactgcctagcgtagttatgccactatctaggacggccggccggccggcggcggagccgcctcgatgtctcgatccccgacagatgatatgatcggagctggcaaaccaccagggacaggaaaacaaaatacttattagtcgagtcatactatttgttatatgtctgcatttttagtgagctactactttggatccgccgtttcttcgtcaattcatggtgtcccttcttc

SEQ ID NO: 202827 - DNA, 328 bp, Zea Mays
ctggctgatgcgctagtggttggatgggggcgacattcacatcggctgtaaggcagagcgcggggcgagctaggatggaaggggagcaaggcacgaaggcgatgatggctggagattttgggcgtggatttacatcagagttcccatgtggggcggggtcatgaatgggcgcatgacgcttggatggaagggagatgtgagcgccaatggaagggcagatggggggcatggcgtgtggatgggggagccgatgggaaggggagatgtgatcatccctaaaatggcccctatcaaggctcgggatcacggtggcgggggcgaggatcac

SEQ ID NO: 202828 - DNA, 673 bp, Zea Mays
ccgcacctctctctttctctctcctccggtcctccctcaaccccagcagcttcgtctcccctcccctctccccagaaatcggaactagatagatagatcagccctatctttgcctcctcccggacgactcggcgcaaggtcgcagcttttctctcgatctttcgcgcttcctctttttgacgcttgctccgcatggggttcctggagatctttggggcggttcgctgctgagatggttcgccgcatcacgcgctgctgtgactctcaacaggtgggcttccgtagactttccactttcttactccgatctactgtacggagcagccggggagtagtattcactaaccttctctgccggctgagagcgtgagctcggtggaggagtcctgatctagccaaagattggatttttgtggggttgattcgaggtgttttttttcttgcgcgatttggtggtgtgggcttccttcctttcattttcgtagcatctatctttatattccttccgatttcgtgtcacttctagtccatatctcgcactagtgatgacttgcttgactagtttcttgactggtttcctctgtttatcatcgtcgcttcagttcttccgatccgacgagccccggtgatggacggcacgccgatctctgcgtcctctacggcaggcgtcgac

SEQ ID NO: 202829 - DNA, 653 bp, Zea Mays
tagaggttggtggaggtggcgaggttggcttggggcgtggcagggacggtgtagaggccgtcggagctattagagcggagaatcacgcgtctggtctgcagatccttgacagaaaaaccaaacgcgtcaaattcgatagtgcaattgttgccacgagtaaattggcgaaatgaaagtaagttgcgcactagagatgggacaactagaacattgcaaagcgaaaaggatgaagtgctaccaggcaatgtggaggtgccggagcaagacacaggaaggtgatgaccgttgccaacagtgatggatgggacagaggagggttgatgggagagaagtataccatccgtgttgtgcatgtgggaggtggcaccagagtccatgacccagccggagttctggagcgccatctggttcagggcggcgatgaggctggcctgatcccacaccgggtaaggaggtggcggtgcggcgaagtgggcctgtgggttggcacccatgaggccctggttgcgcccaccttggccgccctgctgccagctgccggacttggagccttgctgctagccaccacctgaaggagcaccgccctgggaagcccatgggttgtagcagaaccatggccccgtggggcggttgcccccggtttgggcattgct

SEQ ID NO: 202830 - DNA, 375 bp, Zea Mays
tgaaaatgagattaaaatcaccccctaggagccaaggcccggtgcaagcagctctgatcactctcagctcatgtataaaggaaatttttctgtcatgtccttgcggtccatacacgcaggtaagccaccaagcctcaccatcagcagggttgaattttactgaaacactgaaggagtccactcgagaggcaacgattctccccaattttgctctccaagtgatcagcactccaccactggccccaaccgaggggaggcaaacaaaattattgtcaaaatcagcgcctaacattgacaaaactgtgcgacgatcacaattaaccaactttgtttcttgtatacagactacatccactcttaatgagtcaaccaaac

SEQ ID NO: 202831 - DNA, 437 bp, Zea Mays
gtactggtggtgtggactgaagagagtagagagatgtggctgcacatgtggctatgtgcgatgggtgtcaaagagttaaggccgaacaccaaagaccagctagactattatacccattaaagatacctagatggaagtgggaagagattggtatggatttcatcactggactgcctcgcacccagaaaggttatgattctatatgggtgattgtggatagattgactaaagtagctcacttcattcctgtcaagactacttataagtgatctcaattggctgagttatatatggcttggattgtgtctctacatggtgtaccgaggaagatcattttggatagaggatcacagtttacccccagattttggaaaagttttcatgagaatatgaacacaaagttgaactttagttcggcctaccatcctcagcctgat

SEQ ID NO: 202832 - DNA, 277 bp, Zea Mays
agatgatactgggaaaagggacacgttttagacgcagaagagacaagacatgctggtgaaattgatcagattctgctatctgttctgacttgatgtatcgacacagctgaacatgacttgtactgttgactagtgcaaaggctttacagcctgtttggtatcgacaccccctcactctttactttttgtatgatttgtggaatggaataagttgttccatcactatctgtaacgcataaaattctattttgggatctgtaagagtttctctaaaaag

SEQ ID NO: 202833 - DNA, 457 bp, Zea Mays
cacccaactacgatatttcatcaattatctaatacactaacaacgacatgaacataaaagggaagagggagtgccttcccttacgatgccatggaattgacacaaacaacaacaaagacctagaagctatcaccaccgcacacctaggcaatggacaagagaatcatggaccaatatatctattcattaaggtagtgaacaaaatgagtaaaacaacttaccatggacccagatgactctgacagggaggacacaacaacgattccaggttcagcctttttatcaaacacttgacaagcgccacactaaagctttcttctcctcatcaggactacagagatccagcatgctactgctgtaccacaactgggctagtgctgacgtgagaggtgagggccaggggagccatgggggcggctggaggacaggcgctggtgcgagattgggaaagggagcg

SEQ ID NO: 202834 - DNA, 276 bp, Zea Mays
tggagttatagcagagttccttactctttgggatgccttgcgattggtggagttgcagccagagaaataggataatcacatcttcaggatgacaaacaatagtaaatactcagccaaggtagcctatgagagcctttttatgggatcaactcagtttgagccttgtgagagaatttggcagtcttggtctcctccgaaatgtaaatttttcatgtggcttttggcttttagaagatgttggacaactgatgggctgcagaagcgagggcttcaaca

SEQ ID NO: 202835 - DNA, 405 bp, Zea Mays
ttggactgttgataggcttgaaagaaaaggattgccgcactcagtggtatgtcctttatgtgaccaagaacatgaaactatcctgcacctcttatctacttgcacttttactagacagttttggcatagtatcttttcacatatgaggatgggccatctcactcctgatagagatgataggtcctttgctgtgtggtggggcaatgtgcatagaaaagtgcacaaacgaataagaaagggtattcatagtgacatagtaccatcattttggggccctggtgcttatggctccatcgcaacagagctgtttttgatggaacaagaccttccttgggcacaattcaaagaatgtttatggaagaagtggagtattggtcttcctgctgcatttaacatggtcagggc

SEQ ID NO: 202836 - DNA, 438 bp, Zea Mays
ccgcaaccccatgccgacgcggatgcggatcccgcacacctcgccaacatcatcattccgccggagtcgtcgcccaggcgcatcacgcgctccatgctccagcccaagtctcgccttcctaccgccgctcgttctcctgacaatgcggcaccgctcaaaccaaaactggaaccgccggaagaggaggatggcaagccggttccagcgttgaggcgcttcaccagatcactactggtcaaggacaaggacagcaacgacgacgacctctcaggcaccaccaccgccagcaatgcctcctccccttcgcccaaaaccaacaccacaagtaccagcaggagcagcaacaaggggaataagaatacaaacaagattcccaccaacctcagggagctgctcgccaccggcatgctcgaaggtcagcccgtcaagtacatcatg

SEQ ID NO: 202837 - DNA, 505 bp, Zea Mays
cgaccatcagacccacaaggtaacgtcgtcgctgtagcctctccacactgcaccgatccactagtcgtcgccatcgtgtataccctacctctcctaggtcatcaaacaaagcggcgacggtgcgtagcccagtttttttggagttatcctactatattcgccaaaaccgtccttgtcgatattcatggcatgttccaaatatcccgcacgattcgcatgttgcgagatttccgtgagtcgacacggttacgattacctgccaattgtgttacaacaccataaacacggctcaaccccacgcgcgaccccaccacgatcccagtgaacaagcatggcacccccactacccgacctcaccacacacgacgtgtcagatggatatgcagctgttatcgacaaaaaatacaagcataaacgccgaaccacaccccgaccgcgtcccgaccacaccactatgccaatttacgcagctgttgccgtcaaaatacgcatgcataaacgcgtg

SEQ ID NO: 202838 - DNA, 581 bp, Zea Mays
aggagatctaaatgagtggagaaatgcactggagagtgctatagctcaggcacccagcatagcaaatacaatggggcaaaatccaatattcagcactgatgtagaagcagaatctgctgaatctccagctgaacattgtaagctatgttagttttcatcacttgctcaccatttgagatattagatgtttagaatacgcctgtgtcttattttacataatggaaagaatccagctccatcctcaaaatagaggaatcagccacattaattgcaaaaaaatttgcacactcttgcaaccatacaaccaaactcttagtagttcacaaggtgatcctaaaaacgaaaggatatctagtgaggcaaataaatcaattgccgctgactccaggttagcgcatgcaagggcaatgatcaacttagagacatcactgcgatgattgtaaatagtagaatgggactcctgcttttgctgataactgaactttttttgcgggagggatgtatttcttacatttcattatgataagcaagttcagttgtttgtggtgcagcggaggaccgttctgttattggcagacctg

SEQ ID NO: 202839 - DNA, 311 bp, Zea Mays
ctggccacctcccaaacttccatccagggtcctgtgaccttgcctgctcttcggatcagttgcttgtgcacgaagctcaggagacagcgctgcaatggccttctcagtaagtgctgaagaatctgcagcggccaacgatgtcgacgcaggctcggtgctgtcagcaacagaggatgcagaggctccaccaaccacatgagactcaggaaagatgacctcaacgttatcagcaccccggcggctaccatggatctctgtacagatcaaaggaagggcaaaacgaccactttttggcaccacttaactcatac

SEQ ID NO: 202840 - DNA, 280 bp, Zea Mays
ggccacaagaacgtggtgaagctcataggctattgcatcggggaaagcactctcatgatcgtgatggagtatatgtccaaaggaaatctcaacgacctgctccactctgaaatctcgatccctttggatgtgagattgggtatcgctatagggtgtgcagaggcattgagctacatgcactcgatgcatgtatcatccggcaaccttgtctgtcatggtgacattaagccggccaacatacttttagacgacaatctgacagcaaaattgacggattttg

SEQ ID NO: 202841 - DNA, 1944 bp, Zea Mays
gatatcatggatggagaagtttgtgcaaaagggtactcagattatagcccctgtacctatgggagttccagctacgacaggtatgggaggctttgaaaggccgactgctaagggtgacatcttgcggtcagatgcaagtgcagcgctaaatgtcggtgttctccatcttgtacccacattggatgtatttccattgttggaagatccaaagacgtaagataactgttctcatgtgtgtggaagttagttaaatttcatattatcgaaaatgaaacttcctaggtagtttagttctatttgtcaaccctgaaatgactatttaaacattaaaatgttgtagtaaaatcagtacacaaatggatctcaacttctgtttcctaaaaggctctagaattagtgctaaacattattttgcatcaaattaccagttcgtaaagcttttccttgataattattacaacaatagtaataaacaagtttctgcatcttttttctagaatgcaagaagtttcagcatatatccaagttatccaaccttttaaatcgtgataattgatctgttttgcaggtatgaaccaaacacaattgatcttgaccaggatgagttcaagtattcttctatgtctcttacttaaatatatataatagaaattgagtcctttggttatatttgagatcatcatgctaggtactggttcaagattttgtcagatcattcgccggacctcgtggacaaggtatgatgttgcacttgcaaagacatctgcatagttcatcttttatttattcatggcaatgtgttaaaaaaggtttgcaaatgtcgttctcattacaatcgtcaagccatccgagactctgttttcagtatttgccatcttaatcagatatatctccttcagtttccgaatccgtctatggaatggcatctctggtacagtcggaatgaggcggtctgtaaccccataaggctagaaccacacatcatttggagcagaaattgtctcacccttgatcttgtgttaaccaaatccattttcttaaaaatatctaacttcgttattgttgggtccttacaagtaagtatatttgtctgtaaactgccggctacttgtagtttgcaacattatacacaccacctttattggtttccacataagcaggtatgcacctggcacaaatgtttgccaaaaggaacacagagtatcccttgttaatggactagttaacttgagtaactagtagttgtttccgtggcttagcgagcttagctccttgactgtattgaaggcaatatttccacttcactatcatcacaatcaaatttacattgaacttgcatattttgggctgaggtagtacatgtatagtttttcattttgtggtaatactgtatgaatttaggatatttacctgaatatccatttcttgtctgtttgggagtaaatgggatccagaaactgtatattcttgagtcttgactaacctgtgcattctatcatttgtaggcagttgctagtgaaggtgggactgatgatgccaaaagacggggtgatgcatttgcacatgccttttctgctcatctggcaaggtaaaaaatgctattgcatggcattagttccgaggtttttgtttctttgtgtaccactattggctgtggatagaatgctagtctcatatgtcaatattatccgttctctttgctacctaactggtgtctaaggttagattgatggaggagccagctgcttatggaaagtttggtttggccaacctgttggaattgagagaagaatgtctgagggaatttcagttcgttgatgcatatattagcatcaagcaaaggttggcttcctatatgtgcgcatgcatgtacacatactctcatttatctaacattctggtatcttctgcttgaagggaaaatgaagcttcactggctgtttt

SEQ ID NO: 202842 - DNA, 1834 bp, Zea Mays
cgacgacatcctcccctgtgagtgcgacttcaagatctgcgccgagtgcttcgccgacgccgtcaagaacgccggtgccatctgccccgggtgcaaggagccatacaagaacacggagcttgacgacgtcgttggcgctgccgctgatgccacagccgggggcaggcctacgctctcgctgcccccgccgcctggcgccgctgcttccaggatggagaggaggctctccatcatgcgctcccagaaggccatgaccaggagccagaccggagactgggaccacaaccgctggctcttcgagaccaaggggacgtatgggtatggcaatgctatctggcccaaggagaatgaggtggacgctgcaggcggcttgggtggaggtggagctgatggacagccggccgagttcaccaccaagccatggaggccgctcactcggaagctttccatccctgctggagtactcagcccatacaggtaaatgcatgcctttacctgcctgaaatgcattgtctttcttttcaaccgtgaatgtgaattggatccatcattcatgtgcacacacaagggcggtttgaatttggaatgcactgttgttctgcctgtgatccacttggtggtttttatttgcgttcacatatttaaaaaatatattataccctgattctgagtcaaacttcggttagacctggatttgttgattagtttccgttgttgtgatctgttgaacaaactataggttaggtgagttgtcagattcttagatctgtcctgtacgtctgatctctaccatgttacaaacatctgaaacttaataatagtcactactacattcacacctatcttgtatggatttgctgttgaaattgcagaatgcttcccaacttgtgcatttttattacatccccacaacttcatcgtatagtcagtcatcctttgtttctgtagcaaaatagatgtgcaattgtttcattgtaacaatgtcctgtatattaacctcggcggctctggtgctttctgcaggcttctcattcttatccgcatggccgtccttggtctgttccttacttggagaattaagcacaagaatgaggatgccatttggctctggggcatgtctgttgtctgcgaactctggtttggtttttcatggctgctcgaccagctgccaaagctgtgccctgtgaaccgggccaccgaccttgccgtcctgaaagacaagtttgagaccccaacgccgtccaaccctactggacggtcggatttaccagggcttgatatatttgtgtctactgctgatccggagaaagaacctccactggtcacagcaaacactatcctgtccatccttgctgctgactaccctgtggagaagctttcttgctatgtttctgatgatggaggggctctcctgacttttgaagccatggctgaagctgctagctttgctaatatgtgggttcctttctgtcgcaagcacaacattgagcctcgcaatcctgacagctacttcaatcttaagaaggacccatacaagaacaaggttcgccaggattttgtcaaggacaggaggagggtcaagagggagtatgacgagttcaaggtcaggatcaatggtctgcctgactcgatacgccgacgctctgatgcgtaccatgccagagaggaaatcaaggctatgaagaggcagcgtgaggccgctcttgatgatgcagtggagcctgttaagatccctaaagctacatggatggctgatggcactcactggcctggtacttggattcaaccttctgctgagcatacccgtggtgatcatgctggaattattcaggta

SEQ ID NO: 202843 - DNA, 491 bp, Zea Mays
tgctagttatatcaaaatggaggacagagattagggcatgcttgattcccatgctagcccttaactcgcattgtccagcaaagacaagagttcggtaggacttcggagctggaaagctagcttcgcccatcaaattagaatagtatggcaatggtatcttttctcattcaggagacccattttagtgctaaaaaaggttcgcaactcgaatgtcagacgagtaggcctcatatgcaaggactaaatacaactacaaataaaggtctaacctaaaaagtagttagctcaacaattaaccactagctccaacagaaacccctgaagtgatatcacatactattaaattaagttaccataaactagttcatatccatttaagtttatcagttaattggaacttacgttattaaaggatcgtgatttgatagttgctgtgattaccttaaagaagtttgatccacataactggaaacaatgtccttaaacaaact

SEQ ID NO: 202844 - DNA, 347 bp, Zea Mays
tgctgccggtgcctcgcgtccctcccctggccgcagatctcccacgtcacgtggtcgtggtcgtggtcgaggtcgtggccgagggatgggtgcccgcttggcccacgggtttgcggcatttttctccatgtgccggaacattgctgcggatgtccatgaggtggctcgacgtcagcgggagactgacgacaacctacgtcgtcaagcttcctccttgggtactcccttcgccccccgctcgcctgacgtgcctctccatcctcctcctccagaaatcaacgagtggtaccagcaggcatacggggtgccttttatgacagcagacgacgtcgacgaagaagaagaag

SEQ ID NO: 202845 - DNA, 386 bp, Zea Mays
ctgccggcgtccatggcggcgatcgacggcctggaaacctagatccgagcaccttctgcaaagcaaggcgcataaacttcacaacttttgtcgccccacctcgtagcgcctgcccgcaccaaatgcctcgcagtccagtcgatattgtaccccgcgtcgcggagcgaggaaaaagaaggcgaatcgatgtgtggccggatctccgtggcgaagaataccagcaccgatgaccgaaccgggaggaggaaaggaacactgacacaaacaataacttgaacaccacgaacaccgccgcgacggatgggtgggtaaaaggcgacgaagaagaagagggcaaggatagggatgtggaggagagattggggaagccgcaagccaggaacagc

SEQ ID NO: 202846 - DNA, 1221 bp, Zea Mays
ttgcggaccagcaatgttacgtaaacctgttgcctcaccccatggcatctagcaagaagcattcttctgaactcattcagtttgatgccatgtttgatccttatgttaaatgtcggtctccaccaaagatacttgtcatcttgaatcctcgatctggacatggtagatctagcaaagtttttcatggaaaagtggaacccatatttaaggtatgtctagctgagtagaagcatgcatcttatctcaagattggatctgtgctgtcgcttctactaggaactttggtatgatctagtcatgcttcccaagatcatatttagtcgggtgtttcatactcaaagatgaatgttagggcaatcttcattcaactaaacttgatgctgtgattatgctacatgttccctgattgtattaagatatctgtttcaactgaaaaaacaatgaattacaaagtgcctagtcataccaacactatctagtttctagtaaaatacaaacgttggcagtgtgtaattaaaatggacaggtaggtgaagaattatgtataattcattggttcagcctgcttacagcatttagtgtgtatttttataatagacaatgttaattttatggtttcatactttaattatcgcactgggatattctttattatgtataaatttgagctgggacttatgctatgctttagaagcaccagcatgcatctagtggctgtaaaagaaccatgttatctatatcttaccaggactcattataaatgttctctggctatgtcatgtataattggcaaggcatctagttgttatcattcatatatttagggaaaatggtattgaagctttggaaagctgctccatgctcctaattatagttttcatccaagattctattggaaatgcaaccctagtaaactagttgagaaaacatggtgtataaatgaatcaagactttgttgccattatgtagatgtctgattcaattctacttagcccttgaccccttattatttgttcagactgttcagatatatttaggactattcttgacctgtggtgccagtcatagaatgctgaagttattcatcttttttttatatacaaagaaatatatatcactacttattattgttaatgcattctgtgttttttcagtatcttaggaactttggtatggtttaataataagtgctagccacagcttgcaggtttcaagatggaa

SEQ ID NO: 202847 - DNA, 336 bp, Zea Mays
aaccgaccattctttaggtcacaacgggtgtgtatgttttttactgttatcccgtaattggaattgtagtccattcagcgaaccttggcgctcctcacctatcgcagcctcttcggcatcgccatcagacttcctgtcatgctgctccgagataggcgtgcctgattttccgacaggtcagtcgatcatcaatcccctgccgatacaacataccgaactactccatcatcctgcacaaactaaactagattcattttccatttctgatatatacacattctgtgttaattttgatcttggttcataagaaaagaacagaaaataaacacatatcta

SEQ ID NO: 202848 - DNA, 492 bp, Zea Mays
ggaatagaagggctcgccaagaacatgttggttaaccttgttatttggtctcctctttttattatttcttgatccagtccctcgaagagctcacaaagatggcccataatttctatgatgatactgcactcccaaagctggtaagccttgccttagctattttcgtacttcctttaaaattttgactcacttgtagaaacattctctagttcagctatcatgtcctgatttgttcattaattaccctataaaaaatctggtcatggtactggatgctaagatagtttactcaatattttgagtaatcattggtcaagcttatatgatcttgggatgctttattcacgtaatgcttaattcatttttttcttggaatgcatttggcacaggtagctgattttgcgtcccttgagctttctcctgtggatggaagaaccatgacagatttcatgcatgcaaggggacttaatatgtcctctttaggcagggtgg

SEQ ID NO: 202849 - DNA, 295 bp, Zea Mays
cccaggtcgcgtggtgctctgcggtgcgatctgaatggtcggccaagcgctgtgaacaaatcgaacggagggctggggtgttggctgggcgcggccaccttcggtgctcgtgccgccatgggcagcattgtgggctgggggtctccgtcaactatccagccttcacttgagctcgtacctcattgcagactatgcgatgatggctctccagtgcgggcgtaacaccatggggtcgctgggtacctacgcttgggaccttcgcttcacgattggaggtaatcctggatcatgtact

SEQ ID NO: 202850 - DNA, 289 bp, Zea Mays
aggtgttgcggtcgacccaagtaaagtcaaggacattttgcaatggaaaccacctactacagtgcatgaggtccgaagtttccttggaatggcgggatattaccgtcgttttattccagatttctctaagatagctaagcctattactgagttgctcaagaatcatgtcaagtttgtgtggtcatccgagtgcaacaaagcttttgaagagctaaagaagttgttgacttcagcaccagtattggctcaacccgatattgagaaatcatttgatgtttattgcgatgct

SEQ ID NO: 202851 - DNA, 422 bp, Zea Mays
ttcctctgaggttggctgctcgagcccctgaaggtcaatgtgttgtagtcttaaggtgtcaaggttgacagttctggacctttgctgccctgtaccaactagatctgaataaaaggaccgaagcacctctgccttatcactatgactagtcaatagctgctccctgtcttgaattttggctatgaaattttttcttttccgataacgagaccaagagtggaagaactttttattagcatcaccatctttgagccaggcaattcttgatctagtcctagccatcgagcggattaaggaggcaagagccagagagcatttcttcaagcgcccaagcagccatgtctccaaaacattaagaattctgctctcttttgccacttcaagctacagcaatatttctctggcaagctcaagttgcagtt

SEQ ID NO: 202852 - DNA, 398 bp, Zea Mays
ctgcccgtgagccgtctcctgtcctgtctggattctctccctctcgtgtgagatttccaggtagctatccattattttgtcatcctatcggctgttatcttcttgcgcttagtttctctctctcatatgcagtcttcaggtcaggatgccgcgcatgaagaatgtgtcggcgccagggggaggagatgacgaggaccctcctcgcccctttaggcaggtcaaggggaagactgtctacttggagcagcaggaaggtcgcaagaagcggtgtttgaatagagcagcctgagcagctctagcagcagcagcagccgctgagcaggcagagagaggtgatcagctgcggatttcttcagatcagattgcttatcgcgtttgtcgactcgcctctcggcctc

SEQ ID NO: 202853 - DNA, 393 bp, Zea Mays
ggccaaagaagccgaatcccttactcccgaagcactctcagaaggctttgattatatcgttagacatgattcgggaaaaagactatccgaagaagaaatttctgaagccaaacattatgccagggaattgcagtatccgaagggggccctagtgtttaattgtacaaccgaagatgactttttgtactgcatctcggacaacaaagaattatctgtttgccgggagatggccagaagtatgggtttcccgaagctcgaagctggcctttgcgccatgacgaaggctgatctcacagatagtcttgcatacaacagtctgaaggtacagaaattgtgaattttgaagcttatgaattctggaatgaagccctttattctcatgttaatcctttt

SEQ ID NO: 202854 - DNA, 306 bp, Zea Mays
tcacttcatacatatcctaccagatttgttctcacttagggctgtccctgtctgaatagtagcttgcctatgacattgatttattgggctagtccatgcgagtcctgcgattatcaattgactatactagaagatagcccgagcattgctgggaaatcgctaatgaattttagtggatattatggtattgctgatatgaacaaataaatgtatgttagtggatgatgtagcttgcatgaagtgatagcgccataattgcatgctctagtgggttgttgatgtggatgacttgcatgtggacatgga

SEQ ID NO: 202855 - DNA, 386 bp, Zea Mays
ctacgaccatctctaataagctcgacctcatcttggcccagatcgtcaccctcaacaagcaccttgacgctcatgaacgacatatcgcaggcgtggaacatgtgctcggcgtcgtgtacggcctactagtatctccgacccgacacccctaccccaacaattgtgacaccaccagcaaaaggccatagatgcaacaacttcggcaatctcatcaccaacttcgccaacactagcatcaccaacacaggcgatcgcccctacaccaacattggaggtcatggtgcctttgtcattgcctctaccaaccacatcactgatccttttcatttaccaacggtgcaactatcacgagcagggtagtggctatttttgcacgcgcggattcc

SEQ ID NO: 202856 - DNA, 308 bp, Zea Mays
ggttattgtgcggaagagagcttgtgcttctgaatatctggttttctgtattgctttgttcaacgctgatgttccatggggcattggattctcgcagatataagtgtcagagtgtgtgattttcttacgcttggtgcccctaataacaatcttattaggtccatcagcctttcctgatcaactgtgctgcgtgctgtaacattgctgctctgtttgggagcataggtgggtgcgaagctattggggtaggagtaggacagtggttatggctacagctgaaacatctgaagccaaaagcaaactgattt

SEQ ID NO: 202857 - DNA, 289 bp, Zea Mays
tcgcgcctctcttcacgctcaggcagcggccctcaccagcatcaggaccactgtcaccgacattctcgtgctagactccactcagtaccctcggtggcgcgaccaggtcctgcagaccctccgccgctacgccctcgctgaccacgtcctctccccggtcactgaccccacggaggattggctcctgatggatgaggtggtcctttcctagatccatggcaccctcacggccaaacttcaagacatcattcgtgtgtcgaacgatacggctcaccggatctagggtgcc

SEQ ID NO: 202858 - DNA, 396 bp, Zea Mays
gtttttctgcggatggtccaaggagtggggtcgatccggtagcgttcggcccgtgattcctggtggcagcaacacattcagccgagcctgtgtgactttcgcgctagatggggaagacgcacccgaccagcgggtcccacacgcacgtggctatgcgcgaaaggaagggctggcacggtggggcctggggcagcgaccaggtgaacgcccgaacaacgtgcatggctggcttacacgtccccatgcacgctccacacatcagagtcactggcaagttttagctggcatcgttatcacgtcaaagcgacaagcaggaaatgatcgactcgtttttttgcttgcttgatgttagtatgacatatatgcggcaagatgaaataataaaataaaataaaa

SEQ ID NO: 202859 - DNA, 471 bp, Zea Mays
ttctgtcgctccaactttgcagcccttttgttgtcgccttgaattttagggaaagggtcttgaggggacaagaagactgctgaacagaaccccaggcattagttatcgcttccagaaaaccatcaaatctgggccaaaatgattcaaaatgaaatctccgtttcccagtgtggttgtccttcaatcccaacaggagaggacagtggtctgaatcctctgaagccgaactttgcagcagataattggggaatttttcctcccaatccgaagaacagaaaacccggtccagcctgacttgcacattattagcgccagaccacgtatatttccggcctaaaaggttaatatctttgatgcttaaatcattgatgcaccttctgaacctccccatcatggctcgattgatattaaggttgtttttgtcttcgtttctgaaaatgagattgaaatcaccccctaggagccaaggcc

SEQ ID NO: 202860 - DNA, 1014 bp, Zea Mays
tgctgttcaagcaggtgtatgcgtggacctttttgcaattacaaatgaatacactgatcttacttctctgaaagttctgagtgttgagagtggtggatcactgtttctatattccagtacagatgaatcaacacttccacaagatatgtaagtttagtcactaactttatgtttatctatgtattcagtagttagatcattacttaaaagatttattggataaatgcttaagcacttcttctttatactcatagtggaaagctgtcccaattaatagattatcaatattcttattgtgtggtcaatggtttagtactggattatgttgaattgatgtttgttcttggttgtgtgctacctgaatgtccatgctataagatagatactcaaatgtatgaaacacggaatgcattatgcatattctctatgtgcacatggttttataaacgtgtggtatcataacatataaggtcccaatacacttttgattatggtttatggaatagtaaaatcaaggtggtagtgatacaaaataaaggttgacgagtccacatccataaacaagatggcatgaataacttgatgctaccatggatggggaattcttgattcttctaggtccttgtattttgaaacaagataaatagcaaatgatctgcttgctaaatcatgaaaaggagtaagtagctacaaaacagtagtgcagtactctgattttcatctgccattttttttcagatacaagatgttgagtcgtccttatgcttttggatgtgtaatgcgattgagaacatcgtcgcagttcaagattgttgattctgtaaatactctgagggatatgtgaactacctaaatcagcttcttcacatgtagctatgtctgatgtgtttttttttgttcaacagtatggccatttcttcccagacccccagtacatgcatgttcagcacataaattgttgcgactcttttgctacatacagttatgactttgagtttgaaaaggattcccaat

SEQ ID NO: 202861 - DNA, 355 bp, Zea Mays
ttagactatgaagctcttaaaggagaggccttctcaaacaaaatggccaagaacaacctggagacaatgaacccatgtaagtgatgcttgtcttgtaattgcagcaggttttatacattaacatctaaatttattttgtatttcgcatttggcaatcaagttgattggtggcgttcatatggtgggtgtgctattgagattcaaaggtttgctaggcgtattgttggtctttgcgctttatcatcgggttgtgagagaaactggagtatatttgagtttgtgagtattgttgtctttgtctaattgtttaattcttagcttgtgtctagaatttaagcgaacaaattattatttt

SEQ ID NO: 202862 - DNA, 363 bp, Zea Mays
tatacgtaccttgacactcaatgtctatcacggtaagttggtaaacccttgatgtcaattatgaatgcttgtgtcctgtgtccacttttgcttattgggcaattctttgttttcagttggagatgaatctgttaacagatttgtttcccgcacgcctttatcagattatttttcagacatggttcagcattttcagaagcagtgcattgacttggataagttggttgcacgctcctcacggtaacttaagtggcatcactagaatgtttttttgagataaatttatactccttatgctggattatttgtttaattacagaaagggaaattcttctgtgccaatatcttctattgaagatgcaa

SEQ ID NO: 202863 - DNA, 1618 bp, Zea Mays
gtgacgtgttcgaccgcctcggctggcccatggagcagtcacgccagttcttccgcaccccgccggaccgcagccgcgtacgcaagacgggcttcgtcgaggtccgctcgttctggaacatttataggagcttcgacaggctgtgggtcatgctgcttctctacctgcaagctgcagcaatcgtggcgtgggagggcgccaagtggccgtgggatgatctgctctcttcccgtggctcagagtccaaggacacacaggtgcgcgtgctcaccgttttcatcacctgggctgcgctccggttcctccagtctctgctggacatcggcacacagttccgccgcgcatttagggatggccgaatgcttgctgtgcgcatggtgctcaaggccgttgttgcagccgcttgggttgttgcgttcgctgtcctatacatgagggtctggaaccagaggacagacaatgggcagtggtcgtcagcagctgattcacggatgaggagcttcctctatgcagctgcagcgtttgttatccctgaggtccttgccatcgtgctcttcattgtgccttgggtgcgaaacgcattggagaagacaaattggaagatctgttacgccctgacctggtggttccagagccgcagctttgttggccgaggactacgtgagggcacatttgacaatgtcaagtactccatcttttgggtgcttttgctcgccgtgaagtttgccttcagctattttctccaaatcaggccacttgtaaaacccacaaaagagatatacaatctgaatggaatccagtacacttggcatgagttctttggccaaagcaatcgttttgcggtgtttgtgctctggttaccagtggtgttgatctacctcatggatatccagatttggtatgctatattttcttctctgtcgggtgcatttgtggggctttttgcacatttgggagagatcagggacatgaaacagctgcgacttaggttccagttctttgcaagtgccatgtcattcaacatcatgccagaggagcagcaggtgaatgagagcttcttgcccagccgttttcgcaatttctggcagcgattacagctaaggtatggtttcagcagatcctttcggaagattgagtcaaatcaggtggaggcacggcggtttgcacttgtttggaatgagataataagcaagttccgggaggaagacattgttagtgatcgtgaggttgagcttcttgagctgccacctgagctgtggaatgtgcgtgtaatccgttggccttgtttcttgctctgtaatgagctgtcacttgcacttggtcaggcaaaagaagttacaggatctgatcgtaggctatggaggaagatatgtaagaatgattatcgtcgttgtgcagtgattgaggtctatgatagtgcaaaacacatgctgcttgagatcataaaggaggggactgaggagcatggtattgttacacaactgttcagcgattttgatggatccatgaagatggagaagttcactgtggagtataagatgactgagctgcacaatatccatacaaggcttgtagctctattggtcctcatcctcaaacccaccaaagatgttaccaa

SEQ ID NO: 202864 - DNA, 308 bp, Zea Mays
cagctcagcagcagttgccaccgccacccccgatgaccattgagcagatgttcctgatgcagacccaagcagtccaagcaattggtcagactttagcagcggtgcagcagcagccacccccacctcaacctcaggtgcaagtctagatgccacaggtgcccagggacaagcgggtagaattcatgaggggccatcccctgtctttgcccattccgttgatcccatggacgctgaagattggctgcgtaccgtggaacgtgagttgcacactacccagtgcaacgatcgtgagaaggtgttgtatggtc

SEQ ID NO: 202865 - DNA, 568 bp, Zea Mays
tgcatcatgttggagtttgtttgtgcatctaacttaaaattttgaagttcaaagctggatttgaattgaaatagaaattagaaaatgaaatagaaaagaaaaaaagaatcaaatcagtgtttgggctgcaacttccatggtcggcccatctcattcttttcctcctctccaccgctcggcccaagcgtcagtgcacctgtgacgattactacctccgccatgtggggcccgggttgccagactcttctccttctccgagctgaaatcctgcaacaactcggctcggttgccgccatggtcgtcgccggagatcctggggtcctcccttcccctccaactaatcgtcctctgtgcggactcgccctcccctataaaaagtatggtcgcctaagcccagaacatcacatcgtaggctccgaacgagagagagagagagatcggggcaatgccggtgctgttcggctgcctcaccggttgcgccgtagcagagagggaattggagagcccagtgcccccaccatcgcctcgcctggtggaatcgccatcgagtccacctggacaccaccgg

SEQ ID NO: 202866 - DNA, 277 bp, Zea Mays
gcttgtgtttggaggtggctgtgaggttgggatagcaaaggcaaccgaaaacacgaagaatggtgtagtcagggagttgctcaaagggaactttatggccaatggctgagcagggacgtctgtttaggagataggtggctgtagctagcgcctctgcccagtattggggcggcatgtgagcatggatgagcagtgtgttggcagatatcgttcagagaacgaatgatgcgttcagctttgccattttgagaggaggtggatgaaaacggtcggaaac

SEQ ID NO: 202867 - DNA, 319 bp, Zea Mays
caacgacgtaagtctttgctatattaaagcaccagtttcgacggtcatactgcgttatttcttttacaaagaaccccttacatacctttgaaattaacctgcggcctagatcagatgtcatctctattctatttgtttacacaacagtgttctcgccgtcgtcgccgtaggaacaaattttgtccatttcgcaataacctccgcccgcttctcccccacgaccagatcagatgtcatctctatcctatttgttcgtacaacagcgttctcaccttcgtcgcccctagcaacaaatcttgttcattttgcaacaatctcc

SEQ ID NO: 202868 - DNA, 304 bp, Zea Mays
tatgcccaactgacgccccgtgccgcgtcccgcgtcgacgtcgtgccctccggtccggatttggctcgcacggcggcgccgggctccggttgcgcgcgccaacgccaacgccaatgtcgtcatccgatggcggccagtcgcgcaagaggctcgtcgtcggcgtcctgtcggtgtgcctgctgatcgccatggtcatcgggacggtcgtgttcttcgtgagcgagaaggctggctacaactcggagctgagcaagcgcaacatgagcaagacgatgcgcagcgtggagctcttctgcgcgcccgc

SEQ ID NO: 202869 - DNA, 354 bp, Zea Mays
aggaggccacacgtggcgaggcagaggggggtcgtgcttgtcggcttgtcgccgtcactatcgcggtcgagaaaaaggcttgatgagagggagggggtggatgatgcgggggtgcagtgcattggggctaggcgttgaggatggggaggccgcgcggttggccgcatcgcgccggagggacgccagagggatttaaggcagacgtagatgtggatctgggagtcgtggtggttctggcaccgttgagggaggtccttggcttttgtgacagtggatcacgacgggcgacgaaagcgcgagggggatctgagtggagatgactggatgtttgaggagggtgttgttggggcggat

SEQ ID NO: 202870 - DNA, 583 bp, Zea Mays
tcattgctaaaagaataatccagaacatggtatacctgtcaggacaacaatgttcagtaattgagaaggatgcaatacaagacaagacaatgtgaagatgggttaacattttaacatacttgaagagggagaatgcaccttcgtgcatccctctaccaacaaataaccgaggctgcagacaaacatcgaatctttaaaaaaaagcatccacaatcttgaccgtctaattaacagcagaaaacaagaaatggaatgctacctgagaccaccacatcatgatcgttatgaccttaacatttgaactctctaggattcttctcataaatgggaaaagaaatagcatagaagcaagtatgtttggtgccatatatatcactactgccagtatatacaaagatggctgattctgaccatccccaagccagctttttattgttcttgcaagaccagtaggattctcccaagtgtacgcgtaagtcactggtaaaatcacaacccatgcagcagcagatattaatttcaagacatatcgtagcttgactgcaaatgacatgcttctttttgctttccagccaaatacgag

SEQ ID NO: 202871 - DNA, 376 bp, Zea Mays
attatattaagagagagaggtccgaagtggaccacaatacaatgcacgaacaaggtaaaataacacagggaaaaataaaaaagaccagaaccctaatacaaacagggaaaaactctatccttatctcatgctgtaataggatgacctcagctgtcacagcattaagcgctagaaatagtcctgaccctagaaaaggcagctcggagaccaaggctttcaaattgctttgcaccagctctactccaacactccatttcatccacaaacaatctttgaatggtgctcaaggaaggacttgttccatcaaaaacagccctgttgcgatggagccataagcactaggctcccagaataatgatactatgaatacattttc

SEQ ID NO: 202872 - DNA, 316 bp, Zea Mays
aaggaacatgaagagaaggagtacaagaaaaaggagaaggctgaggctcatatgttcactgcattgaaggtttggcttgattttgtctcttacataatctgatcggactatttctcagtttttactaaaatgaaacaatcactcaggtggcccgagactttgatattaaagagcaaattggaagacacatgcactttgatcttgtggactttgacagagttaatagcttccgtgcacctaagaacatgtcaatcaacgaagtcaaggtacatcgctggtccttattgtttgatatgattatgattattgaccttgt

SEQ ID NO: 202873 - DNA, 323 bp, Zea Mays
caagggcattgtggatggacatcaggacaggagacaagggcgatgaggacgtcgcaatgggaatcaaccggttcatgagctctcgaaagtcgtgatggccggtgtggccatagggtggtgattgacaggcggggtgacgagctcaacaccgacgagggaggtagttgtccgagccagcatgggcgacacgtgtagatgatggtctctgaggccgcgtatggcacgagagagggtggtgccatggctatgtgtggcgcaggagagcatggcatcatggccgcacaaagctagaagtcaggcaggaccaggggcataggcatcaa

SEQ ID NO: 202874 - DNA, 320 bp, Zea Mays
ggtgagtgtacgagcctcctcaggcttgctactacatcactcgcattcatgtcagggtgatggatgcaggtgatagagggttcagaactcggtcagctcatgagtctctgacgccgctatccacctacgctgcttcggtcagcgatgctgctaggcgaactctgtggtccctcagccacaattaccggcagcaactacacaacatgaagtacaggcatcttcctctgcgtattcgtggagaaagtcggaccagcattgttacaggtggagctgatgaagatcgcctcaacaccgtagctggtgtggtggcaggtcttaac

SEQ ID NO: 202875 - DNA, 464 bp, Zea Mays
caacaaccgatttaccgaagaacaatatagaacagagctctaaagtaggagaagaaattcataacactatcatcctcaatggagccacagttccctttccctgtccccccacttagataacatcttacaagtaattcacctcacaaatcctctccgccatgttaatcagagcatatactatggagacaacacatgttaaagctgaaactgaggaactaaggttaaagcgctgccttattccaattaaccaaaatccttgccctaacctaatgtctgcatcagcagttcttaagcacaacttaacacacgaaaagagatctagggattggagttcttactggggcctgagagcacaacaagaagcccctaaattggatgggtgtgcgctggacgatgctgtgattggaatatgctagaaatattgaaactaacttgcaagttaacgattttttctggaaattgct

SEQ ID NO: 202876 - DNA, 711 bp, Zea Mays
ggaggaaaatcgtgcaagggatcttttctatgcgctatgggttcctgatttattcatgcaaagagtccagaataatggagaatggtcattattttgccctaatgaagctccagggttggctgattcctggggtgaggagtttgataatttgtacaagaaatatgagagccaagtaagctgaaatgtgaactgtatttgtatgtatgctatattgaaatgggaatgtgctttagtaaccttgctttcttgtttcagggcaaggcaaagaaagttgttccggcacagaccctttggtttgacattttgaaggcacagatagagactggtacaccatatatgctttataaggtacatttggtagctatcaaatagtagtaccttctagatttgtctgttttgccaaaattttccacggtaagggtttcttgtaatggctattaactgtatgcaggatacttgcaataggaaaagtaaccagcagaatctgggcacaattaaatcgtcaaacctgtgcactgaaataattgagtttacaagccctactgagaccgctgtctgcaacctagcatctattgctttacctcgttttgttcgggaaaaggtatatcttgtcagtactaaagctcaagtcaaccatgaagggtcgattctgatgcaccatataataaacttgttttacaggatgttccgttggagtcccatccatctaag

SEQ ID NO: 202877 - DNA, 274 bp, Zea Mays
gtgttgccccgccgccttggagaggcataaggcgatgagaagcggatgccttagggtgtttagggatggactaaggtggatctgacctgagccgctgatcgattgagctctagaagtggtggcggcgctggttcctggttgttggctcctggcgacggtgtccctcccttgcgccggcgaggtcctctgttggctcctggcgcgcgacctccactcctccctccctctgaggcagctacagggtgagggtggcagctgagggagggtgactggg

SEQ ID NO: 202878 - DNA, 299 bp, Zea Mays
agacgaagaaggaatcttttgttagggcagacttaagaaggttctgccccagttcttttgatgagttcgcttttgttcattcgataggaaactcggggggtttcattactgtttggaatagttcgaagctggttggcaatgatattttccaaaacgagtatgctctttcggttgaattttttgctattcgtcggaggaatcttggattatcaccaacgtctatgcgccctgttccccaactgggaagattgatttcctccactggttttccaatattaacatgccctccgaaaagcgct

SEQ ID NO: 202879 - DNA, 281 bp, Zea Mays
gctaatgatgtgagtatgattcaagctgctcatgttgggattggcatcagtggccaagaaggaatgcaagctgttatggctagcgactttgccattgcccagtttcgttttcttactgatttgcttcttgtacatggacggtggtcttacttgagactctgcaaggtatggctatagctgctcacctttaactctatatagttcaaagtactgaatatgagatgttctgttgcaggttatcacatacttcttctacaagaatctgacatttacactaactc

SEQ ID NO: 202880 - DNA, 344 bp, Zea Mays
tggtggcgcttccgttttgattagccgagcaacaagagatcaaagatcctacaggagcaagaacacgtctgcgcaccacaggacaggcggctggaggtccgagtctcaaggggcaagaacagggcgaagtaagacggcgtcgggggcagcggcgcggtggtttaggtttttggcagcggcgcggtggtttaggactcacggataggagaagatgcgtacagaataacagagagcgcttcggccagggaaaacggttcattaatttattcctatagatcttacttcttaagaatatttctccaccatgtaacacaagtgaactctagctcagctggtttgagttg

SEQ ID NO: 202881 - DNA, 272 bp, Zea Mays
aaggatcttagcgctcggattggctcggacccagtcgacggtgagctcgacgtacccacttggactgcggttggctgggatgatcctcactggcgttagccgcttaacgatcgtgcgtcacacgtcttggaaacttagcacattgcagtaaacctatgtagcaagcccgtccatcgccagaggacttgccatggtgaaagccacgaatcccttgcgccaataaccttccttctctccggtcgccagcacgccattccaaaattaggagtcac

SEQ ID NO: 202882 - DNA, 283 bp, Zea Mays
gtcggtccggctgcgcctgtagtcggtcttagcgtggacagtttctcgatgtaaacttctgcactgatgtaatgcgcctttgattttttgcactcgttgtgctagtccggctgcacccttaggtgacttttgcacggatggtcttttgaagaagacttcgattttgcgcacttgttgtgctagtccggctgcacccttaggcgacttttgcacggatagtcttttgaagaagactttgattttgcgctcttgttgtgctagtccggctgcacccttaggcgac

SEQ ID NO: 202883 - DNA, 302 bp, Zea Mays
ctgggagatcggtgcctagtcccttccacctttgtgtcgcacccctatctaccgcgcgtggcttgcctggccatagtcgtcgaaccttcgaggatgcctcatggggctcaggcaccagccacgtctacaccaccacgcgtgatgcacccacatattggaatcctcagctctatgatatggagagacgataagcatgcctcaggcaaagaagggggaggaggattggattggggagaatcgagcggaagggaaggcggcgaccagcgaaggagatgccaagaacgagaagggccctgacattg

SEQ ID NO: 202884 - DNA, 386 bp, Zea Mays
ggaatcgcagtatggcaaacagctaagactcggaaaaacatttctatagcatccctagaacattctttggcccatcttccattcatcaaatgactatcagtgaaattaaatcccttgactgatctcttgaattcagtagtgtccttgcgcccaaaactgccattagtttcaactatttctccataacacgtttcaacttctgtaggcctacttccataagcaacaccagcaatggaacatttcaagaactccattgaattgcatgttaatgtccctgttttgtcagacagtatagtatggacttgaccaagttcttcattcaaatttgaagtgcgagctcttgcaggtttatcagactcggcgcaatacatattctggtcttgatt

SEQ ID NO: 202885 - DNA, 441 bp, Zea Mays
tttcgattggtgatcggacttgcgtcgcccactgcccatcgaccacatgcatcttaaacattagcatcgacaacaccatcatcttcatcttcttcgactatgctgcatcgtgccctgcgacgtacctgaaacgcacgtgtgtgccatacctcaaggcctgcacgacgacctacaccaactcatcctcaccaccaccgatcgagaggctccaccttcgacattgccttcaccatcatcgtctctgcctcgcacgctctcgacctaatcaatcaattatgtgcgaccatcctcccatgacgtatgttgtctactgcatgcctctccaagtacaagggttgtcgttgtgtcacctcctcaagaagcaacgtcgttactgcttgttgccatcctagtcgttgcccctacattgtcgtcaactacttcgttgtgtgcctctcacac

SEQ ID NO: 202886 - DNA, 362 bp, Zea Mays
acgtccgcaagttcctaaggaaggaaaacatgatattacaaagaatgccctggtcacgcaaggtatacatctaaatccttacctggaagaccctaggaacgtccctggaaaggatctccatggtcgaccgaagcgacctcatcgctgcctcggtatactcacggaaactatcccgggacctctcctccagctcatcgttgagggagaggaggggttccgaatccgaggtgtcgcggctccagaacaagagcggccgcccaccccactcactgaggtcgagctgtgcggggataaggccgctgctccccaagatgggccatggctctgcacgcccctcagccaaggcgtcgggtccccctgca

SEQ ID NO: 202887 - DNA, 753 bp, Zea Mays
gatttctagagatgtgagtttcaatgaaaatcgtcccttccttcacaaccagtctactcactccacctattatcccacagaatctacttctttcatgtgtcttccttccattcctgcatctgaaccatcatcttctacatccacatctgatgttctcattctcataacaccaccttccacctccacgtcatccacctcttactcttccaaaccacctatcatccaaacctacattcgtcgttcccgctctattcctacggctggtcctgatcctgatcctgtacctgattcttgtactaacaataatgagtctaatgatgtttttaatcagggataccgtcttcgtgaccgtggtaccattgaacctccagatcgctatggttttccacgggctggtgtggcaattgttgaacccactacatatcaggaagcttctgggattcttgagtggcagctagctatgattgatgaattggctgctcttgaacgcactggtacatgggatattgttcctttaccctcacatgtccctatcacatgtaaatgggtcttcaaagttaagacaaaatcagatggttccattgagaggtataaagctcgtcttgtggcccgtggttttcaacagactcaaggacttgattatgatgagacttttgcacctgttgcgcatatgactactgttcgaaccttgattgcagttgcaacctcatcttcttggactatctcccagatggatgtcaagaatgcttttct

SEQ ID NO: 202888 - DNA, 366 bp, Zea Mays
ggcggcactaattttggcgcaaaaagggtcgccggtggtgagattctttgccgcggccgagctgatccatttggtcactgtaccatgggggccatcaattagagcacctgacagacgatgttcaacttgaattttctccaaatttgttgtggtaaccgattcaattctctgcatcaagtttatagacctatagtccatcttcaactttgccatggagcttaccataaaatagttaccaaattctattcaaaatcgggctcaaagtttaccccatcacactgttactgaagattcagtccagtgattacctgacagcctgactttgagcttaattatctccaatttactattaacaactatgcttac

SEQ ID NO: 202889 - DNA, 312 bp, Zea Mays
cagcagcagtcgttgctatcacaaccagctgttactcttgcacaattacccctaatccaagagcagcaaaagttgattattgatatgcagcagcagttgtcaaattctcaaccactttcccagcaacaaacaatgccccaacaaagtattcaagttccatcacgggcaacaccaccaccaacaacaaccgtgcaacaagagtcacagcaaaagcttccacaaaagcatgttgggttcactgacacatcacataccaccattcctccgactacatcagtcaacaccatttcagttgtaggaagtcctctgatg

SEQ ID NO: 202890 - DNA, 293 bp, Zea Mays
cgggtacttgcccgggtgatcgaagttgagccactgatccacccgagtgaaggtgatcgggtgttcagaccatcgatatggggcgggaggaccggtggtcgccaccagtatctgacggtcattgagcttctgttgcctcttgctttcttgcgatccatgtccaccgaagatgacgttgagttctctgtcgatgcgcgggaatgcttcgcctcctcccccttcctgttgttgaggctgtcgaggttctccgggtcctcctcgaggtgggggaggtggtagaggttggaagggtc

SEQ ID NO: 202891 - DNA, 542 bp, Zea Mays
tgtgatctcatatacatggatcgtgggtggtatcaggcattgtcaaccattgatacgttacatggtcctttactttctgcgaccatatttctgtttagcagccaagtgaaatcttcctggttaatttgttttatttggtgctgtagtttgtagttcattcttaagttctaacattgcgtaaaccacggagagatgtatccttagctagaggtagtgttataaagtttgtaacctatagtggcagacctgacataggtgttggaggacagcccagaccctaactgtctttgtcgtctccgacaagagattttggccgttacacgatgcctgctgtaaagtagaatgccattgcagttgttgcatcagaaagcagccatttaacgccaccgtaaagttagtgactgttaaatacatcaacacttgtctctcaggtttctgtatctttcatttctttccatgtgtatatggagtttctttattgcacctttttacccgagtgacaattaatacttgcagttacactaaataaatcctgaattccc

SEQ ID NO: 202892 - DNA, 309 bp, Zea Mays
accaagtctctgatgaaattcctaaaagcgatgctctcagcctagtacattctacagactactccagtatgtttggagaggaatttagcctgtcagagaatcagtttgatggttcattactgaatattttggatattgctgctgtggaagaaggcattcttcatgtactatatgcggctgcatcacaggttatctatcttatcgttccatcttcatatcgtccaccatatacgtaccattctgtttgaagatactaatgttttcttggtttataactatagcctatgctatgtcgcaagcttgctgaaa

SEQ ID NO: 202893 - DNA, 308 bp, Zea Mays
actgtccggtatggatctcatctaacagctgcttcccagtaaccgaaggaatgcacttcatgaggactcctgctgcgcctcttctgtatagtgtatccccaatgagggtgtagtcggctgactgtcttgcgatacgttctgctgcagctttatcatccggctcctcttcgttttttatatacttaataataggctccctccagtcattagagtctgactctggctagctcaaaacattgcactcttctgcccgatctaaggaaatactcgggcgtggtacttcttggatgaaaactccaggtgggacc

SEQ ID NO: 202894 - DNA, 357 bp, Zea Mays
tgtatctatttttgtgcttcagtgtgttgcacgattttaattttatttgtgaacgaaatgagcaatatgataaattcacactgatatagctgaatatttgttttaatacataggcaatgtgatactttctatgctatagtaatgggttgtgttatgtagtgctaatacttaacataactacctagtatgcctgatctactaatatgtgcattgtatatatctggtttctttctgctttgtccacattcagcttcttatgagacaattagtgacagtgtggacataggattgtcttttgctgtttcttgttctgatctccagatatattcttgaataatcttttttcctcttggttaa

SEQ ID NO: 202895 - DNA, 667 bp, Zea Mays
agtggagaatggtagaaagataactccacgagattacctggaaatcgcactgaggcctcttgaaggcagaggaaaggacatatcttcaaagaatgaggtattctgtcatagtactttccaattgatttgaaattcgtatactggtttctattctttgcgattttgtagatatgcctttttattttattctgttttcattgatatttacaatttcaatttcatgcgcaaattgtcttagatccgtgagtccatccgtgcccttttccctgatcgagaatgtttcacactggtgcgcccattgaacaatgaaaatgaacttcaacgtcttgatcaaatccctgtaagctccattctcttgtattttcattatggaaacatgcatatcacagcaatgctattttcctcatttaacacatttccaatcggaaatgtttgaccagctcgagaaattgcgccctgaatttcaagctggactggacgaattaacaaggtttatttttgagaggacaaggcctaagcaagttgctggtacaatcatgacaggaccagtactagctggtattacacagtccttcctggatgcaataaacaatggagctgtgcctaccatttcatcttcttggcaggtattttgtcgcttgagccatgcacctgggcattgataatg

SEQ ID NO: 202896 - DNA, 284 bp, Zea Mays
caattcgaatcaaaaatccatccgagtcgaatcgagccagcggaaactccgcggccgatctcctgtgctctcaccgcccgcctcccccgattctgcagcccctcgctgcgaatctggacgcgatttcgaggctagggtttgggaggctccggatcgcgagcccgtgcggaggcaagggtttggattcgggggttgctgctgcatgtcgggggtgctggattgagctactccgcgccggcttgtgatggtggtgaccggcggtggaagacgagtagacggcggcg

SEQ ID NO: 202897 - DNA, 539 bp, Zea Mays
ataggaggagtcgtataggacgtagagagagagatggagagtcgtaggcagccgcttgatgtgccgcccacatgctgtgtgaagggaaggggtgccaactaggctcgcccgctactctctgtgtgtcctccttctcacccgtccgcatctctttacttagtcttttttccacgtctcactaaaaaaccatatcagagatcatgtgctaattctaatcacaattgtcattcatgtctctcttgcgattatgaccacggtaacacggtaatcatgtctcccttctctctctctctccctccactctctttcctctctcttccctttccctctctcctctcctctctcttccctctccctcctctctcttccctctccctctctcctctccctccctccctccactctctttcctctctcttcccttttcctctctcctctcctctatcttccctctccctcctctctcttccctctccctctctcctctcctctccctctctctcactctctgtagagacgcgcgccctagggtttacacg

SEQ ID NO: 202898 - DNA, 289 bp, Zea Mays
ctcgctgcgagctcttcgtgccccttgccggccgtggtcctccctgacctcgccccgacgtttgcgatccatctcgagtccggccaaagacacccctgcactatggtccttgctcggtcacgacatggccatggatgtcctacgttcttgccatactctctgtcaaccccatcagccgcacgtctagccgagcgtcttgctcctcccctactccctgatttctccatgtcgctcctgagccgtggagctcccgcgcgtgcccctgcttctccatggccgccgcgctctt

SEQ ID NO: 202899 - DNA, 478 bp, Zea Mays
cggtctccgatcatcagtaggacacaccatattaggattttaaacatggtttggtttttagggtattatattctaccccccttaaaagaatttgtcctcgaattcagccacttctacaaatcaagacattcaccaacggtaaaactcggtcaaacaccctaaatagactcttatagtagactagtagccttgacgagatcatgaaaagagtttttcaagaaataacctctaagtcggactaatttaccaaagaaaatgacacaccttgactacaatcataaaacaatataaaacgaattcccaaggcattgtcataggtgcaatcaacactaggatttgccatcattgaatttggatgcagctatacatcaagatcaatgtcttaaaacaacactctttttatgaagaggtgatatgcactaagaacaacccttaccaacttcaacaattcattttaattcaattgtcaaacatccac

SEQ ID NO: 202900 - DNA, 331 bp, Zea Mays
cacctctctacaggccaaaccaatattaactacatcgatcgagtcttatatcacccaacacttataatttattatctcaaatacaactatatcccagcatgtacttgggacacttcggttccacttacgcaatcactactacaacgcacttcggcacacatgtttaataactcacctttctaaattaacctatctcaccttccaacaccaattaaatgtcacttaatttacattttcacctaatttaacctacaccaacgatgaatacataaatataattatcctagaccaactcattagccgattgcggaaaccaccaagtatgctttac

SEQ ID NO: 202901 - DNA, 438 bp, Zea Mays
tgacagcccatgcattgcaaaaccagaaattattgatgtccatgacaccaaatttcttctatccagcatttcatcaaacacctttagcgagttttgcacagagccaatcttagcatacaagtctatgagtgaattcccaacccggacatctgacatgatacccttcttctcacaatagccattcagcatctcacccataacgatccctccaagattagatatcgcaggaataactgctaaaacaattatctcactcgggctaatgcctcctgccatcatgtggcggagaagagtaagagcctctgcataaagacaagcatgtgtatatccatcaatcagcccagtccatgagacaacatttctgcagggcatctgatcaaacagaagcctcgcatactcaacctcatcccatccagcaaagccagtgatcatcacatt

SEQ ID NO: 202902 - DNA, 380 bp, Zea Mays
gtttttcttatctagcttcggtgccttcttgggagcttgagtccctgtgatgtctttcactgaactgctagagactttattatggtccgcttttttattataattcgtcaacttggtatcaccatttgatgaaactttggaactgccaatggcctcttcacagacaacagtttttgtatcagccattgtagttgcagcgaacgacgtgtcagcaacacgatcttctgagataacaactttggtatcacaagttgatgcatccatgacatggtccgcagactgggttgtcccgcaaattttaacagaagaaaccaattcttccagatcaagcaattgtttcaagtctgttgtgtcacggacagcaatttcatatccttgct

SEQ ID NO: 202903 - DNA, 287 bp, Zea Mays
ataagctctcaacatgtcctcaagtacttgattagtcctttcagtctacccatcagtctgggggtggtaagccgaactaaaattcaatctcgtatccaatgactcgtgtaacttcttccaataccgagaggtaaactgtgatccccggtccgacacaatcttctttggcactccatgtaggcagacaatccgtgccatgtacaactctgccaacttagctcctgaatatgtggtcttcactggaataaagtgggctactttagttagcctatccacaatcacccata

SEQ ID NO: 202904 - DNA, 282 bp, Zea Mays
aatgcttcttcggccgatgctggttcttctactatctcaggctgatcagatggtgcatctaccgcttcttccgtaggttgatgagatggtgcaacttcttattctactctaggctgtggtgtttgagctgaatctacagcctaatgtgccacttgttcaatagacacatcatctactgttgtcactggctgatctcctggtgcagcctggacttcaactagtggctataatgtttcacctatatctcctgttgtatgtacatgttattcttctgttgtatcc

SEQ ID NO: 202905 - DNA, 316 bp, Zea Mays
tattgtatgttggtctttcccttgttgctaattatggtatgcatctttccatttatgaactgaatctaggtttaccagattgtactacataaagatccttgtagatatgatatttaattgtataggcatcttattgtatctttgtgttatttgtgatatggtatttaatccttctcataattttatggttcttttaatggtgctatgatcgatactagaagatcaatggcaccttctacacttaaccaaaaatagggcggttgcagtcatacctccccttccttcagagtctccgtaagtacacattaaacttgtc

SEQ ID NO: 202906 - DNA, 683 bp, Zea Mays
gctgatgtggagtctggagaagcaaggccactttttaaatcgcctgaaatatacctaaatgctatttttgacaggtgaagatgaatctctatgcatggtatattttctagttattgcttgtaactaacattgtttctgccgttgttgcagctttgtatgggttaatgattgtacactgctagtctgcactattcctgcgacacgtggagatccaccacataagccatcagttccatctggcccgaaaattcaatctaatgagtcaaagaatgtagtccaagcgagaactttccaagatcttctgaaagatgaatatgatgcaaaactatttgattactatgcaacctcacagcttgtgttggcctctttggatggaacagtgaagccaattggccctccagctatatatacatctgttgatccatcaccggatgataaatacataatgctttcttctatccaccgcccatattcctacattgtaccttgtgggaggtttccaaagaaagttgagttgtggactgtagatggaaagtttattagggaactttgtgatttgcccctggctgaggacattccaattacgatgagcagtgtacgcaagggtaagcgctcaattaattggaggccagacaaaccttcgatgctgtactggtatgtagagcaccattctaagcctaact

SEQ ID NO: 202907 - DNA, 271 bp, Zea Mays
aaaaacattatcattggcagccctcacacgccaaatctatcacgaggagtggttactcgaaaggctctagacaagagaaaagctaataagattggaggcatcggggggcaagcacattttggtacccaatcatggtcacctgtcctgcgtacgctggacggtctaggccctaaggacggatagtctggaacagaaacgaacagtccgactatgaaggtcggatggtccgtggacaaccagaagcagcaatgacctcagacctccaggtcac

SEQ ID NO: 202908 - DNA, 372 bp, Zea Mays
gcgggacttctccttcgagttggtggtccatgtttggatcagatacgccaacacttcaacgtgttgctaagcggctgttatcatagtgtgcctcatcgagtgggtgtgagcgcaactagagtactttcgctttcatccacacaaagctatgcaacaaacttggctacttgaaattgcatgagcttgtgttcgttaactacaaccttcatcttcgcatccaacgagtaactggtacaacatagcctagtgagtttgatcctgccttggccttcatggatctatcattacataggcataatgaagccattagagattggatggaaagaggaagatccaatgcacctccaacattggatgaagactcacctatca

SEQ ID NO: 202909 - DNA, 279 bp, Zea Mays
cgacatggtctacccctataacgccataatggggtgtggatcaatcaacaagcttgaggcagctatacacagactttatctttgcatgaagataccaggccctcaaggcgtgatcacagtgtatggagaccagcaagccacacgaaatattgaaagagactttgttccagggcaacgcaacattcactgtctaactatagagtgcaaagacaacaacagttctcgcccaactaagaacaaaaaggtcaacgcccaattacagagcaacaagggaacgaa

SEQ ID NO: 202910 - DNA, 525 bp, Zea Mays
catcacatctctcccgccgtcgaagaccagctcgtcctcgagctggaaatcagggaagcgagcgcgaaagtcgtcgtaatcctcccagcttgctgacgcagctggctcaccttgccactggaccaatagctggcgaatcccacgagccaggcgcccggctgtgaccgccgctggcacgggcaccacagcgccattgtgcgtggggggtaatgccgggggtgttgccggtgggttgccgacgaacttcttgagcactccaacatggaacacatcatggaggcgggcccctggcggaagctcgagccggacagccacgacgttgatgatctccaggacgcgatacggtccaacgaaccgaggcttgagcttgccggtggaggtccgtggtagtgatgctgccgggcgctgccggagtcgtagtagtgcccagtccccaacttggtactccaccggacgatggtgctgatcatagacacgcttttggaccgcctgggcctgttcgaggcggtaacggacgtcggcgag

SEQ ID NO: 202911 - DNA, 344 bp, Zea Mays
aagaaattgagggcagggaactgctcaaggcccatttggaaaagaaggcagctgctgaggctgcagtggattcatccttagcatcctcatccaactccttagaaaagactccccaggttctgaaggggccagatcaatcctcggtaattgttggtgatgcaaaaattaatgcaccacttccaaaggctgtacctgtagccataagtgacgacaacaatggagttattccagcaacggcaacatacaccataaacaccaaacctgtgcttgtcagtcccactccaagtaaacttgagccagttttgtgtgaagaacatgtatcaagttcaatccagcaaacaaat

SEQ ID NO: 202912 - DNA, 397 bp, Zea Mays
gatttgccgatctttgcctgttgacttccagtatcctgcctgggttgcgcggtttgtgcggcatccatttggatacttcctatcccttggcccaaagaagtaccactcggagtctctaccaggcaggaatgatttctcttccaaaacaaacatatctcaaaaattcagttcggagtgatgaaatctcaggatgaacaactgaatgaacttggatttcaggttacctgctagctcccaaggctcacatttgtagaggtctacttcagggattatgtcaagctcgatgctgagcccatggaccttcctcttgaggtaatagttcacaagctcctcatcagttggatggaacctaaagcctggtgggagatcagccggcgccatggcctcccagctcgct

SEQ ID NO: 202913 - DNA, 528 bp, Zea Mays
ctcgacatcggcgagctcgcgggcggcggcgtccgcgccaaggaggcggaggtgtgcccgcccgagtacgacaactacgtgccctgctactacaacatcacggacgccgtcgacgtctcggatctgggggccggcgtcgtcataagctacgaccgccagtgcacgcgcgacggcagggtcacttgcctcgtcgcgccgccgcggagctaccgggttcccgtgcgatggcccagcggcaagggcttcatctggaaggacaacgtgcggatcagcgggcaggagttctcgtccggaagcctgttcaagaggtgcgcgaacaaaacttgctccgtcgctaaaattccaggtggtgggtttggtgtactggttgtgaatttggtggttgctcattgataacaggatgatggtggaggaggaccagatctcgttcccgtcggacgcgcacatggccgacggtgtggaggattatgcccatcaaatcgctgagatgattgggttgcggaatgaattcaatttcaatgaggctgg

SEQ ID NO: 202914 - DNA, 548 bp, Zea Mays
gaaaaaacagatgccgaagatgtacgatgaggaggaggaggtggagggtggtgatggtaaccagagccggatggcctagggtcaccgggagtgggtccctgacccgagtagggaggcagagggtgagaggatgattgacccggatccccatggtagggaggcggggcaaactgctcgcgatcatcaacgtaggcttcttcttcttcttcgtctgctgacataaatggcaccccgtaggcctgctggtgccactcattgatctctgggggaggaggatggagaggcacgtcaggcgagcgaggggcaaagggcatacccatagtggaagcttgacgacgaagattgtcgtcagtctcccgctgacgccttgccaactcatgtacatcagcagaaatgtttcgacacatagagaaaaacgccgcaatcccatggaccaagcgagcacccatccctcggccacgacctcgaccacgaccacgaccacgtggcatgggagatccgcggccaggagagggacgcgaggcagcggcggggcgagaggaagatgg

SEQ ID NO: 202915 - DNA, 440 bp, Zea Mays
tatatttcctttttacaacagtggcatatttattaatgaaaaatacttttatcttggattgcgtgggcatgtggaggatcagttcaatcctaaaaacagatttgtggtatatactgttttggacaattttagttgtatctaaattcatacatgtagctctaaaacactatcacttgcacaggtgaccattttaaccatgtttactctgataactctatactcaacgatcatccccatttccctttacgtgtccattgaggtattttgttcaacttgtttatttaggatgacctaacctatgttcgggctattagagcttatgtttcctttggctgccagatgatcaaattcatacagtgcacacaattcattaataacgatcttcatatgtaccatgctgagagtaacacccctgctttggcacggacttctaatcttaa

SEQ ID NO: 202916 - DNA, 526 bp, Zea Mays
ggggtctggagagaaggaaatgtttccgccactgttgaaaaacgcatccaacccatgggcaagcatccagacagtgtcataagcatagaggccataggtattgggcaagctgccgccgtcctcctcctcctcctccttcgccacttcactccatcgcgaaaccaacgccttcttcctactggtgttctccgtgtgctgacgcaacgtgagaacaccctgcatcgtgttcagtaatccagttccaagacgaggagctgagtcgaggcacgcggtgagccaatctgtcgcgatccacacgtatccaccggatgtcatgctcagattgtacgccagcgagaacacgtcgattccagaatcgtcacgcgcgtgcagcacgaaaacccgggactccatcatcgcagccttgaccagcacggcggccatctcgctctttcttgcccctggcctgatcgcagctttgtacaggatcttcagtctcctcttggcaagctcgtcgtctaaggaggacacgccgtttcttccgtag

SEQ ID NO: 202917 - DNA, 553 bp, Zea Mays
caccttcccaagcgccgtcgccacgggcgcgccccaggctgaccttccgagcgccaccgccactggggacgtgcccctgtccaccattgtgccgcccaccttcctacagttgactcttgctctccctggcttcgacctggccgccaccggccagtgcctgaccgtgttatcgtctgtggtggtggtggcctagagactctccttggtcctccatctacaactcgtggaccggctgcatcaccatgtggcctagccagtccccgggtgtccctcctccgtgacttcctccgccctagccagctcacttggcgataactagttcaaggtatcccttcgtccaccctacccctgcaccgctagctcctcaaccatcactttgtccactgccaaaccactccactccgtcctggaccccgtggcccaaggggtgggatcaacagtcccttgctagctacctcacgatgaccctcactgctcctgctgtcaccgactgggttgctgattctagtgcctcctaccacaccactctagatgctagtatactctcttattt

SEQ ID NO: 202918 - DNA, 290 bp, Zea Mays
cgatctggagttttagttctgccaattcggtgggagccatgcggtacggtctttttgcgattggtgcggtgccgggaattagatcaatgtagaactccacttctctttctggcggcattcctggcaattcttctgagaatacatccatgaattcttctactatagatatgctttctgctgccagattaaacaccattggatcttgggtgggtggctgagcctgacatgaaactgactttccttggtggtcagtgagaaggatggtcttatctgtgcaacttatgatgcca

SEQ ID NO: 202919 - DNA, 323 bp, Zea Mays
tggcctccgtcccttcgccccaacgacgaggtcaacatggtgtgctcacctacgaaggggttggctttcgaataccacccgaagacctaacatggtcgaaggtggtcgacttcgtcgtgtcggcaggaacaacgtgtccacatctccaatggcaaggagaggaggtagacgccaggtcctcgtgccgttcggccactgtgggacgacaatcaactactctaggcccacctattagcggctagggagggtactagttctggtgtaacaaggaaacttgttcttgtagtcctgtaattaccccgttgtacagtgcatgtcgagaa

SEQ ID NO: 202920 - DNA, 826 bp, Zea Mays
caggtcttacatccctccgcaagaagatactatagatgttgttggtctaggcgataggtccttagaaaggagtcctattgtggaggggaacatgtccattggatctgtgcttgcttcagctggctgtgatgcacctttgcagggaagaattactgagcccttttcccagcaggataaacatgatcatactgctacagttgaaccaaaatcttgtaggcaaaaatctccaaatctatctcactgtgccgatggagagggggcagatgatggtggctccagcaatcagtcatctaaggtttccattcatgaaggaccgagtgctcatgccccagtaacttcaggttttgacagaatcagcggtgtcttatcaacagatgcatctgaacctgagcatttgtctgagtgcataccagcacaggatacatccatgatttcacagcttgacagcaggaaagctcatctgagtgctctgcaacaggaaagggttgagaaagtaaaccaaggtccggaagatatctctgcaaatattgggccagtggaaaaggaacatgttcatggggatctgactttgcaatctgctagtgttttactttctattagctgcaatggttctaatcaaggaactaaatctgaaaccaatcttcaaccagggactgctacagaggataggatggcttttgaagagcagaatgcggagaagtctcacttagaactcagtggtaccaacaaggctaatcaagctctgttcgatgatggcagcgtcatgaaaaataatacggttcatggtgggctgactgcgcatactgctccagtgtctcaaagctgc

SEQ ID NO: 202921 - DNA, 716 bp, Zea Mays
caggaacaccaccgtatcatctgcatattgaaggatagacaaacctccatcaatcaggtgtggtatgatcccagcgaattggttctcctctatcgctctagcaaagagcactgccaacatatcaacaacaatgttgaacagtatcggcgagagaggatccccttgtcgaaggcccttgtgagtcgaaaaaaaggtcctatgtcatcattaactcgaacccccacgtgacctcccgagacgatattttggatccatgcacaccacttcggcgagaaacccttcatacgcatagcttgctggagaaaattccacttcaccttatcataagctttctcaaagtccaacttgagaataattccatctaattttttcctatgaagctcatgcaaagactcatgtaatacaattaccccttcaagaatattacgaccaggcataaacgcagtctgagagggtttaataattcgaccggcaaccacacctattctgtttgtgagcactttagtaagaatcttaaaactaacattaagcaaacaaataggtctataatcctggattttcatagcgatctctttcttaggaattaacgtaatgactccgaagttaaggctatacaccggaagggagttattatggaagtcggcaaacagagccatcaaatcatttttaattacttcccagaatacttgatagaattcaacaggaaatccgtccgg

SEQ ID NO: 202922 - DNA, 444 bp, Zea Mays
ataggaaacctggtatcacaaaaagttatttgctagcccaataacgtcttcatcctctagttgtactctaataccctctcgtgcgaatacagtgccctcaatatcataaaaacgtcatttgtggtttaaaaggtgatctattgttttgaattctttatattccaactttttagtaaccgtatggtggaaaaatgtgccttacaactttaacctatgtttggatagttctctcactcaatttggctaaatttttcatggtctttattttattgagaaacaatgtggcatattaatatgtagtgttttatttgagtagacataaacaccgtctaggtatgccttgaatagaggggattataggaaacctggtatcacaaaaggtcattagctagcccaataacatctttatccactagttgtactctaataccctctcgtgcgaat

SEQ ID NO: 202923 - DNA, 273 bp, Zea Mays
cgattggtgtccatataaagcggcagaggcggccacgtacacacgcaagctgagaaggccggagacgcgtctggaaaggagacggcctcttccatcaccttctgggtgcgctgaggatctatggaaagcagatttgagaatgtacacaattgatgtctgcttgcttttgctcccagaatttgacatgcagataaccgagctaggctccggttgctagtgcaggctgcagccagagccaggtgtgctcgctgttgcgcgagagttcgatttcca

SEQ ID NO: 202924 - DNA, 274 bp, Zea Mays
cctggctgggccccgcacgccatttctatctcctctctccagtaactgcttcgctccatttcttccgccgctagatgcatccacaacttcagcaactaacgctccttcaagccctgtagcaactcccctactacacgcagtccactccgcgcacaccatgctgactctcctcgtcggagctccggcgtagatgtgcctcaccggaacaccttgcgcatcatgcttgccgatgtcgtcttgactggtaaggtccgcgtcccctccctgctgagtc

SEQ ID NO: 202925 - DNA, 665 bp, Zea Mays
ggaagaggtttgcgtcagcactatgcagcaggtaagggtttgttgcactctcccatgtggattttcagttttattcagtgttgcttatttctcttcttggtttcagcttgattttgcggtgactatatcagcacttcttggcataccttttccctttggaaggtctgcaagtttaacttgatgcttattctatggttcagttatcagtgactgttcttgcttgattgcaagctgctacatgttcttggttgtctgccttttcttctttttcttggtgttgttgctgtttcatcatcctttgctcattatctatcaccactagctgctaaatgggtctcctgtttcttaaatagcattggccgtgtaaacccagagttgtacgccttgagtatcgggacatgggtaaatcaaaggaggggtaccaatgcttgtacctcacaggatgatctagaagcatggatggggagatatgctgaagttctatgtgtaaattgttggcaggtagtatgaatctgcattctagttcccttcaacttcccttgtttagttcatataggtttctggtgttcccttcaacttcctttgtttgattcatataggtctgtggttttttaatcttgacacccatcttccttgtaggtaaagagatacattgatcaatattc

SEQ ID NO: 202926 - DNA, 426 bp, Zea Mays
cataccgatccgcccatgcacctacatcgtgtagcaccagattgatttgggaatcgcgcaccggaacgcgcagattgggtgggccggccatggtgaccaccgcgggcggaacgctgtgcgccacggcgttgatagcttggggtggaagaggggtgagggtcgttggatcctcgatgaagggtgcaggtgtggcaatgggtataaccgttggatcagccatggacgctccggatcattcgagtggataccccttcgcatatttgaatcgtgaccgttgattgccgttgccgatccaacgcacctcgtagcataccctttcgtgttatatcggagaccatcagatctagattgggcggctctgggtccctggtacctcttcgccgttgccgatttgctaaagagcccctgggttttggtgaaaccaac

SEQ ID NO: 202927 - DNA, 337 bp, Zea Mays
cgcataaaataatgacagatgtagcgtaaatgtgattcccgtagaaataccaaggtcacacgagagacaacatattcatcatcataaaatcctcaaatggaatgtataaaaattgcagtggtcgatataaaaatatcatggaatgcataacacatggatcagatgaggccgtcggagaaggatgctccaaaaccgccggatcggatgttccacgctgtcgcatcggcatccagttcatcgaagctcgaagaatagttggagggagggcgtcaccgttgcatgtagaatagggaggtgacgttgttgtgcatgcctctggccgccactgacgctcgcg

SEQ ID NO: 202928 - DNA, 301 bp, Zea Mays
agggagcacctccagatgccactttctttgcgctgcagcagccggaccttgataaatcaaaacaggctaagtcatcgattcttcctgttctgaaaaagaaggctcctaatgctacttcagcttctaaaagaggctcttatgatagcgctggtgtcggtggcaaagcttctggtgtggatcaaatgaataatgaggtgacaagcctcttggagcaagttgggatggctgaaatgaaccgtgtatttgtaagaagtcaaaaactcaacagcgagggtataattgattttgtgaaggctctctg

SEQ ID NO: 202929 - DNA, 307 bp, Zea Mays
acggaggagctcgaccatgactattaatggcacgacatgagtgcgggaaacggctagcagtaaaggtggtgccgagtggaaggagagagagggcgcggacgtttcggctgggctgtgcggcaacgtgaatgccatgggcaggagaaccggcggcagcgcgtacgtccgatctagcagacgagcagattgagccgtgtctgtgtgggagaaaataattaaggagagagaagaaagtgatgaggcccacatgtaagggagaaagaacgaggcatgggatttagtgtgcgggcttggaagctgagcgttg

SEQ ID NO: 202930 - DNA, 324 bp, Zea Mays
cgtaatttgcggcgaggttgttgtagttggagatggcagtgtgtgattgaggagcatgacattgggggtttagtggccgggaaaacgctcggggcggcggtggtggtgacgacatcagcagaacctaagatgaagatgcatggctcgctcggtcgctctcgccctctccctcactcccgcacccaccgatgtcgttcgctgctgctccgcctgccaccatgcgtctaccctggtcatggcgtcgtcgtgggtttagtctccctcatccctggatcttaggcttctcctgtctcccatccggtggaggcaggcggctactccgcg

SEQ ID NO: 202931 - DNA, 319 bp, Zea Mays
caagatccgtcatggcgaactcggagctcagccgagccataatgcgctgaaggagggccgaggacgaggcggtgagaacaatgtcgtcgacgtacaacagtaggtaggcgaggctcgtcccctctcggagaatgaaaagggacgtgtcggaggtggaagcgacgaagccgagctgccggatgaaggtggcgaagcgctggtaccaggcttgcggagcttggttcactccatacaaggacttctgcagacgacagacgtggtctgggcaccagtgtcgacgaatcctggcggttgctgacagtagacgatctcctcgagg

SEQ ID NO: 202932 - DNA, 326 bp, Zea Mays
cctgggccctgcctaaatgtagattttttctttggctcgctgcgcataacaggtgctggaccgctgacaggttggccaaaagagggcttgatcaccctccgaaatgccccttgtgtgatcaagaggatgaaaccttagatcatctcctgatctcctgtgttttctcaagggttttctggtttcagctgctgaggactttcgaccttcaaatgctagcccctcaacctggtttgtcctccttcatgagctggtcggaagaagcctcttcttcggtcagaggtcttgttagaaaggggttcaattctcttattgctttgggggcctgg

SEQ ID NO: 202933 - DNA, 1047 bp, Zea Mays
aaaacatttgatgtcaaaagtcctgtgcagcatgttgcgtttagcccaaaggactccaatatgttcgccagtgcccaggacaaaacagtaaaggtttgcttggttttcgcttacatgctttcagcaaaaacatgattatggatgtccaatcaaattcaaatattgaaatacatgtattttcttgaaactccagatatgggattggcattctggtaactgcaagtctacattgtctgggcattcagatttggtgttatgtctggattacttcagtcagggtgatcagctatacttgatcactggttcacgagacaaaactgccaaggtatgccattttcactgaagaatagactaacctatattattgtctaaacatacacagaatatttgttgaatcgtgaatttagttttcctcctttaatttgtcgactagatatgggattgcaagacgaggagttgtgttcggacattggaagggcatacagatgttgttaatgttgcatgttgccatccagatcttctaatactaattacaggttcattgaacgggtcagttcgtctgtgggatttgaatcgctcaactacgttccggtaaatataaataccccatagcatcatgtcttgatacatgcacaacgcacgatcttatgctgttgaaacaggattcactaatttataatggttttaatggagtaaatagcaaaaaaataaaaaaatacactaaattaatatgtcagttactgtaagtatgtatactatgtgctcagagagtcgaataattgttggagcaatacttaatgcttgtagctctaacccagagagggaacacaccaaatctctactattgtcaaaaataaataaattgatttttttagagtgaggattgaggacaacaaattcactgtagtatggcatttttgcaattgctgatcgtcatatttaaggtgtctaaaccctatgcatgcataagtattaacagtatgcatgacattcttccagatatgagctcatatttgaccttggagaagtatatgctatagcaagttt

SEQ ID NO: 202934 - DNA, 288 bp, Zea Mays
tgaaacagattaattacgaatactcagttcagttctagttatctcgatccgatttaatttttgcagtacttctatcgtcgagttctaataatatttacttgggccaaaatacaagagtggatcgggattccaaattcatgttcttttaatccataaattttgaacaggcgcaaggctcgacatttcgcgaaataaatacgcgagatcgatccagcatcgaaattgtgatcccttcggaagcgaagtcacgcatcgttcacgtgggcgagaagctgtgcacagtctagg

SEQ ID NO: 202935 - DNA, 473 bp, Zea Mays
ctggtttcaacttttcatgatgattttaagaggtcatacctacattgtacacttcagttggagaacaaaagttcttggattgcagattgtaccttgaaaatacaagtttcaactgaacttgaagggaacatttgtttggtggaacaccttcaaagttatgcaataacagttcctcctcaatcagatatagagtacaccattccttctgtaagttagtttcttatttctcaagctactcgtgactgactactgaggcattacctatgctagttttcttcctttcatgataaatatcatgtacacagtcaattgatgtatttattgttctggttgcccaaatgatttaattgctgtgagcttgttgccacagcttactttatccacagtaaaaatgtcagcaactacatatgacagctatacaatctatgcttgttgcctgtcaaccatgctcatttacaggactatactaccag

SEQ ID NO: 202936 - DNA, 503 bp, Zea Mays
ctcaaaccctcggtccttctcggcggcggcgtacgggatagcagaggtggccatggcggcggtggccacggtgagctctgccagtgggctccttgctatgctgcaggagccggcgccggagctgaagctgcacgcactcgacagtctcaactccgtcgtccacctcttctggcccgagatctccaccagtgttcccaccatgtgagcccggcctcccccctcctcgcttctgctgggcgtacgcggttgccgccgctgtagctgcagtgtttgcgcgatttgttcaggcgttggtttggctgaatttctgaagtgtttcgatccgcttctcttattgatgatgatgactctggaagagaccttgacctagataccgtcttttttgcgcaatttcttcagagtcagtcgtctgtgcaagctgaacgtcgtaggtcacgggttggttctgacacgtggattccagaggcccaattcgcgtccgtgtgcaagagtgtgataactat

SEQ ID NO: 202937 - DNA, 578 bp, Zea Mays
ggagtgcctcgccatcgccgaggacatcggggagctaccgctcattgtgcgcccggccttcactctcgggggcacgggcggtggcatcgcttacaacaaggccgagtttgaggacatctgcagggccggcctcgccgcgtcgcacactcagcaggtgctcgtcgagaagtcgctcctgggctggaaggagtacgagctggaggtcatgcgcgacatggctgacaatgtcgtcatcatctgctccatcgagaacatcgatcccatgggagtgcacacgggggactccattaccgtggctcctgcgcagacactcactgacaaggagtaccagaggctcagggactactcggtggccatcattagggagattggtgtggagtgtggtggttccaatgtgcaatttgcagtcaatcctgctgatggggaggtgatggtcatcgagatgaatcccagggtgtccaggtcgtctgcacttgcctcaaaggcgacagggttccccatagccaagatggctgcgaagctctcagtaggctacactctagatcagattcccaatgatattaccaagaagactccag

SEQ ID NO: 202938 - DNA, 309 bp, Zea Mays
tgtttctatatgccgcccccttgtccatgggttgtggttctatggggcattaatgctcgccttaagtgcctcataatgcatgttaaatctttcggccttctgtgggccagaaagtgctcgtccccgcgtgttcatggggtcatgccatggctttgagaagctatgggtggtaaggggaggcttggttatggcgagtgtaaggattgttggtaataacccacatcctcttgtgcatgccctacgttggacggtctggtgtaatatgcggccagtctggaggtatactcggatggtccacacgtaaagtcg

SEQ ID NO: 202939 - DNA, 350 bp, Zea Mays
agaaggatgctctccatcgatgtacagtcttctcaatgccctcgtgaccacaattgtgtgctgctgccaggatttctgtccaaactgctgaagcgtccgggatgaagaccttcccttgaaatagtagcagaccatcagcttccgtccatcctgattttgcagttcccgctgtaatggcagcccgcaagcttaagacctgtgggtcggtggcagcttcattgcgaagggtgtcaaatagctgaaaatgtggtgccgagatgctgttaatttctgtggtgtcttcgtcgcgtcgagacaaggcatctgctgcaccattcaatttgcccggcctatactccactgacagttca

SEQ ID NO: 202940 - DNA, 331 bp, Zea Mays
gaacaggttgacttgtcccttgtggttcctattgatgatgagtgatttccatcatgggtagtgctttggtgagagtcaatggactgacccgagtatgagtttgtgttgtgcaaccatgtctctcggcttgtggtgcacaggtgtgcagttatgagatggtggttgacagcgaaggtgaaagtcatgttggttcatgccgatggaacgataatggcaaaggacgagcattgagtcttaaatgagggactagacaagataggtgactagctatggtggctgatacctgggacaccgtcgagcgtgaggatgtggaggagctaatcgtgttgtc

SEQ ID NO: 202941 - DNA, 428 bp, Zea Mays
cgcaggtaccggtgcccaaggaggatgacttgtgggcccaggcccccgtgccagagactgggctattggtttcggcgggggcgaagaggcgcactaccgtgggcggtgatgtgttcctcacgtgtcggatcgccttctccacacatagaaaccagtgcgccaggtgcatgacatgtgggcctgggcccccatgccagaggttggaccgctggttgcagcgaagacgagggggtgcactaccgcggggcggtagcacgctccttgtgcggtggttcgccttcttgaccgttggtcgtagcgaagatgaaggggcacactaccgcgaggcggtggcatgctccttgtgcgtcgattcgccttcttcgctctttgggccagctgtatgacatgtgaggcctggcccccgtgtcataggatgggaaccctgg

SEQ ID NO: 202942 - DNA, 405 bp, Zea Mays
cgcggatgaacatcgatgcctccaagtgtcatggctcatggccaaccgaatctattgcttcttggagcggacaagaggttgagtgaacatgcaggtctcttgagctgctttgcttcacgcatctcccacatgctcggtgtctgagcccatactgagagcacgtgttcttctcaagcaactgctttcatcgtaataaacactggctttggctagctgtctttagtgatctcaaccagaaaaatcttgagcccatccaaatgtttctctctgaatattgcacggccgatgaaatagtagttagaaaacaaaaggaaaagggtgagctaataattgcacgtggacaaatgagacagcgagacagttgtttgtgccggctaagaacaggatatttttcgtaccttatct

SEQ ID NO: 202943 - DNA, 477 bp, Zea Mays
caaaatttgaaaagataacatgagagtacattccctttgcttacaaaaccatccttaaataaataggtataatatgcctagcgtggggtatatatgaccatatagcaaagaaaataagtcaatatagatataaatcaatgagcaacgtatcaaattttggagggggagagagcgattattgtgttaattaatcatacatggtatcctcaatggcacatttaattttgtagaaacgatctacccgacgtcgtcgcacagttcgctatggacgtattagcaacattcatttagtgatttagaattaagtaggtaggtggtgcaaagcaaggaccattagattggagaaacaaactgttcgctaaatacgaagaagctactgacgcacatcgatacattctcaaacaggccagctgcgtctacgaatgcctttccgttccggcaattcgtcaagcacctcggtgatgtggcgtggtcaag

SEQ ID NO: 202944 - DNA, 312 bp, Zea Mays
catagaggaagcgatgactacttcggcatgtcaccacctcactacacaagccaaaattattattatttaaccacacgcctagataagcatgatttcaatttcaacttgcccatattttaaatctcggcataagcttggctattggctaacaaaatgaccattttctaattaccaacatacaccacctttcaccgtttgtggacactcgcacgacacacggctattgtaatacatcacaagtacaaatatcttccttcattgcgagtataaccatattacggcatatattcgcacacctcaatcaattatctt

SEQ ID NO: 202945 - DNA, 295 bp, Zea Mays
ttcggcactgatgtactatcaactatcagcttttctatcacccctcaagcagctgcatcctataagtaaccttcactaatctcctgacaccatagaggctgcacaaccgacaggtgagagcacaacacctctgtatgatttttccttgaaagagcatctgccactcgattctgggcaccttgtttatacaccactttgtattgtaaacccaaaagcttagtaaagaccctctgttgccaatgagtatgcaatctttggtcattcagatggactagactcttttggtctgtaaata

SEQ ID NO: 202946 - DNA, 411 bp, Zea Mays
gcatggaagaattcggagcgcccttatcggtgaaatactctttcagcaacttctcgttcaaggtgaagtatatttctcataatattgtcagaagaatccgttccttgttgcattgcatacgagttctctctctctatatatattttttgtgtgtgtggctgtgatgtgcagaacatctctcagctggcatccatgaactacgacctgatgacgaagcataacaacctggatccgttgcagtcctccagatgattgcgtcatcgtgtggcaatgaagggtagccaaagcaaaatgctagtaaatgtagcttgcgctgagaccatgcatcatcgatcagaagataggaggaggatggtattggtatcccctgatgtaatctctgacaactagctagctgcagatacatagtgc

SEQ ID NO: 202947 - DNA, 411 bp, Zea Mays
acgatgcacggcatttggcttatagcctcaataaggcgcgcacgacccgtaacggcgtccgggaactgcggggttcggagatctcgaccacggccaattcggtgagcgggatccgattcacgcggggaggaagtcctctgtcggggcggcctgcttatatgcctgcggggttgcgcagcgcacggggaggtaaaggcgtccgtttcccaggggaatccgttgaaccggccatggtcagctgcggaggagtcggcggtcgttgaggaggaccgcgcgtatttggttggggattcagtgggagagatggagatgacatgcacagcccaccggtcagttaccaagcgtgtgtgacaggggaaacggtggcttatgacaaggtggggcccgccttcagagactgcgcgcgtgaac

SEQ ID NO: 202948 - DNA, 590 bp, Zea Mays
aaacactttgtgatgttctcagcagctcatctttctctccctaactttgtagattggcaatgatgcttctcaatttgttggtccacttgtattgaacctgttgttagaggtacacttctcattccatgacccctacccatcattaacagtgctactgaagtgcattgattctagaacagactgtgcgattatgcatttcttagcgcacctttattatgctctttgcaccaataaactttgtttcccccccttttccagtctatgcaaaaaggtgatccatcttggagcgggtacatctatgctttctcaatctttgcaggagtggtatgggtcattttgtttcctgcatgctgtgcaccacatttgtttcttgtttcggtgcagttgaaacagcaattatagtacttacgtctcttctcattttcagtcacttggggttcttgctgaggcacagtactttcagaacgtcatgcgtgtgggtttcaggttgaggtccacattggtatgtgtttcttttatatgaagaacttttattgtccttctgtaagaggttgtacagtaaacatgcatccttgaaaattgaaatctcg

SEQ ID NO: 202949 - DNA, 296 bp, Zea Mays
acgccgcgctcgctgccctccgcgacatcgcgccgttgtaaggatccgttcttccgtgcgcccgttcccttccatcatcctgttagagtatatttcactcccgtgtgaagcggctccgtgaaattcgttgcttgttgggtgcaggaacccgatgctcatcctcgactgctgcgccaccgtctcccgtggcggacgtcgggtgcgttcatggtcctctgatatgaaaaatgcttgttcgtttatttgattacctgtctgcttgaattatttttgttttgtggaatgcagcggtttgg

SEQ ID NO: 202950 - DNA, 407 bp, Zea Mays
caatgccaacagaggtgaaggtaatttcaagtccgtcacagactgcgagacaggttccaactgatggacagcaaccactgaacctggagaacaaacagcagacaagccttgcaacaacaccgaagattcttgataaggaataatcatccatttttgcaaccaatgcacattcatcggactatggcatgccaaccaatccataccgagaattatatcatatgatgataatggcaagactcgaaaatcagatgtaaatgtgcagtgctgcactgaccatttagcgccgatcaattgctgaaaacaaatttaaacgagcaccatcagcaacctgcacttgcacagaactaggcatcaaggaaataccagacagctttgttgccagtgcggaagacaagaatgagtgcgaa

SEQ ID NO: 202951 - DNA, 313 bp, Zea Mays
ggccgccataaaatcagccatgattaccgaccaacaactcttgtaaaatctaccagtgaacccgtcaggacccggggatttgtccgaagggagagccttaattgtatcccagacctcctcctccgagacaggcgcatccagggcaacgaggtcaaaagatggcatccctagagcatccagatcaactgtaacatcccttacttctgcagttccaagtaacccttgataaaaattaaagaaggctgctgcatttccttcatgggcagtccagatttgcccatcctctgagtgtattgctgcaatgaaattcttt

SEQ ID NO: 202952 - DNA, 459 bp, Zea Mays
attgactgttagcttgagccgcaaaagaaacctgtttgttagagtggaactgagaaaggacgattctgacatccgaaagcctccattagaggtttgcttgctgaattatttgtcctgatgttgaatgttggtgtctattcaaacatccttatccattagagacgtgggcttccaggctgttcatcctagggagcggaatatgatgctacagaagtggggccatacacagattgctgttggaacaagaatggcttcctaccatgatgaagttaaaatcagcctacctgctcttttgacaccccagcatcatcttgtgttcacatttttccatgtagatcttcaaatgaaacttgaagcaccaaaaccagtatgcagcatgttgcttattagtatggattatgcttagttgtttagtttgctcatttctgacatgttctttatttcttcaggtgatcgttg

SEQ ID NO: 202953 - DNA, 271 bp, Zea Mays
cagcaggggtagcactagaactaccagcctcatgatcatgtgagcgtggaggcataggaggcggaggtggaatcccaaagtcatcatcatcatcatggactgttgcgtcctgagtctcaaactggtgaaaagtggtatccttggcctgagtatcagtcactggagtaggtgccggcacatgatcctctagagctggacggtacgacccaaagatgaggcaagaggcctcaagagtaccctggaactgtgggggccaaatcagctgagcaaa

SEQ ID NO: 202954 - DNA, 289 bp, Zea Mays
tagaggtctcaccaccaaattcgggcaccgaggccggttcgatgaagcgtggtcggtgagcaaggaccttcacccttttcctctttggcgcaacctcacttagagaaaccgaagtatcaccttttccagaagttgcgctttttctcttttgccctttcagcgggtagcggtaatcagggtacataaacccaatagcatcgaaaactctattcagcctcttctttttccgccctccgaaggtcgcagatagagcgttatcttctgtctttgaatatggtccaagcagttc

SEQ ID NO: 202955 - DNA, 424 bp, Zea Mays
attaaacccatcaggtcccggggatttatcagaaggaagggccgccacaatactatcaatttcttgctttgaaaaaggctcatctaaccaatgcaagtcactgcggcagagcaacaaactaggaaggtcaaagacattatccacaaaatcggaggatcccaagcgacgtttgaacacattccaaagcaggttagctttgagatcatgctctgtaaagattgagccactgtcatctgagagcaacgcaattgtattgcggccatgccttaccgttgcatgagcatgaaagaatctggagcagatatctccatccgtaacccatttgatagaggcccgttgcttccaataaattttttgaagctgaagcaactcagcagccttgtgttgcaataactcacggaaattccattcttcaatcaaaagg

SEQ ID NO: 202956 - DNA, 937 bp, Zea Mays
tgcgaggctttcgatgggttcggaccgtgaaggccgcggctcggaggccgtggcggcgagtaagccgcggaagaggcaactggtgatggagtccagcgattccgaggccgacgagttctgcatctccacgcggcagaatgctagtggtgccgcgtcgttgggcaatgctggtgtcagcagccaaggcagtggcgatcggtcggaggagaaacctgtgacttctagtcctgagaagcttccaggggttaagtccagtgatgtagatggttcagacaagaaaacgggagttcagctggagagcagtagttcgcagcctgctgtcaagaggatcagagttgagactgtccatggtgatggcaatggatgcagtggaggcgcatctaagtgtgggactggtggaaaaatgctgcctcgggggctcccagcatggcggtttgagaggccagaagtaaggggagggcgtgttctggatgacaaaggtggggtgagtatgaaagcaagcagtgcttcaaagatgaaggagcaggtatcaagtttgggtgacaagagacaggcagagctgcagaaacatgaaagaaggacaccattgaagactgatcagggcaaagcaatcgattctggccaacaggaggttttaaggttgcaagggaaaaggggtgttttaaggatattgccaaagaatgataaggtgaccagggatactggtgatggtaagattctgtcaaggcaaactgaggtggatgaggagactggtaatggcaggattccaacaaagcgaggtgttttaaagctcctgccgaagaacaatggtgctgtgatggagagtaatgaatgcaagcttctgtccaagaaggttaaggtggatgaggaaactggggatgacaagatgccaatgaagaaaactaaggtggttgataaggagaccagtgatggcaag

SEQ ID NO: 202957 - DNA, 373 bp, Zea Mays
ggaaaacgccaaaaatggccgcccaatgtcgacacttttgcacctgccactgctcactgtcacttgacatgtccagagctctctctccatttatacacagctccccatctctagtccggcactcagagctctgcccccttctccttctagcgcagggcgctcccctagccccaggacagctcctccattcggcgccccttgctccaatcctctcatcttcttcctccatggacgccgagacgcaaagcccccatggccgctagcctccatggcacttggccccttgagctcgccttcctcaactccggcagcttgggatccacttctccctgcacgctgcacctcccatcgaggcccggatgagcagcgacca

SEQ ID NO: 202958 - DNA, 348 bp, Zea Mays
aaaaataatctgaacaaacttccaaatcctccttggaacagtcaacagccaaacccccaagaacacaccgtctcatcccagagtcccggcttccgatctcttcccttccccccgccgccggaaagatcccggctttttgggttccgcggcgagggataggccccaagaaggaggagggggcctcacggcggcggccttgcggtcgatgcgatcggttgacgcggcgggggcggagagctcggatcaccacaacctcaagaagccgcgcctggaacccaggaccaagatgccgctcgcggatgccgttgcggccggtgacagcggcgggggtgtggatgccgcggcggc

SEQ ID NO: 202959 - DNA, 299 bp, Zea Mays
cgaattgaagtcgtgcttaccttgtcgaatggcgatcttctagaagggcgggggtactaagaaaggtgcatagttgtcgaatgacgatcttctcgaagggcggggcactaggaaaggtgcagggttaggcgacatctccggtcaagagctaggtctcactggtttgctaagctcattggccaccagggacaggtcacaatgtcgtgacgagaaagatcaggtcgacatcgcaacgacgactagggcgagggcactaggaatgggtgggggcagggagtgtcacacgtgggggatgggag

SEQ ID NO: 202960 - DNA, 355 bp, Zea Mays
cacaatttaaggcaagattctatttatatattttttgtcataaaatttcaacataatattcagttatacgctatatatttacttaataacttttattttacaacagcataagaacaggacaaacacttttgatgtaccgcgtcctgacccatctggacatcacaccattcacatcgaactcctgctcttcagggatttgatatcaagcaagctgaattagcttccatcctgccatcgtctgggtttcatagagaagttgtcacattatgatatgaaggttggtaaggcttatttagttattaaacagactcttcagcagattgttgagaaacaatacaatctatctgatgttttt

SEQ ID NO: 202961 - DNA, 367 bp, Zea Mays
gtagagctatctgtgctgacaactgagctcgaaagaatgattcatgtattctggtgctgaacaaatctgtcgttgcagggtccctctgagcaggtagccaagactccacatgcacgtgtctgaaccgacgtacccgggattcagtagcacgatgaagatcaactagacaaggatcggcagccaatggtcgcacctcggtctcgtcttgctctcagaaacgggctggtggaatgggtggaacggaaatgggagcaggaggaggaatagtggaagcgggagtggtggaggtggtgggtatgacagaagtggtggatggctcgggagcgattggagctggcgaagtgggaggtggagtggtagctgtggc

SEQ ID NO: 202962 - DNA, 440 bp, Zea Mays
cgagtgtgtctggatggtggagacggacgacgtggctgagcggcggtagaagacccccggtgaagaactggacacgctgcgcctcttccagccgaccggcgcgaggtagaagggcctggaatcggctggcgtactcttccacggttccggtgcgtcggcagtcgttgagctcgaacatcggggcagaccggagcgggggcccgaaccggaggctcaggagatctttgaaatgtccccacgatggggtgccctcatcgtcctgaagctggatataccatagctgcgcgacctcgtccaggtgataggacgccatgcgcacgcgctcctccgccatggtgcgatgttggcggaagtaagcctcgcacttgttgaggaagatcattggatcgatcgtgccgtcgaagcggggaaagtcccacttcttatggctcgggaagaag

SEQ ID NO: 202963 - DNA, 386 bp, Zea Mays
gaggcacgggatgacctcaacccagcatcaagcacatcagcgcaaacctccatcacaccatcatccaccggctccgataacaagtcctctggaaccatatcctcaagagtctaatcaaagttggccagggacagttcttgcaaaccaatgagagcagacaaagcaggagagggaactccactactctcaccgctggcgatgaattgccgactgtttttccgagtcaaaggaacttcatcttcctcctcgtcgtcgtccacattggcaacacaagcagcacccccattgggatcagcaacagatggagcacccactttgggatcagcagtggattgggtacacccattggggtcagcatcagtaagttcagtcacaggcatttcttt

SEQ ID NO: 202964 - DNA, 659 bp, Zea Mays
attgttcccaatatctgggttcacatgcctcctactgcttgtctacgttttattctttaagaagaagacttcaagaagagcacatctaccgcaactttcttttggtgagcattttgtgaaagttacttacaatgatctagcccaagcaacaggcggtttctcagaatccaacttgattggaagaggaagctatggatcggtttacagtgggaaattgatggaaattaagattgaagtggctgtcaaggtttttgaccttgagatgcaaggagcggagacaagcttcttggcagagtgtgaagcgctaagaagtattcatcatcgaaatcttgtttccatcgtaactgcatgctcaagtatagatatgacaggcaattctttcaaggctttaatttatgagctcatgcctaatgggaacctggataaatggatacatcccaaaggtgacgagacagttccaaagcgtctaagcttaactcaaagaattgcagttgtcgtcaatgtagctgatgcattggattacttacaccatgactgtggaaggcccactgtccattgtgacttgaagccgagcaacatccttctcgatgacgatatgaatgctctcttgtcagattttggcattacacgtctctacgccaatcctcagtcaatttggg

SEQ ID NO: 202965 - DNA, 445 bp, Zea Mays
gcatattgtagcatagcgaataaaaatcatgtacgctatgctataatgttatcaatgatccttttatttatgtgcataggtatctaatgagattgaagggttctgttcatacaaaaagtcattgtgaaggatcaatcatggagtggtctatgtttactgaatgccttacattttgtgctcgctatttatatggcgagtctcaattgaaccatctagatgcaaatgatgaagattgtagtacaactcctttcttccatagaattggtcgtggattgtctggaaaatgtgtagttactttaaaccacaagacatggctacaagcccacagatatgttttgttcaactattacaatatagggccttacttggagtaagttatctatataaatatatatcttctcatcacatgatcactaccttttgcatgttgaagtgataaaatgac

SEQ ID NO: 202966 - DNA, 364 bp, Zea Mays
gaacatatatatgagcctgttctaacttaagcaattcaaggtctcgagtcttgcgagcaccaagtgatcttccaacacaagaaaatattggtaaagaaaactttccataatcagactcatcattgattcgtccaggacgattgtgcactgtctgcacatcatctaagtacctcgagcacaatgttataaattcatatgcaagataaccctctgctattgaggcctctggatgagccatattgcgaatgagaggtttaagaagttttatatatctctcaaattggtacatccatcgatacatggtgggtccaccaattaaagcttcggtagctaaatgaataggcaagtgcatcatgctaacgaa

SEQ ID NO: 202967 - DNA, 1526 bp, Zea Mays
cacagcaccaagcaaaaaggaagcagatcaagggtagccgagcgagcagaggtaccccggtctctctttctccttccgtacataattatccaattcagtttgttacttgttaagagaattcgatagtaagtttgtagtaagcttggtcactccttgaactcaacgtagtactttctccgtaatacgccgccaagagatcattctttattttttgcaggttgtcaattacgtgccttaatatgagtcattggaagcagccgtcgaaactcgccatgcttgtagtactgctgctgctgctatgtcatgcagtggacaaagtccattgctcgacgcaccataacaacagccaagattttcattccctgcttgagtttcacaagggcatcaccagtgatccgaacgaagccttgagcaattggaaccccagcatccacttctgccattggcatggtgtgaactgcagtttcactcgaccatatcgagtcacggagctcaatctcaccggccaaaacttggctggccaaatcagctcctctcttggaaacctgaccttccttcatacccttgatcttagctacaatagcttcagtggccccctacctcttcttaacaagctccgaaacctggacgtactctttctgggaagcaaccatttgggggatgttattcccgattggcttacaaactcttccaacttagttgatctagatctctctgaaaacaatctcaccggccatattccttcaaacataggcttcctaacgaagctagaaggtatagccctttacaataataatctcaccggtgtcatcccaccaaccttgggaaacatctccacactagaggtagttgatttttcagcgaatcaactaagcggaagcattcctaataaagtttggcaaatctcaaacataacaatgttaaatctaggacaaaataacctatcaggtggaatcccagatactctctctaacttctcttctcttacagcattaggcttgaacaacaataagctaggcagcgcattgccatcaaacattggcgatgtgttccgtcatctaaatgaactatacttagataacaacatttttgtgggtacaattccaacttccctaggtaatccttcgagtctagaagccctagacctatcaaacaatcatttcagtggcaaaatcccaagttcttttggaagactttcaaagttacagattttaaaccttgagctaaacatgcttgaagcaagggatagtgaaggctggcaattctttgatgccctggcaaactgtagttccctgaatatactttcagtgtctcaaaatcttctacatggacctataccaaattcgatttcaaatctgtccaccactcttcaatacctaatgatggcttcgaacaacctatcaggaaccgttcccccaactattggaaaatttagtggcttgattaaattatcacttgcaaacaacaaccttacaggtaccattgaggaatgggtcggaaacatgacaaaactacaaatcttagga

SEQ ID NO: 202968 - DNA, 371 bp, Zea Mays
ggggagtacggcggtgagtcaccggagtggcgtccagcgcatggcttttacctggcggccttatctggtcactggtggtgtaaatctcaacagcggtggcatgaatcgcggtggagatcgatcgtcggcggtgagggactatcgcgctggcgttctgatcttcatcaggcattgtaccatgggatgctccattcagtcaacctgacagccatagtttagggctagatttcttccagatttctatggcaacacaaccagtgatctgcagcaatattgtagtgctataaaccagctacaactttgctatattgtgctcccacaaaaagtcaatggatcttgcttgaaattgagcttgaagttcatgccattcc

SEQ ID NO: 202969 - DNA, 570 bp, Zea Mays
ctgagacaccatacatacatgtatataatgaataaatacatatatattacgccgtaccattattgttattctttagtttgatttgattgagtgaagctcttcagtagattcagatgcaatgaactgcggtgtggtgtactggtatgacctcgtgacattgaaaaggcggcgggcacgaggacgaccatgaccaacacaacatcgtggtgcacatgctagacaacaagcgtggcatgagtcggacgtaggtggctagaccgaggtcgtcacgggagcctctgggcacttgacctggttcgctttgacgacagacgacgctggcaataagttgtcatgtcaaggccatcggagtagctccaatatgacatggtgttcggtttgggcaactttaggtgcactctaccctatgactccgcaatttctagccacctcgccgtggtcgtaactcggatgtggctagacctttaagtttaattccgcaattatttcggtcagccaacgttaagttttagaaaagactattcgccccctctagtccaccatataggccctacggcagcaaccgatgac

SEQ ID NO: 202970 - DNA, 320 bp, Zea Mays
ggtggaggtgtccatgcaggtatgttgggtcataattggacattatgacctgtcattctttccgattggtgaggtggtccgataggtctttcctgctgtcgctcttaagtgggtgagcgaggtcgctttgctggccggtcacttgggtcggccttcttttttacatatttagacaataattggtcaaaggtcgggctagatctgaccagtcggccagctacctttaccgtgttagttttccacatacctatttctggtcgtcgcggtttgaaggtacgcggtcgtcgtggttcctgggcgttctcggaccatccactgga

SEQ ID NO: 202971 - DNA, 356 bp, Zea Mays
tttaccttgccccctcgtcaagatcgccttcatcatcatcataataaaaaaatatatatgaaaaaaaacacacacacatagagagagagcacagcccggtccggatcaaatggatcgtcgtgttccgtcgagggagtgatagcgtggtgacatgtgcgcggccgtacgggggagagtggagtcgagtcggacggatgcagcggacggactagaggacgaaacaaaaaacgcgggccacacccagccggcccgggccaccggcgctttgccctgcatcacatgccctgccacatgagccatggccacccacccacctgctttcattttttgtcgatcgtgttgggccggcggttccg

SEQ ID NO: 202972 - DNA, 453 bp, Zea Mays
aagccttgtagagggaaaggacacttgttgtgtctgcctccacaatgttggcgtgtgcttaagggtacattattctccattccttcttatctaacctatacatggaaaattgaccaccgagaatcttgctaaatttgtcacttccaatatgcagtgtagcagtggggattgcaacattacatttcatcctacttgcgctagaagttgtggtttttacatgaacacaaaagggtttggtactacaccacagcacaaagcatactgtggcaaacacagcgtacaacagaaagaggtaagggggtactaagctatttttgaagtaataggtcactcggatctgtacgatgcttgttttgttattacttctgtctcttaccatctttctggaaattctgtgcaggctgatgcacagcaatatggacctgaggagctcacgagcatgaaacgaatgag

SEQ ID NO: 202973 - DNA, 429 bp, Zea Mays
gtcctcccaaccgtttgcctcggcgtgagtttgtatggagttatggtgccccagattctgttggcgagaaaaaggagtatcaaattaatcaccgtggcagggattctgtccgtcgtgaccgggagcatgaagatgacgacgaccctcagaatggtcgtcaccagggcacccgtcgccggcgcagtctatccggcttggcacgggtgtctcgctgtcgtggaggccttgctgactgctacagttctaatggaaggcacagatcatccacccccttccgtcgtcatgggcagaagttgacagtctccaactcctgggtccctgtggtgaaagctaagaaggtttcctttgctaaccccctgatctcggccatgtggccgtcgggtgtgggtgaagggtcagcagttgctgattgttctaggctaaccaatg

SEQ ID NO: 202974 - DNA, 726 bp, Zea Mays
tgcatctacctcctcgtcatgtttggtttcagagatccgccactttcctctgcgttttttttcgggatccttttgtctttccatggtagggtgcgatgacgaggtacacacaaccctgatcaatcgcctccgatggcgatctgatgttcaccttttacctttggttcgtattcgctgagcatccgatcttcttcatctatcgaggccagcattttttgtttctttttttttcttgctcggtttgctttggatcgagggacctggggatccgccgcccttcttcgtgcggcgtcatccagtttttacccctcgaatacggcttgcaggcgcgtcctagccatctcgctctctgcataatcctctgcgagacccgggctcgtatgccacattcgtcgttgtcaaactaaacaaaaaaaataggcttttgtcgcgaagatcccagcagagaggtgcgctgatgcctccctaacaatcataatcttcgcagagaaacgctcatgatccgtggtttcgtggatgtgtgatttggatttttgttccattacatctgtttccacggcgacattttcatgattactgcagcgaactgaacgagggacctatggatggactgctctttgtccgtgttgtgccgtccaagtttgccttcggatagtaaaaccagcaatctggtcacgagatctcgcaagccttttcatgtttgtgggaatggtgtgccaatttgcc

SEQ ID NO: 202975 - DNA, 302 bp, Zea Mays
gaaggacttcaacatctcgaccatgttggctatggtcggttcagacatggtgggaaggtgagggcggatgctgtggagaaagaaggcgatgttggtgggctaaacgacgtggcggtggctgcttgggggcagctgctatggtggactgggaggaagtggtgggagaggatcgacgtgacctagataccaggttgtcaagggcgttcgttcccaaggatgtcggtccccgactacggagttcgtagtcgcgatccgtggtagacggtagggttatacccccacgccgccgctcttcgtcaacc

SEQ ID NO: 202976 - DNA, 320 bp, Zea Mays
ctctctcttccatgcatttagagtggccgttgaggtgatccactgcagtgggtttttactctatgcgtagcactatccacatagcgtattgtttaaagctgcccactgcaggcagcctaaatgctggctctatgcatactttggttgatgattgtttgtagccataagaaatacatagttgatacatctttcatggcattggacttgcttcatcattcaccctatattctattgcacgtgcttggtggcatagtactttgcttatgcctaaccatgttgcacatctgctgagatgaacattgggtacacatggagacccc

SEQ ID NO: 202977 - DNA, 494 bp, Zea Mays
tcatgacattcctttgttgcctggtgtaaatcctttccgactcaggccttatcgatacactcctcaacaaaaaaatgagattgagaaacagattaaggaaatgttggaaggtggaattatccagcagagttccagtcccttcgcttcaccggtgctgttagtaaagaagaaggatggagagtggaggttatgcgtggactacaggaaactcaatgcttatacggtgaagaataggtttcccatgccagtttttgatgagattgcagatgagctgagtggagccaccgtattcacaaagttggaccatagagctggttaccatcaaatcaggattaaagagggagaggagtataaaacggccttccatacgcataatggacactatgaatataaggtcatgccgttcggtctgacaggagcaccggctacctttcaagattttatgaatcacatcttagctccccttttgagaaagtgtgttgtggtattcttgg

SEQ ID NO: 202978 - DNA, 429 bp, Zea Mays
ccgcagttcattgttttctcagatgctgatggctttattggggattcgtggacggtgcagtgtgagatcatccagcaaactttgttgggaggtcagcctcaagatgaggacccggtgccagcggccccggcggatggtcagcagcttccttttgagtttttttggtttgggtcaacctgtgccggcggtgggttgggatcttaatttcccaccagaagacaacgttcaagctcagcctgcagacaacattcatggtgactgggatcaatggattgttaatgctcctcctgttcagcaacctcagcagccccatctggaccagccacctgaagagcagcaagtcagcaacccccattcggacctgtcctcagatagttcttctggtcacattcatggtgccttgctgcagaatgggcagattcagaatgg

SEQ ID NO: 202979 - DNA, 383 bp, Zea Mays
agatgctatcccagtaatgcactctcttgcattgcaatggcgtggctgtcgtgaagatttatacaaatccttaattggttggaagtaacgagagaagttaagttcaaggagagtacaactacaaggacgacgacacgtacggtagctaggttaatttggaagaaacctatcatcgcttccttgtttaggtcgccctagctatgtcgttcaagcatttttgaatctagtcatcctatgactgacactcaaaatagtggagtcgttactagggcaacctacatagaaggacatgaagcctgctattatggaaagatcaaaaatataatcgagattacatttactggaaataagcctttagcgctagttttcttcgagtgtaaatg

SEQ ID NO: 202980 - DNA, 795 bp, Zea Mays
ttcgtcgcctgggcactgccgctcctgggtgacccctcctcagctgctctcgtcgccgaggggctccgggagctcctgtccactggggacgtgtccccagtcgagaggttcgtgccgcctctccttgcagcctgccgtgacgtgctagaggatgagcggatgtcgcccgctgtgctccggtgtctgctcagcctgcttatgttggttgccgccaagtttccccactgcttccgtccacagtttgttgatatcatggacctgcttcttgggtgggcgtttgtgcaggacctagctgatgcagatcgcagcatgatcattgatagttttccgcagtttcagtggcattggcttgggaatctgcagttttcacttggattactgcccaagttcttggccgatatggaggggcttgtgcatgatctcaacctgggaggcagccataatcctgggaggcttcgttcgctgtttgcttgtttctctacggtactgcagattatgtcttctggtgtggctgagcgaaataacctaagagaacttgtagctgggcctctggaaggtttagctcctcaacttttaaggtgtgcatcagtgatagcctctaaccttggctggtctgagaggatggaagacgcatccaaatgcttggtcttgcttgcagagattctgcaggaaaggtttgctgatttttatgtccattttgtggatgtgttggtccagagcttggaagttgcctcctcggcacagttggcggcagcacttaagactaacctgcaagttctatcactgcaaaatttg

SEQ ID NO: 202981 - DNA, 2043 bp, Zea Mays
caagcgccgccgagcaagcgctggtcgacgagctgctcggccagtaccggaccgcgctcggggagctcaccttcaactccaagcccatcatcaccaacctcaccatcatcgccggcgagaaccttcaggccgccaagcccatagccgctctcatctgcgccaacatcctcgaggtgacctttgtctttgactcctcttacgctcgtcaaactgccgtcttcccctcctctttctcaattgaccatgtaaaagtaattctaaggcgccatcaagtagtgacaagcacccactggctgtctgttatgctagatatatcacatgtgctcggtggtgcggtaggattaccaggccgctgtacattgtatacactagtgtccatgctagctatcaagatcaatagctgtgatgttgcgaagccagttgttctgcgtacaatagatgcaaaagcaaatgctgatttacctatcgttgctgagaaatctccccccatctgttctctccctcttgctctcttgtgtctacggaacacactttgtgatgctatataaagggcagaccctgtgctggaggctcccactttgtgatgctgtatatatggtttatatgatttcaaacgtgaagtttgtcgctcaacttcgattctcaagtgttcaattgttcatgggtttataaattccatactcctgtgacactgcaaaacaaatatgaacattgtggtttgaaccacactctactaattagagggctacagcagttaccactggtacggaaacatcataattatcagcttatggttgactatcgaaccaggcttcaaaaagcatttcattcctacgctccccacaaacttgtgcacagattacatcctcacgctgcagtaactactatactgttctcatgctgaccagtgacaaagttatcaacttgtgtaccccaatcagttgaatggcaatgtgttccaggtttcagaaagttctactacaaactgaagtttatgatacaccgtcatgtacatatgaaaaatatattgatgcactgataaaagggcaggatattgtgaagtataatatatgccaccacaagcgcggcctgcactgggcttctccttacactcctggatagccggctaactgctgagcgttggttgacttggtttgtgtattactttgtgtaaccttgctgcaatacacggtttgagacggcatgttatctatgctcattttttttccttggttgtattttaaaaggaaaaattactggatgctttagaagtaaggttgagtcttagtcactggataaaaggaatgacaaataaacaccattgaaccttctcatctatgtagctatgtgaattgtaagacacaccgttgtatatggtctgttgtcaaatcatatctgccagtgttcttgtcttgaatccacattgtcgaggcatatcagcatttggtttttcttgttgctctgcatttactataatccattatagggttatgcaattgttatccactatgttggagggggtgtatctattttatttgatggttacttgtccttgtaggttccaagtgaacagaaactaccatcactatatctacttgacagtattgtaaaaaatattggaaaagattatgttaaacatttctcagcaagattaccagaggttagtatttcatcctgtaacatcttcttgatatgggaatagagacggttccaatctctggaaacaatatttatttattgagaggatgtagcttggacattacaataactaagttctctttggttgtatttttcatttttgctaggtgttctgcaaggcatataaacaagttgatccttctatacatcatagcatgaggcacctttttggaacatggaaaggagtgtttcctctacctccgctccaaatgattgagaaggaacttggttttcagtcatctgccaatggatcatctagtgctgcaccatcaaggactgattctcaatccccgcgcccatccaatagcatacatgtaaatccaaaatatttggaagcgagacaac

SEQ ID NO: 202982 - DNA, 506 bp, Zea Mays
ggcaaagtgcgagctgaaggtggtggtgagggagaaagagcgagagatgctggacgtgagctcaagcacagcgctgtcccaggcggtcacgacgcccccctggaaccgtcggcattgacgcagagaaagctggctagatttttaggcaaaaacgagcgcgctttaaggcagctgaggtcgcacagtttggattcttgtaggcaagcaacggacggggaggcaagggagataacaaacgatagtgcatttatccggatcgcctaaaccacggacgttccacgaaagcacaacacagtttttacaacccggactcatgactgaactgacagaccaccaggggacacactacgaccacggcagagggggaacacaccacggcgacatgtgacatacagggataggtatgaccagacaacagacttggggagacagcaggataacattacagaccacagaccgacaacagatttgctacagtatcgacggcaggtcgcccgtccaccggc

SEQ ID NO: 202983 - DNA, 702 bp, Zea Mays
gggaggttgagggcagcggaggacgcctttgaggaggccccaggatcacttcagcacagtggtcgactctacctcacggaagaagagtggaatgcccggcgcaagaaggaaatcgagcaccatcctggcagcagctcgggtggaagatcagggcgccatgatggagggtaccgtggccgtggtcggggccgtggccgcagtcggggcagaggagggtgctcatcaggtggaccaccggctggaaaggtcactggtgatgagtgcagaaggtgtggcaagatgggacattgggcgcgagagtgtccgtcaaggcacaagaaggagcaagcacatgctgtccaagaagaagaggaggctacacttcttgtggcaaagacgttcccggtaaaaacctcaacacttaaaccatgctgcaagatgtctagttctcatctagagatcagggaggagaaggtgtttttacggcatgaagaagaggagaaattagaggagggaacctggatcctggacactggagccacaaatcatatgtccggatccagggctgttttcaccgatctggataccagagtgctgggtactgtcaggttcgatgacaacttggtggctcagattgagggacgaggaaccatcaagtttatgcgcaagaatggcgagacccggtcgtttgttggggcttattttattcctcgcctgacaaca

SEQ ID NO: 202984 - DNA, 457 bp, Zea Mays
tctttagatactgcaagatatttcccctcttcttcactggtatcattctgctccttctccaggctatcctctatcacactgccagcactagcaggaagaagctcctccatgcttccaccatgcataaccatagcagctgcctcactcagtacatcagacctgctggtctcatctaccacctcaccctccttctcagccgattcatctaagacttctccaccttgagcaataacccttcatgcgtatgagattcaaattgcatctccccatcccatgccacttttagacccactttactgaacaacggatcacccaacttccatggagcattaggaacaacaccctgctcgcaattgttgtgcgtctggtcacccttcccttccaggttcaccacatctccatgcttggcttcctcatcccaaatcacactctccagcggcatttcgttgaacaccag

SEQ ID NO: 202985 - DNA, 346 bp, Zea Mays
gtccggtttgttcacagaataagagcagatccctgcacgccaaatcaagcagcggtgagaaccctgcgagcaacctgaacatgaggcagatctcttgcaagcaatctgagaagcctctgtatccagcagagtactgtccgatataaagagaaaaatgacccaagagcaatgctaatgctaaaactacttggcctcatgcctctgtacccagcagaataaacgtaattggcctcatgcctctgtaaaaggagaaagaatgaacctgacaatgtacaatatcctttcaaattatcatttcaaaggagaaagaatgaccccatagaaaacaatggcttacagttccaag

SEQ ID NO: 202986 - DNA, 273 bp, Zea Mays
ctctgattatagccacctgtgacggacaaatctgtttgctccggctttggtaagttcttaatccggtgcttgttctcgtgatctattcttgtgatatgtgtaccaaccctaaaccttaatctactctaataccttcttgttctctgattatagctgccgtgagggaccgatcttgtgctctggctttggtaagtgcttaatctggtgcttgttcttgtgatctgtacttgtgatctatgtttgaaccctaaaccctaatctactctactacct

SEQ ID NO: 202987 - DNA, 968 bp, Zea Mays
cctcgagaggcaggaggaggcggtcaagacaacgctgcaggcaagggcgagactggagccgggccacccggcgaagtggccggtacaggtacaatcggttgggcagccgacgcatgaccagccggagggtgccgacgctggtacgtcaatacgggttcctagtatcggtctccagggggtgcacccgtagtaggcacaacaggactagccggcgcagcaagcgtggaagttcgagtagccggtgcaaggacctgggagggctggcccgactgagaagaggtagtgtcggtgggagcaaccctcgaaggtggtgccgtcggtgcaaccacgggggcaacagaacgagtacctacaggtaaaagacgtgtttcgatggatgaaggcatcagatccatctcagacaaaaaatcaaaatcattagttcgagggggcaaggctgcgaaagggaagcaagccttatcaaagacaacatgacgagatgttaagacccgatttgtggatagatcaagacaacgataacccttatgctcagtagaataccccagaaaaacacacctagtagagcggggagcaagcttatgcggcgtagtggcagcgaggttcggatagcaagcttatccaaaaacacgaagccgctcatatgtgggaggtgtgttgtacagggcagcaaagggacaagaggcgcggacagttttagtgggaaggcaattgagaagataagtggatgtatgaagagcatctacccaatagcgaggaggcatggatgcttggagcagcaaggtgcggatcatattgttggtggtgcggagcatgcgttcggctttaccgttctgcggcgatgtataggggcaagacatacgaagcttcacaccattggtgagaaagaaggtccgggtagaggagttgtcaaactcccgaccattatcacattggacttgcttgatcgtgcgcccaaactgagtatggac

SEQ ID NO: 202988 - DNA, 765 bp, Zea Mays
ccgtggacgaggcgtgctctaggtttgctacgcctggaaacgcgtcgtagacgaatgcacgtgttggtgttgccagtaccgcacgtactaggtagaaggctccaaccaagtgtcagtgtctgaagggaccaacagagaagacctccacgacggttgtggtgcagcatgtcgggagtgctgttgcagctcacgattgtcagagtggagtagacgaagtagttgaggatgagatggcgacgctggcaacaaggttgtgctggaagaaggtgaagaggtaggcatggcgacgcatcgaggattctggagtcgcggcggcgagagccacgacacacaggaagagactcaacgccagtggagtgcgacggcggtacttgtcggcaaagaactcgacgatgaacgtggtgcagaccaatgacagtgtcgacgcaacatgcaggtgcaacacagatcgacgggtgtgatgacgcagctcgcagaccatgcgtaggagacgcgcatcgacggagtcgacgacgatgtagatgtgatagcgggggtcgacgacgaacgacgactctgctgcacgaagagacgacacaacgactacccttgtgcttggttaagaaactcaaggcagacgacagacgtcacgggagggtgaggtcgcgctcgcgatcggttagccagactgacggcgtacagggcaaagacgatggtgatgtcgatggcagaacctcccggccagtagtggcgacgatgaaccggcagagatcgacgtgccggcga

SEQ ID NO: 202989 - DNA, 612 bp, Zea Mays
aattgagagtttgaacaacaaagccagaaatgtctatgcacagaatctcccagaaccagcttcatccaaggaattcaagaagcataaaaaaactactgatgtttcatctaatgatgtcatcagtacgacatgcacatctgatcaggcagtttctgtttcacatatttctgctgtggtgcagagacgaccaaatgtgaccattgagggtacaattcttggaccggcacattcacatttaactgaatttagcaaagctgagaagcttggtgattcaattaacaatcatttacataggagagttgattcttcgagaaacagttaccatggtccttgtaaagataggccagctaataaattcggaagttgtggacgtggagaaagttacataactaattcattaccagtagctgatttggggaatgatatccatcatggccaacaacctcagattgcctcacagctgcaacctgtgattgtacctgatgatatgccagcttcactcgattatgagtctcaggtatgtagttgtagatttgtgctatttttacaaattgtttatggctatcattctaatattttggaaattccttattgcaactagctttaggtggg

SEQ ID NO: 202990 - DNA, 685 bp, Zea Mays
ccacgtctgtgcaggccccttgaggtggtatgacgccagccatgtgcgatcggaggccggagtgcgctgtcccctaaagaattgctcacagtgattgagccaattcaatgggtcttcggatccgtcatacgtggcgaactccaacttataaaaacgtggggagggacgagcgtcgacgccctcgtaagccgtagcctccatgccagcatcatggcccatgggtgtgcgcatggtagggcgaccacgcggttgctgcggcggaaacgtggggtagtaggctgctgcgctcttgggagagcagtccatctaccccgttgtacagcgggttactggctgtgggaccgccatgccctccagtggcgctgcccggcatggaggaggtgatcgtcggccgaggcgagatcgacgagtagacgggggcggccaccgcggcagtgccataggcccatgatggaattggtgaaggcgacggtggaaactagatgtggtggattggggtggaagattgcagcggcgctgtggatgacggggtcggctctatgggcatgccgtaggggtaggagatggggtgtagtggtgcagattgcagcggtgcggatggatgagtgagggtaggccgatccacggatgatagcggcgcggataggtttggctgtggtggctgggcatttgggggagcagggat

SEQ ID NO: 202991 - DNA, 558 bp, Zea Mays
caccaccagaatctactgtgcatgggaagccttctacttatggtatcattgatcatgccaaagttggaaagctacctttaaatattgatggtagttctatctacaaatctcaagctggagggtatcatatagggattacaaatgcctttgctgctcctgcattcaaccaagaggaaaacatttccaggcacagtgagaagccacgttatgcttttgatattggtacacaaaatgtccatcctgacataatccagcaaccacccaatctggctgtccagagcaaccttatagctcccattgaaccacctggttctaatgaaaaggttactgtgctaccatctaactctggtgctcaggttccttctggatcacctgtacagcgtcctaaagaaatggccaatcacttggtttcaattccccccaatggcagtaacaaatttccattgcagtctactgttggtattgatcgtgttgaaggtacacaggaaccggcttatgcagattcacttttctcaaatcaggatccttggaaagcagtgggcaatgcatctttagtgc

SEQ ID NO: 202992 - DNA, 614 bp, Zea Mays
gtgagccctgagctagagaaggcgacacaggaagaaggtgccacaagcggtgcaaacgaaaacaagcaagaagatgacgaagggcgtgtgatctacccatatgaacgtctgacaacgacagcagaagatcctgcccctgacatcgacgtgaccaaacgagaggtgatagacttatcttccaccttccgttcgcatgcgtttctcagatcaaatgatgatgccatttactgttatcaactaaatgcagacctacttatcgtcagccgagttcaaagacaaattcaacatgataagggcagagttctacaagcttcccaagtggaagcagagcaaattgaagtcttgtgtccaacttttttagcctgcccacgactgtctcgacttctaaagacaataaccgtttgtcagaagtgggggcaccgatttttgcatttagatctcatgtcttcacctgcctatcatattctttcagacagttcttattcttcctgtttataggatctaagattcatttagagctcaagaggtttggaattccatagcccatttctgttgtggggctctccggatcatacgtagatgctttttcagtttggtcaaggtttgtattctag

SEQ ID NO: 202993 - DNA, 382 bp, Zea Mays
gtctcttctgcctcgcctctcgcctcgggtggtccgccccgcggcggaggcggtcgggggaacggtgatggtgacggcggtggtggtggcgacggctggaagcgcccgcgcgcttcccagggagcgggtgtggtggaggaagcggcagcgcagggagccgatgtcatcgtccttgacgttggggtatggctattcctgtagctgtagtacgacgagtagacactgaccaccttccgctcttaaacaaaataccatatcatgtgtggcatagaaggatctttttacaactttttgaatacttggctacacggattgttactttacccacttgtaacagttttttcatatttagaattcggattgccataacataacaaacatt

SEQ ID NO: 202994 - DNA, 458 bp, Zea Mays
ggaggcgtcgggcaggggagatgaccgggttctggagatgatgcgcagtttcagcttcatgcaggcgaccgaggaggatttcatggagggcatgaccgcatacgagcacaacggcgttggcgacggcacagcgcacgggcctgtcgcgccggagccgcctgcgctgacggcgactagcctcagcttcaggtttcagcaccagatgcccgaagttccaacggagacggcgctggtttcgagagaattcactgcggcaagacaagagacggcggtagtttcgagagaactgacagcagcgagagacgatgatggacgacaacgagaggaagagaaggaaccacactttcctttggaaccattcgctccgttgcagacggcggcagacatgcaagaacaccggcacgacgaagcagaggaaacagagttcctggcggaggagccggcagaagagcggagcg

SEQ ID NO: 202995 - DNA, 317 bp, Zea Mays
ggtagtgcttttggaggacgatgtggtggtacagaaggatttggcagcgctttggcaggtcgacttggacgggaaggtgaatggcgccgtggagacgtgcttcggggggtttcggaggtacaggaagtatctcaactttacgcagcccattgtgcgggatcgattcaagcccaatgcctgtgcatgggcatatggcgtaaatgtgttcgaccttgagacatggcggcgggatggttgcacagaattgttccatcagtatatggaaatggtgagctgctccgatctctgttcacaacttacaagtgacattgtggtac

SEQ ID NO: 202996 - DNA, 274 bp, Zea Mays
ggaggctgtgggagtgctcagatgctgatgcgaggcacttccgtgataacattcgattttttaacggccatttctcattcacttctctgtattgttgccttgatagtatgactacaaacatggattgtggtatctacacgttccgtgcacatggcatgatgtaccacaacgtaaggtcgttcgatagggaagttggggcggaacataaacaccttgaactctacttctacgatgatgatcccagcctcgagcatagatatcgtaaatgtcgtca

SEQ ID NO: 202997 - DNA, 440 bp, Zea Mays
ttcccaatgttatcactgtctgtaaaaagcctacgagaacaatgatggacaacatcttcaatcttccatctagtctcttcatcttcaactatttcatgtctactgcaacttcgagaggaagaacctagagagtctgaggctaaagaaacattgttgagatccaagtcaacataattacaaccattctcttgacagggatgtgtgccatgacctggcaataagctcagtaccgcagaatttgggctaggcgaacatctggccttcccatggtgtttatctgcgagcctactctgctgggctcggatggatgaatgatgatagtcactaattggggtagattgattgctctcaagagatctgctgctggggcttgcagaagaatgtgatggagatgagaatagtacagacctgctagtattggatggagatgctccatggct

SEQ ID NO: 202998 - DNA, 299 bp, Zea Mays
ccagccgttcccgggatgctgcaaaaccttcccttgccaatacctcggccttcaactccacacccgcccactccaaaaaattcatgtccaaccactagtggagaagatcggacaacgacttgccggatggaaaggtccactgcttaaccgcgcaggacgcctcaccctagtatcttcagtgctctcctccatgccgatctaccacctaaccatattcccccttgtgaaatggactaaaaagcaaattgataagattcgacactctttcctatggaaaggcgaggataacgtgcacgggg

SEQ ID NO: 202999 - DNA, 510 bp, Zea Mays
gttttagcttggtataggtgaagtagttaggcatgtttgggcatatatgatagtatgacactagagtgcacttgacaaagctgagcagattggaggaggtgtgcttgtcttgtgggtgcatgctcccctactagagtgaatgtgtgcatattggaaatgtattggtgcatgatgatagtacagatgatacatcaacgtcgaatctcataccttttgcacttcggctttcaatccaataaaaaatttggcagcttttgctaaccctgtgccctgtatcatggtggttttggctcttctttttgctcaatttgtcctctgaccttaagttatttagatttatatatccgtgatatttaggaaggatttgggcatagcatacattatataaagaacataggatgagtggatgtgtcttccagagaccagagtgcaaattgggatattgtttatgcattaactcatgaggtagtctgaatctggaggataaacaaatggagaatatacctttta

SEQ ID NO: 203000 - DNA, 312 bp, Zea Mays
gccgcgacgtgagctgtaccctgagccacaccaccgtgagggcgacgaggagggtcagaggtgtcgtagcataagctatgaagtcgagtcgatgactcgtgaaaaccaaagagctagcgaatctggctggcagtaatagtgacatcctctcgctcaaaacgaaacctcatccagtgatgatctgggtctatccatacagtcgcgtagaaaactcggacccactcctcaacatacctatcactggtagtcaaaagagtcagaaggccaggcagatatgtgaggtgcacctcagagtcagcaccggcggctagc

SEQ ID NO: 203001 - DNA, 316 bp, Zea Mays
cactggaggaggacagacatgacgcacatccgtaggtgctcctcagcctccatgcgtagtgctgggacgtggtcaggcggtcagacggggcgacaagaacggacatggcggttagacggggccatcgtccaatctgggagctgaacatcgaacgagaatggcggcatggcagggagccagggacggggagtgcgggtggacaaggcaaggccttaatttattaggatgctgtgggggtgggggttattgggctcaagaattgttgtggccttgtgtggatttttattttgggctggacgcctgtgcaacattgatt

SEQ ID NO: 203002 - DNA, 345 bp, Zea Mays
gtcaactttagacacatctgctaggcccgatgtaaatgctgtacagagttccaatcagacggtgaaaaaccatgacacaaaaccagtggcagttcaagccgcgacaggtaaccctgttatgggtcatcgtgctacaccaggcgtggcatttgctccaccaaaacctactttcatcaatcacaatgagatagcaaagaatgttctacaatttcttcaccaacctgcaaaccatcctagctggactccaccatcaactgagtacatgcattctcgtttgtgctgtcaaatatgcaaagttgatatcattggtacagacaatttacttgtttgtgatgcttgcgagag

SEQ ID NO: 203003 - DNA, 295 bp, Zea Mays
gttgacaatctcaaacgactgctagataagggggagaaatttgggttcgttggaatgactgggagtacaaattgcaggcattagaagtggtggaactatcccattagatggagaggacagtttacaagaggtacattggatcccctccatcatgctttaggcgattgccttgtatgacttgtagattcaacatgctttttttggtggcgaggtttcaaacaacgatgtcaacgtgttaaccagtcatcgttgttcactaacgtgttcaagggtgaagcatcaaatgtgaacttta

SEQ ID NO: 203004 - DNA, 386 bp, Zea Mays
gtgaatttgagttttagtgattgatgaacataagtattgtgcttgcagtgatggtctaatttgagttatttgcaatgacaatggcatcaagtgtcttggcccctatatttcgtttgttgattggcattttgcacataggacatttgtgaagaataaggacactataatgtgaatgtatgctatatgcatatagacattctttatagtgtctattatggctttgtttttcctttgctcacattattaagggggcaaggtgttcaacctaagagagtaaaaatgagagcatgtgtatgcactagaggatgtctcttagttgagctaatgatagtaagtggcacactaaagtagtttcaagtcaaggttcacaatgaagttgaagtgat

SEQ ID NO: 203005 - DNA, 296 bp, Zea Mays
cgaggtcggaattctatgtcatgagctctgagttcacatgcccacttggtcgttcgtccaactacctctttgttatggagtatatctcctattaggaatcccatgactactattactttgtggtcgtcaaagtaatgatggagtttgcgagcagttaggagtactgcatataatagcttctgaacttgaggataccttatcttcgagggacagaggacctcgctgttgaagtagacaggatgttgtactggatatgcatgctcttcatctgcctgctcgattatcaacgcagtgct

SEQ ID NO: 203006 - DNA, 311 bp, Zea Mays
atgtgagcaccatggtctatattagtcatcaatattccctatgtgtttcgtttgaactctaccaggttgttaccgtgggtgcgagcttgccaaatcaagctttgaatcgcacccgtggcctggagaaactgtgaaattgggaatccagtgagagccctaaagcagttcatgggggtcatgactaagtttttgtggctgtttagggccctttttggactgtgtcgtcgtgcttttggttttcagctcgtcagagcctccggcatgacagaaagacgcggttttctgaaagcgaagaagtccagggacccttg

SEQ ID NO: 203007 - DNA, 292 bp, Zea Mays
tttgacactagatctactctatcgtatatttgaaaaccataagtctctatttttttcctgactcagactctttttctttccgatctaataaggaccagagaattggggatatgtgtgacgtgattattaatctcacgtggcattatgctttctgctcctcctcctcctctgtggcttcaagttcccaagcatcacaatattcgagcattggaatgggaagtatatataggatcaagattggacctggacaaagatctgcccgcccttagcctgtccgtccaatttccgaaag

SEQ ID NO: 203008 - DNA, 680 bp, Zea Mays
acacccctatggacgacgatgttgagttggataatgtggcctgcataatcgcggtggataaatatgtcaatgggagggggaaaacacaagaggactacactagaaaagaagctgctcagcgcaaagactcgagtgaaaatcaagggcagaatgatgctctagagctagacaacctccggatggagatgcaagctgacgaacgtccgttagaaccaggaaacaagagggacaggaagtggcagaaaaatgtatatggactcggatcagcttcgggacagaaggaaaccttgtccaggagagaaaatccacggtcagatagagggatggtccacagtaacgacagcaaaacaatttattacaggaagggtgggacggaagtcgataatgttgatgaccaccctttagaaaagcaagaccaccaggatacatcaagtgacggatctaaaaagagaagccgaccagtggacaacgcatctggtggcaacagaccatacttggatgagaacaagaagcgtaatctcagagaagatggaagatatgctcattatgaagactggagaagtgaaaggaatacagcagcagacacgtctggatataaggcccaatcagaagagaagcctgtatggacaaacactcgaacaggatcaagggagcattcactggacaggcaaaggatagag

SEQ ID NO: 203009 - DNA, 283 bp, Zea Mays
tgttggtaacccgagttgagtcggctagccctcgatacagataagctgggtatgccctatctttcaatggttgaatattcttgaaaacaaaatcagtaaccacagcttcagcagtcagacccctctctttcagcaatccaacctcagctaacaatgcacctgcctcagctacctcctgatctgtgggagactcggtccagcttggggtgcgaacatccggctgtcttcccgaccgggaggggagagaattcccgtaattctcaactatgaaccactccaagcg

SEQ ID NO: 203010 - DNA, 421 bp, Zea Mays
gattttgcgagggaagacgccaattaggagcctgagggtgcgacggcctagggtttgtagctactggtgtcgtcgcggcctgtggaggcggtaggggacagcgacatctgcagccatggacgacagcgagctccatgaagaggagaacccaaccaatagtgccgtaggtgagcttgacgatgcccaggacttcatcacaaccagttatgcttttggtttggtgttggtgcaagtgccgatgtcgggccgattagggttgtcaaatagctgggctctgatgtgttgggtgtgctatgttagctagtgtatttgctgggctttgtgcacggatctgtggtgcctgtttacaaatgggatttgataagccgatggcatgctgtttggtgctatataggattaaatgttctttttttatgtgtgg

SEQ ID NO: 203011 - DNA, 337 bp, Zea Mays
gggagtcgagcactgggtctgcgcctcgccgcgaaatccgtgctccatcgtcggccagcctcaccaccatcgacggtgagactcctcttccatgccggtggtgttgggttattgtacctactgttaccggggtctcgcatacgtatagaaaggggtaagcagcatgaggtagaagacacacggtcaccgtaggatcttcatcgaactagaagtagatcgttccatggttgattctggaccgttgatcgtccaacgcatggtccggatatgatctttgtttcattaaactgtgaccattgatctcgcgggccgtcgatttctgatcgtgcggacatca

SEQ ID NO: 203012 - DNA, 488 bp, Zea Mays
agagtattgaaacgagagtgaggagggcatgagcggacctgcagaaggctggccacggcgaggtgttcacgcggcggtgttttgactgatttgagggaacttcgaaattggcgcgctctggtggacaatctgaggcacgggcggttgcgttgggtgcgtgactacctagcagagctcactgggacaacaatttataagtttcatcggcggtggtgtccaattttgaggtggcgtgctggcggccggagagaaggacgagtcaccggagccgcataacgtggcatttaccgaggcagtgtctcaggcgatgaacaaactatctaaagcggtctactgtgacgtgataaggctttgaggcacgcagccgggctagataacggcaaactccggtgatgctagcgcaatcaaccgcggcgggacacgacgaccggtgagaatagtggtaggaggttatctacggcgcgatatttcttaccccttcttcgtta

SEQ ID NO: 203013 - DNA, 347 bp, Zea Mays
ctcatgtgatgtctaagtgaaaatacaaattagtgtgtgaagggcgcaattgatatacacatttataccagggttgattattatggtgaatgtgtttgctgattgtgtatggtaattctggcgcacgaaataacttgtataaaattagtaagtctacttattagtcatcattcgattaatttaacgctaacaaatggtaaagtgttaaattggtttgagtctctagaacgcggcaattcttaaagtaaataggagctgaaattattaattgctgttttggactgcacacagtgatttccccgtgctgtatgtttgatgaaccaaatggtgttttctgtagatatgtg

SEQ ID NO: 203014 - DNA, 280 bp, Zea Mays
cgtcatattcgaaggccacaaagcacaagaaagtaggaggcaacaaaaacttaatgatcgacaagttctagtggccacgaacagcgctccggctccttaccgatggttggagcacacaacaatatccttcagccgagctgatcagtggcttaacttcgatcaccccggcaaatatctcctacttgtcgatcctatgatccgagaaagccaggtaaagaaggtgccgatggatggtggcagcaacatcaacgtcacttttcctcgaagactccaggcccta

SEQ ID NO: 203015 - DNA, 303 bp, Zea Mays
tagctcgacctttatgggaagccaagtatatatatatggcctcgacgatagagatctccttgggctttggcaggatctctccagagagtaagggtgtgtagtcactctttatataaactttagtgactaaactttgttccctaaaagtcttatttaaaagtcatattttagttacctcgtttgatattttagggactaaaagtgattaaactttattcactaaagttgaggaggtataagaatccctaaatccaacaaataaagagaaatgatctcggtgtaagccggtcgctgtcgttctgc

SEQ ID NO: 203016 - DNA, 522 bp, Zea Mays
gcggctctgcggccaatcctggcgatgacgacaaattacgcgcaccacggacggattcctagctcgccaatggctcctacaccttcaacgagcactagcgaaccactgagtccccttgggtcgagcacagatagtaccggcggcgagttgatatgcagcggcacccacttcccctttttctcgatggcaactccctctctccctctcttttttgcaccaggcacgactcggatgcatgggttcttgcgggcaggggcatggggtccatttttattgcgcatgcgagggtgattcgaccgattcggcccacctcgatttcggctggttccgttggctattgacacgacctttgtttcagttgagaagaaagtgctgacaaggtggccccacatgacagtggcagaggtgagtctccgcaccggccctcagcgcctgccccaatcgtttcggaaggattgggtaagtgggtcacgcggaatttggttcagctgggccgaaaggaggagattaggcccagacgcc

SEQ ID NO: 203017 - DNA, 326 bp, Zea Mays
tctgcaggatataggttatttgtgttacttctttgggcacaaacaaagtaacgattttcttctgcctatactcccagcatttctaaatgatcatgatgagcagctccgtgcagttttctttgcccagattgtctatgtttgctattttattggagcaaggagtgttgaggaatatcttctgccatatcttgaacaggcgctaagtgatggtatggaggctatccttgtaaatgcacttgattgcttgaccatgatgtgcaaaagtggttatttgaggaaaagagtaattgttggtctattggtaaaggttctccccctgctccggt

SEQ ID NO: 203018 - DNA, 372 bp, Zea Mays
ccctgggctcaaacgtcctccttgtccgcctaatataaatccccagccgaacctccctccatctgtctgtgcttgctccaaatatccgcgccaccatttgtcaccaagatagccggggaggagaagaaagccattgtgctagtgcctcatctgcgcgggcgacgaagcaccagggagcaacatcgagatcgggcggagtctacacggcgccgaatcggactgaagagtgggcggatcaagggcaatttctcgccggtgaagaagtgttaatgcgaaattgcgaatctacgtgccgccgtgggtggccctattcttgtctccgtctccggtgtggagctattttattgattcgatttcgtttcctctgcacgt

SEQ ID NO: 203019 - DNA, 576 bp, Zea Mays
cgtcttacagaagttttggaagagctggttctatggggttaataggattggagaatctcggaaatacttgctttatgaacagttcaattcaatgtttggctcacacaccaaaacttgttgaatacttccttggtgattatgccaaaaatataaaccggactaatccattgggattgaacgtatgtagattttcttgttaacatgcaaaaagtccactccaaggattcagacaattctttactgacttttctattaactagggtgaacttgccttggcgtttggagaactgttgaggagcttatggaccactgacggaaaaccagttccacctcattatttcaaggaaaaaattgcatgttttgctcctcagtttggtggctttaatcagcatgattcacaggaacttcttgcttttttactggatggtctccatgaagatcttaaccaggttaaatgtaaaccgtatgaagaagcaaaggatgcaagtggccgtcctgacgaagaagtagcagatgagtactggagcaaccatttagctcgaaatgactctgttatagttgatacatgccatgtaa

SEQ ID NO: 203020 - DNA, 453 bp, Zea Mays
tgatgttgatctaccaataccacctcttcatttggactaattggatttgttgttgtcactgttttggttggtggtgccccaagtatgcttggaacaagttttgatgaccgcacccccagcatattgggaggtgtcaaagtaggagttgtctcttttgaagttgatgtagaggaagcccttgattgtacaaacttggttggaggcgcctgctttatgcagacaggccactccccaagggtagtatgatgaaacattgcttctatcttgaggccgacagatttattgaccttcggcttggagaaaccaggaggacctgagctggaggacgcaaccttgtgcaccttgttagggtgttcttgggagactgacactcttgacctcgcagccatcctccttgcccttcgctttgcagctttagacacaactggaatgaaaccatcatgaggtttggag

SEQ ID NO: 203021 - DNA, 289 bp, Zea Mays
ggggaacatttgatgaccactccagctgctctgcccgcaagggcagcagttggatcccaggggacagcaccgcggccctacttcctcggtgtcctcttcatcctctagaggatagaagatgcccccgtctccgacgacaaactgaccatgcaagggcaggaacccccacagcacgaggcacaccttcgtcggaatcgacgttataacgcttggtgtcatcacgtggccagagaacgggaccacactcatcctgtgtccaaggatgaggcgtctgaagtgtaacacctca

SEQ ID NO: 203022 - DNA, 342 bp, Zea Mays
atcggagctgatgcactgatcgaacccacttactggatagtagttctagagagggctgcaaaatgcactttagtagggtgccaaagcaaaaatagcaatgtgtggtaacaagtgatgtcatatcgctagttttgatcccacgagatctcgccgccatgaaaggttaggtggaaaagtgctcattggttccgcagtcatgatctgttttggtctagtgatattgtagaggcactaacactgttcacatagaggtgttgtgcctagcaacatgttctcccaaaagcgaacctatgagccatccttcagcttaaaggtgccaaaatgaagtccgtcttaaccttt

SEQ ID NO: 203023 - DNA, 478 bp, Zea Mays
gcttctcttcggttggatagatctactctccacctctctctccctgtctttgttgcttcaaagaggtcgaagtgggtagatccgtttggtaccttcaccaggaggcaaaagtgggcagatccggccatacatgaagatgtgcttgctgacggggaggccgagcgatggcagcgcacagcggaacaggcggatgtctcgggacagcactgtcttggcgacgagtctgcatgggaccttccggcgggttggagagctgcggcggagcgccggtatgacctgctatggctctcgccataccttgccgtagtctactagtctttttctctaacgtcgctggcatgccgactccacttccgcagcctgcttctccgtcgccggccgccgccattccagttctcctctccagctctgcccgtcagtctactagtctttttctctaacgtcgctcgtagcctcgtcgagtcgctcgcacgccgac

SEQ ID NO: 203024 - DNA, 350 bp, Zea Mays
gtcaattgctctgtttgcagggcatagtggtcaccccgaattaagtaagcgtgagcatgttgcaccgccttaagtcgttgtcgacttaagtcgattgctctgtttgttgggcatagtggtcaccccgagttaggtaagaatgcaagtcaatcgtaaacgagccaagtatctttgaaatctctctttattgatgacgtatttccattattacagaatacatggtcgccccggcttgttttgaaatacagctaggggtaaaactttcggaggtgctctatgttccaggagttcccaacttctgtgccatccatctgggtgaggcgatatgatccgggccgagtgacctctgc

SEQ ID NO: 203025 - DNA, 715 bp, Zea Mays
actttgctgctggagttcctttgttttccctctattgtcttcagaccaccccttctccatcacctccgaagtttgcttcaaaaacagtcatcacatgccagtctatcatggttcgtcgcctttacatcacagtgaagcatatttgtttggccttttctgctcaattaaatattgcctgtgattttcattcttaggtaaccctccaggagcaatcgtgcttaagaattgcttcattcttggctgatggagttgtacccaatcgtggtgccatattgccagagtcttcaatcaacagcctgacattttcacttaaagagtttgatctctctgttccattagatactgatgaaatcgcaaggtgcagtggaaccaagaatactaacccccaatcatcattttcgggtgcaagactgcatgtggaagacctatacttctgccagtcaccatcaactaagtgtccattgctaaaccttgacagagatccagcttgcttccttctgtgggaatatcaacctgttgatgcgagtcagatgaagtgggctacttggtcttctcacctaagtctctcacttgaaacttctagcacttcaaatggacagagagcagtcagtgattctaatttgtggaaatgtattgaactagatgatatccgatttgaggtagctatggttacagcagatggtgggcctttgttggatgtaccacctccagaggg

SEQ ID NO: 203026 - DNA, 520 bp, Zea Mays
taaaacggcgtgaccgggatgtccaagtcgttggtgccatatggtagatgcaagaagagcagaggtcgggaaccgtagggggtatagtggaccagagctgttacatctgaagatctcacaccgagtgggtagatccttcacagagcagccaaaaggatcaaattcaacagagcaattattatcagtggtaaactgacggacagaaatcaaatccttaatgagggagggggaaactaaaacattgtgaagagaaagattatagggaagacgagtggtgccaatggaggtgacatggatgagatgaccgttgccaacgataatatgggtaggaagatgctgggaagaggagggatgagatattataccagcgtcagatgtcatgtgactggaggcaccaatatcaaaatgccactcttgttgaggcggttgctgaagagtgatagtttggaagttggtagcgagggtgtgttgatcccagacgggtgcgggcgtagaaggatcggcgtaggcagggggcggc

SEQ ID NO: 203027 - DNA, 381 bp, Zea Mays
gattgcttgatgtaatggaggattacttggtttggaaaaagtataaatatcttcgattggatgggcacacttctggccatgaaagaggagctcttatcgataaatttaacgatcctaattctcaagcattcatttttcttcttaggtatgttacaattgtatcgcaagtttttataaaatgtgacgcttagcaaactcacgagtatgattgagctactgatttgattaatatttatttaaacttatttatctaatgacaaacaaatacttagctctatcggttttctacctctttttgttagtatacgagctggaggtgttggggtcaatctccaagctgccgatacagttatcatatttgatactgattggaatcctcag

SEQ ID NO: 203028 - DNA, 343 bp, Zea Mays
gccggatcataactctcatcatcactatcaaccatttcatagtcaacaccatctgaaggcgcaagttcgtcattaatgtcattgccttcaaggattactaagtcattctcattttgcacctcatcatcctcctcatcaacaaccatttcaatatctacgtccattccgatagcttcggttaagtctatctcaaattgcccttctagtgcatcttcttggaagaactctccatcatatgtgtccgggtctaagttataatcttcatcgttaggaacaggcaatatctcgtgtggcgataccttatacacaacatcccaacccttaagatgttctttcgtttggc

SEQ ID NO: 203029 - DNA, 332 bp, Zea Mays
ggaccacgtcccagactcgttcctggatatcctcttgtcaaggtcggaagacggactcgcgtccccgcctagcgaggcaagctgtgaccctagtcaggaatgccttgcagccaacaccacgggagatcatttcccccacgtggggagcccgggcgagaactcacccagcatcatggagcgcaccccgcctcagctcaacccgcctccctaggagctaccgttaggcctgagcctctcacggagcgagcaacatccacgacaaaaagacaaggaagcctacggggggcgaccatgccaagtgggcgatagcacgccacgacgataaaaccccg

SEQ ID NO: 203030 - DNA, 449 bp, Zea Mays
tcaccgctactgtcgcaacaaccttggccgcaatgtccgccaccgcgcgcaatttgtggatcagctggctgatggccaaccaacctcacccggccataagactctggtgcccgaaccctgtgcgcctctcgcacccgtgccaaacccttgccgtcgcgtgtagagcttagggaaagataaagctagggtggcggaagcggggaggcacggaattcacgttgccgtcgacgtcgggtgccggagttcggatcagaagcctgcgccgggttgctgcgaaggtggtagtggcactggccggccggattgaaaagctgagcgaccttaattgctcgtcggagtttggcttgggtgccgcgccgccctgcaccgtgaacggaaaccttgccgccgtgaaacaaggtaaataaaccctctagtgcgttcgccatgtccttctttaggtgtgtgcg

SEQ ID NO: 203031 - DNA, 418 bp, Zea Mays
gtctttcttaggatgcatgtaactgtttagtaatgttagctaaaagggtgtgatacatttggttgcagaaaagaactgagtgtaggaagtttcaatatgggattcctacatacatggaacacttagcagagatgttccatggaatcgtggttgatgggtctagttcttgtatccctggaagtgacaacagacaatcagaagaagtgtatgaagaagaaggagatgatggagatggtgaaggattcctaaactccacacccactagtagcagccgcaaaagggccagtagtacaacagacacagccactagtccacctaaaaaggaaaaagttctatgataaaggtgttagaaggaataattaatgaaatgcaaacatcaaggactgcagatactgaagttttcacccaaattacaaat

SEQ ID NO: 203032 - DNA, 495 bp, Zea Mays
attggcctcgggcgagttgtgactgcgtcaggcgagttgtggcctcgggcgagttgtgacttaggtccctcgtgccttgtccggtatgccatgcgaccgaaggcatgcaatggtcggctcggccatagaaggaaacagatcacagacaaggaaggttgattgcttcccaaatgaagaaccaatggctcctaggctccttgaggctataaaaggacccctaggcgccatggagcagcaccgaaaaatatcacaagagcatacaacaactctgagattctgcgatcatgctttggttcattagagagagatttgagcgcatttgagttgagactctgtcggttttaattcgtgcgctcttttcttcacttgtgtgcgtggtcttgcaacatttgtgctcttgtgtgtgttgctacttgctcccttactcttgttcttgattgtgatcatattgagtaaggtgtgagagatttcaacttgtggagattcctcacaaac

SEQ ID NO: 203033 - DNA, 315 bp, Zea Mays
tgatgttgggggatgctccatcaaacacacattcatttctatgcttccatagccaccatgccacaagaatcaccaaggaattaaatcctcttttctgattttttggcacctgacactcagcttctttcaccagtcttgaaaagttgatgttgccaatcctggagtcaagcgatgcaaccccaccttgttcagagtctgccaccaagtgtccctggcaaacacacaagccactaggatatgctgagctgtttcctcctgctggtcacacaaccccaccttacaggatgttcaagacctcgtctgcttaatctatcc

SEQ ID NO: 203034 - DNA, 585 bp, Zea Mays
cacaccttgtatgcgtgacaaaagagaaagccaatcgatcaaattggctccaaataactgtctccgccaggaaaagttcggaggcgaaacgctcaaggcttctgatattgaaatgaattttttcctcgcaatgttatacagggctggatattggtcttttaaagaggacccatccaaccaggcatcctcccagaacctcacttgagagccatcctttatgaggaatgagccaaaacggaggaaggttagctttactttcattaagcctgaccaaaaatgggagtcaccaagtttccactgcacatgagacaaaggttttgagccaacatatttattacgcagtaattgttgccacattccatctgaggtgagtagcttgtacagccatttactgagaagggttgtattcatcatattcagatccaagataccaaggcccccttgatcctgaggttgacatagaatgttccatttagcaagtctatatttccttttgttttcattcccctgccaaaagaacctcgatcgaaaatagtctaacttcttaaggatccctttaggtagggagaagaaggacatcatata

SEQ ID NO: 203035 - DNA, 326 bp, Zea Mays
cattacagtgacggaagtcattgaagggacaccaccataggcttcagctccgaaggcaccagctgttgagagcacaacagctactgaagctgcaccttcggaagctacagctgccgaagctgccacagccaaagatattcacttagaaagcacaattgctaatattgataagatactgctagacatggccgcagaagaagctgttgcatccaccgaagagactacgaccccagagcccgagaagaagaaagaaatagccgaagacacttcggaagatgaaatttttaactatcaaaacttagttggacaagagctgacaaaggctg

SEQ ID NO: 203036 - DNA, 343 bp, Zea Mays
aagccgcccatgtacgcagctggaacaacacaagtgtacgaatacggccaacaagccacatcaccattacaattacatacacacggcgagggcatcacctattacacacacacggcgagggcatcgcctgttacatcggctcaaccttcggaatgatacccatctccctgtaattaaacaacaatatcctcaattcctcaccctcaaaaagctcccgaagatccccctcgcctatgcccgccccaatcggcgaggacaacaattctcgtttaccaaccccgtttacccgaagtcggccacgctccatccccatgcgacgacgcctgccgcttcgtgaaaattc

SEQ ID NO: 203037 - DNA, 390 bp, Zea Mays
aatgcattgtactagtctctactatattagagtaccggtttttttctggttccacggttttccatcgccatcgtgcttccacatatttaaatagtagaaatgctaaaattatgtataattagggattttatccatgattgctggttcttaacctatatttatacctatctagctaacagagtacatattgtgctttatattctgtacttaagtgtaaataaatgaaaatcgttgcatgcactttgctggtttactaaaactacacttgaacctacgagtagaataacaaaatttgtctcctcgtcctcgtctaggggcgctgtacaactgccggccggagatgcttcatgactcaaatgactactattaaaaacaacaaagttgtcccgt

SEQ ID NO: 203038 - DNA, 976 bp, Zea Mays
tgctctgacagaggaattgacgatagagcacctgtctaagttccaggttcgtctctagtactcagtaccatctttcattgctttcgacttgcagtatcctttggtcttgatccagtgaatctgtgatgcttgtcgttgttgctagcagcgttatttatctgttgcctgctaaagcattacatttctgatttcacacctttcttgtctatttgctatgattgcttaacccacagcgtgctcgattgcgcaggctgttgttttcactgatataagtttggagaaggcttatgaatttgacgactattgtcacagccaccagcctccaatctcttttatcaaagctcaagtctgtggccttttcggtagtgtcttctgtgattttggacctgagtttactgtccttgacgttgatggtgaagatccacatactggtataattgcatccatcagcaacgacactcctgcaattgtatcctgtgttgatgatgagaggcttgagtttcaggacggtgatcttgttgttttctctgaggtccaaggcatgacagaactgaatgatggaaaaccaaggaaggtaaaaaatgctaggccgttttcatttagcgtcgaggaggacacaagtagctatggtgtttacacaaaaggtggtatcgttacacaagtcaaagaaccgaaggttctacgtttcaaggcactaagagatgcaatgagagatcctggtgatttccttctgagcgacttttcgaagtttgaacattcacctgtgcttcatctagcctttgaagctctggataagtttaagaaggagcatgtgcgctatcctaccgccggctgtgagcaggatgctcaaagtttcctgaagtttgctgctgatattaatgaagcatctgttggttctaagctggaaaacattgatgaaaagttgctccgtcatttcgcaagtggttctcgagctgttttgaacccaatggccgca

SEQ ID NO: 203039 - DNA, 419 bp, Zea Mays
aataaactaagagacagtttagctgcttccaaatttcaatcggcaaacacgtctgctccccatcccacgacggcggacgatcgacgacggacgagaccacagaccaggcgcgggcgcaggcgcagacgcgcaggccacagcccgcagctcacaggcgccaggcggccaagagccaggggcacggacggccgcagctcacaggcgtcaggcggccaagagccagaggcacggacggcaggtcggcagccatttaaacttgacggtgagtgtgctggtgctaaactgctaatcaactctagattaagatttaaaaattgcattattggagaacgtgctggtggcctggtgctaatcaactcaagtttttgttggtgcttgacgatgtagcctgtaggcagacttgtaccccattcagtgtt

SEQ ID NO: 203040 - DNA, 358 bp, Zea Mays
gggtggtctagggtctgggtccagaagaacactataggcactaaatttcagtatctcttcttttttccccttttgcgaggaaaacactttcatattgatctacaggaaactataaaaatcagttgtttcatgccgagttgtgagttggtgtcagataaggaaccacactaggcagggtgacaccttcgattggcacaacacgagttaatataggtgtgcttactgaccaatccacacaggggttgctgccatggtctggctgcggtatgtggttggctaattagccaccaagaccatatacagactcaaatcgagtcaaggcgcggacccagtaaaagacatgtacacccaataaaat

SEQ ID NO: 203041 - DNA, 274 bp, Zea Mays
ggtggttggcgtagccaaaatgatgacgcctgggaccattgccgcccccacgtcatctgccatggtaaatacgagacaactaggtagccccaggccccactagtacgcgtggctccacatggggtaaaacgttggttttacccttgccttacggctccttcccagggaagccaccgctagtcaacccctctcctagcctataaaagggagaggttggcctcatggcaaggggatcgaaaagagagagctcttggggcaaccgacgccttcagac

SEQ ID NO: 203042 - DNA, 357 bp, Zea Mays
cggcgaaggatagaaatgacaacagctagcgcagaaacaaaataaagaaaaatggctcaccggagaacgggaagggctcgtcggaagaaacaacttcgtgcgtggcagggacccctcgacacagcgacgagtgcggcgagacctccagctaggacatcggtcctttctccacggtgacaaatgatgcgacgacgagctctgcatgggacctctgctcgacggcgggcgcggcgccggggcgactgcgtgatgcaaggggtggttgctgcaaggttgagggacagagagcaggtgccgactgtttgaatgggactatgggagcggctataacggaccattgctaaattcttgcgtcgt

SEQ ID NO: 203043 - DNA, 274 bp, Zea Mays
agccccaaagtcgtcgacgcgttgagggtaagcagccatagtccatagagaagccgtgcgattgatcattgatcaactggccgcttgccatatgaaactgatcggcgataaatctgacgggctaaacaactatctttacccctggtcgatcgagcaggaggagcacgacgcgatcgccaagaacaggaacgacccggatgcgcccgtcacgtgggccgagtacagatcgatgaccttcacgaatcaggtgagcattgctcggaccgcgctgcgc

SEQ ID NO: 203044 - DNA, 399 bp, Zea Mays
ctaatttctgtgaaagttgaagtagaataaccattccagatcttggcgtacaggcttgcttcttatatgatcagcctaagacttttcttcctttaatgtgttcatttgtctcctgcacatccttgcacttgatttggttaatactttgaagttttgaatttattttctgaaaaattaaatttatgttgcagcgccaccagcacatcgtttgcacagccttctgggatttcattagcttttggtattcattgctgactctttttttgccgttctgtttctgatctgatggcactgagtataggaatttttataacagaaatgcatgagttacttgttgctgatagtgaaagtagttccattcgagttgttaatctgaagacaggaggctcaagattgctg

SEQ ID NO: 203045 - DNA, 347 bp, Zea Mays
ccattggctccggattggagtcctccaagttcttctccacacgaaaacgaagctcatataaaaagtcaccaatgactacatccacataccgtgggataatattaggatctaatactaacacttggagtcgacaccgaccatattgtctggtaaaaatcatatccacctcctttgacactccaaggattgagccaacagcccatataactgggaaatctcttaattcctctggcaatccagtaaattggacccacacttttggcataacatacttcacttcgtcatctacagtagcctctttgatttgcagttttgccttaaactttgtttgcacaacgccccattca

SEQ ID NO: 203046 - DNA, 657 bp, Zea Mays
ctccagtctccacacacacgcgcgccattgccgctgctgctcatcgtactcccaaatggagcagcctgcattcccctcttgctccgtggagcgcattcgctccagcacagggaagctgtgacgcatcgccgccgccaaatcctccacccgacggctaacgcttttctctcgggtctagtcggggtggagatccgtcaaggccatctcgtcgcgttgttggtcagtaatcctagctcgcttggacgaagcaaccagcactatggttcttggatgacaaaattggagcaggccactgctcacactgcggcggtgtccatttcttcgtgtctcggttcttggccccgtccttcctgatttctctgcttttcatactgaaaaaatcctcaaacctttcatccttaatcccctttctcggttccaagggagcttaaaccctaccctactgcctttttcatcttaagctccgtatctcgaaaaatccatcccatttgcatgagcattgcttcaattgcctggctgcacagcaggatcttgcgatgcggctcatcttgttgtggctctcgatctgggccgtgtgctccgctgcctcggcgggggctggttcagacatggaggcactgctggagttctcccgaggcatccggcaagacccgtccc

SEQ ID NO: 203047 - DNA, 350 bp, Zea Mays
agtgggtgctctgggttcgtgataagctaacgaagctgtctgtgcaatcaatttatagcagctggccacggttgtctcgaatttgaaggagatttggatcacggtggtgaccggatgttgcactggtgagcttgtcgtggcattcaacgacactatgactcaagggcggtaactcttagcttgccacggcttcgagtacgtggtgaaaagactacggcatggcgcaatcgcggtgaatgacgatctccacggcgacgaccgtctggccatgtcgctgcgcaagtgggtacggcaactatgcagtaacagtgccccaactttatcccctgcacgagatctttcactttatg

SEQ ID NO: 203048 - DNA, 389 bp, Zea Mays
cccatcgtctttattatgcatttgcttttctattttatagaccacatattctgagtttctgacattagatcagaacccccattgtaccacgatattagtatgtttcaagtatcgttcaaccagggtttgatgcttggaccaatgcaggataaatcgaattacagccaattcatctacaaactcagacacaactttccagttgtgtatcgatatatataatcccttgtagtatgatattctgtttggatgtatgaatagatatggtcacttccttcctctatatctgagcatccagttgtaccctaactcattctgttcctgaaaaaaaagttctgtcatttgggcctatggacaccatactattgtgagctaattcaactataccttct

SEQ ID NO: 203049 - DNA, 476 bp, Zea Mays
gagaacaagtccccaacaatagcaatgtcatatatattatatacataaacccaccatatatatggcgtagttttatgcgaagggaacaaaatataccatagttcctctctgaaaatagatggttactatagatgtgtccaacatccaagcaaatactaaggttagcgaaccatactagatgctgccgcaagttcttgctccaaactgtagcacccagacatcattggaattgttaaatgttcctcattataaattggattgatacgttcatgtgggtgctgagcttctgcgaataacaaaggttccatttctccacccttttcaatcaaaagatgtgttttattctgtagcctctttgttcttagacattgcaatctcatatctacttctttcatgcttggtctatgccctcctttggatcttaagcacgcttctataagtgaggagatatcattaatctcttcttggtctgcctc

SEQ ID NO: 203050 - DNA, 312 bp, Zea Mays
tcccaccacctatttgcctagttttttcttctcaaagttgtcgtccagtccatatattaggtacttaggtttcctgtttgttgttatgaaggtccatactaagaaaagagattgtttagaacataaaaggttgaacagaatggtgtatgttagctacaaccgaaagatggcaaatagatttcaatggattaggaagctcaactcaaagggaaagaaaagcaaccccttgatcctacaagagttccaatggaaaaatgagtgggttggtgaacattttgaggacaataatgatgaaaattctctttcgggggt

SEQ ID NO: 203051 - DNA, 339 bp, Zea Mays
caagcaaaagtacaattctgaccttgacaccaatacatttctcctaatacagatactaaggataaatgagtctttttgctcttgatttggtttcttatgtgacctttgcgaccaccttaagccaaagctcttattcttgatgaagctctgtcgtattccttgcactccctgcttcactgctctagcttcggcatttggtcctgcatcatgcctattaagatgaattaaaacagttttgttcactcttaggaccttcggcagagtaggatacccccaacacttacccctttgaccaactgcgcttttgttaaagaatcctcggggaagttcttattcaac

SEQ ID NO: 203052 - DNA, 285 bp, Zea Mays
gtgtcaaaggcatgctgacagggaagtcggtgatgcccaagttctgctcgagtcaacgagcttcttttgcagctgtatgcccccgactccacagttgccaatccttagttgttgcaacttctgctgaacttttgagcctcaaaaccttgcagtccgcagtcgtatggccactgttgcttattagtcacttgatctgaaccaaatcacaaggatgtcacaattcttagaattctgatttcatttctgcgaaatttgagcctcagaatttggtttcaacggggtgga

SEQ ID NO: 203053 - DNA, 489 bp, Zea Mays
tgcagaccttaggtataaatgcaggacatatgcccgacttctgcagcacttaaaggtaataattgacttaattttgccaaggggtctgcctagatattacatatttacttcattgacacatttgacatgtatcatttcttgttgctaattactgcagagtctggacaagagctgcttaggtcccttaaggaaggcatactgtcattcccttaatttactactacgacgagaggttagatatggataatggaatgctttttttaatttgattccatacagttcactttttgtttatctaatttcaaatatgttcattttgttttaatctcacatttaacaatttatctttttgtttgtttgttttgagtcctctgcttaatggacagttactttacaatccatttgccttctttatttgattttaaaggattcacaattttgaagtttactgtttgatttggttcaggcacgcgaatttgccaatgaact

SEQ ID NO: 203054 - DNA, 322 bp, Zea Mays
cagttatgcacttcagcatgggctgactgatccctttcttgtacagttgaccctcgactaatgtgaagtctcggcttctgtgctttagtcgtttggcctcattgctattgcttggatggtagtggccttacagatacatggtgattggtgcccgccagtcttcggtaatgatgaggttgacgatgcggtggcctttggcatcctgagttatttgcagcccttctgggttgcggacagctggtgtgctgacgacgtggtagaacacgtcgaaaggcaagacctcgcccttggctgtcgctttagccagcgcgttggcctcttc

SEQ ID NO: 203055 - DNA, 437 bp, Zea Mays
cacaaccctgataatctcgagcgggttggccttcttgctattaaccgaaatctggtgacaatcacctttcgctgttttaggcatccttagctcagccactaccttctctccgggcggggacttcaatgttaaggttctcttgtcacagctaacattcgcttcatacttcattaaccaattcatccctaagatgacatctaccccatgggtgtttattactattaggtcgctggggaaccctattccccttatttccacccttacatttgagcatatcttatctgcttgcactttaccaccgaccgaattaaccctcatgggcggcatcaatgactctactgagatgttatgcatttctacccatgttgcagtgacaaatgaatgagttgcaccagtatcaaatagcacttttgctggatgagatttgactgagaaca

SEQ ID NO: 203056 - DNA, 372 bp, Zea Mays
tatatccataatcccagatcccatctccgctggcagtacaatcggagaagaagcctgcataaccaagctgcatttgttctttgcatttttgaacagggctgggttcattgatcgcagaaatcctccatctttggtctgaataaatgggcctaaaccttcagccaatggcggtagctccagggactgctcaggtgggaggctaatggggctaccaaatccacttctactttcaggtggagaagattggaaggacttctcgtttagaccaaattgacgcattaaggcctcagtttcttcgtcttccagcgacttagctcgaaatttggtatcaatgggttggcttccattctgaagctcgagctcagcctcatg

SEQ ID NO: 203057 - DNA, 316 bp, Zea Mays
tctcatctcatctcagtcacttccccacccggcgaccagaaactcccgcaccggctgctgatggagtcttgacaagtgattcttgtcgatcggccaggcaagttctcgtcgtcgatgtggagcgaaatatactccctgcctagctaattaactgatcatgcatacatactcttccgttccatgtgtgtccgcagctacggcggcggtggccacgaaacgatggaattaggtgcttctgtttccatgtctatcctggaaaagctcgtccagagctgttcctttccagattcatggcgggggccgccagacgctgagg

SEQ ID NO: 203058 - DNA, 430 bp, Zea Mays
ctactctataagtacctaacgtagactgtggtgcatggttctgcctcctcacggtgcatacgacccacatgttagtgtctcccttcttccccgtgcgcgccctccccctctacccctgcctccgcatggtcctagccgcaatcggccatgaaaggaaaaatcccgtcactgccatagaaggaaacacatcccatcgccgctatccacgcctcacagcaatccagcgcacaggaatcccatcgccgaagacccgcacgcgcaggaccacctggcccaatcgttcttcccatgcaccatggatgccccgcccatatcctccgcaccccaaacgcaatccacgcctcgccgccatggaaggaatcgcaacccaatgccctcgtcgccatccagtgcacaggaccaccatcggcccgcatcccatcgcaagtgc

SEQ ID NO: 203059 - DNA, 371 bp, Zea Mays
cagcggtaggcagtgaagcagctttgactattccatcctgtttgtcttccatattctccctttgaacagcaacgtcactgacggccacctcagttttcactccaacagtctgatcttcagcgacatcaccacttacttgcaaaggcctgaacgatccctcttcgtcaattttgaaccctgaatcctcctcctggccagccgcattgctggtttccacatgtttgagcctttgcgggtcatctgaagcaacctcaactccatgctccacaacattgaactccaccgtgccccaatcgccatctggatgcaccgagtccccctttttaacctctaccgatgtgcagtgctttgcctccggagacccctcttcc

SEQ ID NO: 203060 - DNA, 303 bp, Zea Mays
tatcgtggatcgatcggataccgagaggggtgtccacgtgcccggtgccccctcgctcgcgggctaggaagaaaatgagtacggctggtgctggctcaatgaatcgcatgcgcagttgtgcacaccgacatatatatccagtgaaagtgaatgctggagtctcctccgtcccagccggccatgtgcctagattagtcattggagttacgctctttacgctggacgaaccgaaagtgatggaacgtcgaattggatggaagcaatagagtgatccgccgttagtacagtcagttagtgacacac

SEQ ID NO: 203061 - DNA, 296 bp, Zea Mays
atgatgttgaccaagcaagagttgaaggtgatggcagtgtaactaggtagttgctttaatctgactgaacagcatatctgtaggtagtagttacaaattactaatttctcaactaactcatctgtaactactaatggtgcttctacttgtcagacatgtgccacatccagctgaaaggatcactgcacaaactggaactgcaaattctcaccgacagtatgcatcaatctgccttctttgacttacattttttaagtccatatgttgcagctggtgtagttcatatctaaaattct

SEQ ID NO: 203062 - DNA, 348 bp, Zea Mays
gtcttcctatcacatccgtgggtgccgccggcgctcccggctattttcgcattcccgatgttcttgtcgctccttctttggtccacaatcttctctctattcgccgttttaccgctgataattcttgttctgtcgagtttgactcttctggtcttactgtgaaggactcggtaactcggcgccccctcctcagatgtgacagcaccggccccttctacaccctttggctcccgcatgccacctcttcttcgtcttcgtcgcctgacacaactgctgtttttgccacctgccacatcttctactacctggcatcgtcgccttggtcaccctggacgtgatgccttgatg

SEQ ID NO: 203063 - DNA, 381 bp, Zea Mays
ggaaaaatgtatgtattgtgacacgacgcttaggtcgctgttttataaacgtgtgaaggatgctcgtgatggttatgtgattaaggagtgatgtagtggcagacgagaagtaagtttaaattttcaaacgattagtggatagtatctcgatgttgtcatgatttttgttgtatggcaatgtgatgcttcgctttgtcaatcatcacattccatgcccctttggataaataaatgtcttgttgattgattagaggtcttatacgagtgttatcgcagcccaataattattggaggcaagtagcgttcatgagtcaatccttgctaaaattgaagaacagtccgataacatatgcacataagtgctttaggtcttcagtagcc

SEQ ID NO: 203064 - DNA, 556 bp, Zea Mays
taggaacttgtatagggagatcaatccatggtttggtagggttagttttttccaaccaaagccatctcattataagtgcccaacaaagctcagggaaactagagatacccacacctcccattgcctgaggtctgcacacttcccccaagcaaccagacaatggccacccttcgcttccctccttcctcttcataagaaacccttcccgatcttatcaaattcattaatgccccatttggggaagtcaatagccattgcagtatagacagacatcccagtaagaacatgctgcaccaaaactcttctgcctgccctgttaagcaaatcagccttccagttgggtaacctatcagcaattttgtccaccaagggccaggattgatgcttagaaagtttttgtaaggataatggaaggcccaaatatttgcaagggaaggaagcaatctcacaaggtaagatgttttgaacagccaggatagtttcctcagaacatcttatgggataaatattagacttttgagcattgttatggagtccagaagcatccccaaaaagt

SEQ ID NO: 203065 - DNA, 342 bp, Zea Mays
gggatatgtaaatccacatagaaaggtactcaattttctaaagaagtttaattacatcaagttctggccaagacttgggacccaacagagttgaaccagctaaattaatcaggaaaatgacacatgcttcttcatactacagtcacttggtcatagaatattactattcttgtgtgcgaattttcagtcaagataaatatttaatggcatttggaagcaatgcttaaactgatcttgtggtttgtccagaccaactaaacaaacataaatattcttagtgcaaatattttttgggtaagtccatttcgaaactacaggtagtaaattcaggggataattgcg

SEQ ID NO: 203066 - DNA, 409 bp, Zea Mays
atacctagacggtgtttatgtccactcaagaaaaacaaaacacatcaatatgccacattatttctcaaaataaaataatgaccttggaaaatttagccaaaatacgtgagtgaactgtacaaacataggttaaggttgtaaggcacctttttccaccatacagttgcgaaaaagttggaatataaagaattcaaaacaatagaccaccttttaaacctcaaatgatgtttctatgatattgagggcattgtattcacatgagacggtattagagtacaactagtggatgaagacgttattggcctagctaatgaccttttgtgataccaggtttcctataatcccctctattcaaggcatacctagatggtgtttatgtccactcaagtaaaacaccgcacatcatttt

SEQ ID NO: 203067 - DNA, 329 bp, Zea Mays
ttgcaccatctgggttgttcagtgtgacaacgggcgggagttcgataactccacgtctcgtgccttcctctcacgcggcgtccaacagcggatatcatatccctacaccttccctcagaacgacaaggacgagcacatgagttgcaccatcaccaacctcatttgtactctcctgtttttggtctcattccttgcttgttactgggctgatggtctccacactgccacctacctcctgaactacctcccctccaaggctttcagtcatctcacacccttcaccctcttcggcaccgccccttcatgttcgtacctccgtatctttcgct

SEQ ID NO: 203068 - DNA, 299 bp, Zea Mays
cttaccagatccttacaccacacaaaagagcctcacatcctgctgaagttggatatttccaaggcctttgactcaatatcctggccattcttgcttgacatgttacaacacttgggttttggtcgaatctggtgcaaccttattagtctgctgctttgcacttcctctacacggatccttgtcaatggcgagcctggggaatacattctgcatcataggggtcttcggcaaggcgatcctttgtcccccatgttgtttatccttgtcatggaggctttgaatgctatggtcagttatgc

SEQ ID NO: 203069 - DNA, 373 bp, Zea Mays
gcaggccgggggaacacccatccgtagcctcaccctggcccatacccgaaaacatgtccagcccaaccggcccatgctcagccacaccaactgggccaagatcaggggaccccgaagcaagcatcacaacaatagggtgctacatgggaacagacgtgccgcccccaatcaaagcattaggagcaacacatgcagatgccgccgccatctcttcagaagccgaaacagccgggcaacaattactaatcagggcacaaaccaaagcaccctcctaagctcccacgccccggaaggacgagcatgcgggcgcatcaaccaaagcgggaccacgttgaaccatcacaggaacgggagactccccggaacccgcgac

SEQ ID NO: 203070 - DNA, 437 bp, Zea Mays
gaagacagaacaattattttttaatcctaccaaacagatagcaccccacctgacatgaggttacatgacatgttctcaccaatcactgttttcattacccaataaatctgccaatggatctatcagcgcccagatttcctaccaaatcggatgcctaccatcggtgagagacatgcgagcccaacaaagccatgtccagaagggaaagcaactgttggcttgtcttactgttgagttgatggttcagaattattcctcgaaatagtggattagtggttgtgattagtgtgccttggaggcagaatggtgccatcatttactaccaaaatgagcagggaaagtaagaggactgcaacagatgaatctggtaattctgaacttgtgtgggtgggggctcaccaggctcagactcggacctaaggtagatgcggcagcaa

SEQ ID NO: 203071 - DNA, 591 bp, Zea Mays
ccttaacaaacgcacgcgtatctggtgtaatctgttatgggcaaccgggagctgcgcctcccttgatcaccgcaagtcggttgtacatgaattgtaatcatctctataaatagatagagccacagccgtattgtgcgtggcgtcccaaacattttcacatggtaatagagccaagatccaaccaataaacaatggccaccctttcttctaccacctcctccctcacctcctccagcgcttccaccatacaatctactcctgctcctctccatcagatcgttaccatcaaattaaccaagaagaattttctcttatggcgtgcgcagctgcttccttatctccgaagcaacaaactcatgcgcttcctcgatggatctcaacccatcccgcccgcaatggttcctgcgtcaacaagcgccggtgccgaactcattgtcaacccgacctatgagacctggtatgatcaagaccagcagctactgggcggtcttctgtcctcgatgacggaagaagtacttgctgatgttcagtccgcgacaacggccaaggaggcgtgggattctctcctgcgcatttatgcctcctccacgc

SEQ ID NO: 203072 - DNA, 278 bp, Zea Mays
ctcctcctctgtttgctaagcacagaaagttgatgccaagcaatttcaaaccacggcgtagcaggagggttgtgaagtttccccctgagttgggttctgaatccgctgctaaagtgtgcagatttttgggcttttgtgatgagcaggaaaatatttctttccaagatgctaggaagtatgctagtttgtttgatgctgccctgtccagcgatcatattgctgccctggcggctctgtttggttgggaggtgccccaagtggtgcaggcctgagctggt

SEQ ID NO: 203073 - DNA, 394 bp, Zea Mays
acttgataatgttgcgaatcggaacaacattagcaccggtgagagggagcctaacaatatccgcataggaaggattcttcctgccccggaccttcaaccaggaagtcgcttcctcatccgaaaaaagcttgaattcatgcttccaattgggtccaccacgattccagaggttgaagaaggccctgaattccttacgctcaatgcaaccagagttgtaaatatgaaaacccacagccatcgaagaaaccgaaaaccgaaaaacccgatcagccagctgaagcacctcaaagcccgcggcgaacccaccaagagcagcctgaagaagatgaccaaccgagaccgaattcaacttgaagatgcatctgccaaaggagaccaccaatcagaaggacga

SEQ ID NO: 203074 - DNA, 518 bp, Zea Mays
ctctaacacccagccgccatctaacaaatggctgggcctaattattctggcgcctggcatattgccggcccacaaaagagtctataacacttcccccctcctcgacaaagagctcgtccgcgagcgcgaatgttggatgctgctgtttgaattcttccacctgttcccatgaagtatgtgcatctgaacgcctaatccatttgaccaacacttcccagactcctctgttgagtctggcccttagaaccttttctggcgctgggataacacgcccatgtagaagaggtggcagtggaaccaactgggatggggcaggtccctcaaatttctttaggagagagacgtgaaacacatcatgaattcttgcatttggtggtaactgaagcttgtatgaaacaacccctatcctctgaatgacttgatatggaccaaagaatttgggccccaatttggatggtgcagctgaggtgacgcccacaacagtcctttgttgcaatcgtagccatacccaatcacca

SEQ ID NO: 203075 - DNA, 300 bp, Zea Mays
cttctaattaagcaaccatgcataccttcatcagtcatcacccctgcgaatgtacatgcatgatgacccgtgcatgtcttcggatctctcagcatttggacatctctgcagtcctaatgctcatcaacggcttaccaaaatgccctcacgttcgtgcatggatggttcgggcccggtcgtgtgtgcttcttattacacggggtgattaggtgccccgtgttggacgttagattttttcagccttctggggaccgaaaaggactcgtaaccatgtgttgatggaatcgtaccacgattttg

SEQ ID NO: 203076 - DNA, 297 bp, Zea Mays
gcacaatctgaactgaaagtaaagatcttcactgggaacataactgagaagcataggatggcccttgaggtttatttatgtcttcatgccctgtctgatcaagtgaactgttacttacagtctgagtgctttaaattgtatctaaccgtgtattagttttctgatttctgatagtctgttgctctaagtgttggcttcccaagaggtgcagtggagcatgttgctgctgaagataaggacaacctccttggtacagctgaccttgttatatattattcttgtctcgaggagcaatta

SEQ ID NO: 203077 - DNA, 531 bp, Zea Mays
gacaagctcaggaggctctaccatgtggccaggtcggatgacgagaggatgttattggattggcattttgcaaatctggaattctccaatgccggttgcctatgggagctttcgctcgcgcactgggatcaggacgatccttatgagatggggggagaccattgtttcttagccggagggaattcccggctcatacatgcattgtgtgatggggtgccggtcttgtatgagaagaatgtgacacggattgagcatggagtggacggggttagtgtcacagtggaagaagggcagatttttcaggctgatatggtgctatgtaccgtgccccttggggtgctcaagagtgggagcatagtatttgacccagagttgcctgaagagaagcttggggcaataaagaggttggggtttgggttgttgaataaggtagccatggtgtttcccagtgtgttttgggatgaagatattgacacatttgggtgtttgaataaggagagcagcaagcgtggagagttctttctcttctac

SEQ ID NO: 203078 - DNA, 309 bp, Zea Mays
caaaaaaagtagtctgaccgaatcaagtcgagccactagcatggaaacttcaccagagtccacaccttctatctacacatagcctttagctaccagacatgccttgtgcttgactacacgccctattgcattcttcttgacattgtgcacccattttatccctatgggtcgatatccaagaggcggatcctttagcttctaggtttgattttcctcaattgagttgatctcatcttgcattgtgtgatgccatacctctccttgcttttattgtgcaaatgttgtgggctcctcgccatctatcagcaa

SEQ ID NO: 203079 - DNA, 561 bp, Zea Mays
cattcctgtgctctcaaacttgttaaggtcagacgagccagcatacaggtactttgctgcacaagctttgtcaagtctggtttgtaatggtagcagaggaacacttctggctgtcgctaattctggggcagccattggacttgtatctttgcttggatgcgctgatgtcgatatagccgatcttttggaattatcagaggaattcatgttggtgcctaatcctgatcaaattgcattagagaggctatttagagttgatgacatcaggattggtgcaacttctagaaaatctattcctcttcttgttgatctacttaaacccattcctgaaagacctggtgctcctttcttggctttgggtcttctgacccagttagctgttgattgccccccaaacatgctgctaatggctgaagctggaatactagaagcacttaccaaatacttatctcttagtccacaagatgcaacagaagaagctacaactgaattgctgggcattcttttcagtagtccagaaataaggcatcatgaatcagcacttggtgttgttaaccaact

SEQ ID NO: 203080 - DNA, 371 bp, Zea Mays
atttgaacctggggcacacggtcatccaacggacgaggctaggctaccgagttagcagatgaggagagcacaacatcctggcaggaggcgggcacaacacctttgagagaggcaggcgaaaagattccctcaccgaccgcaacgctgcccgcgggagaggtgagccccatagtgtcactcaacggagggccaaggaccacaacccataacatcaccgccattcgggctagggctgacgtcgcgccacaagcactccttcgaacgacctatagggaaaaaaggcttggccaacggggacaaagggaagtggaaacgagcgccacgaggagaggggaggttggcggtaaggccggcgaggccagagtggtggc

SEQ ID NO: 203081 - DNA, 346 bp, Zea Mays
ttgagagcttgtatgaacttgtgagtttgagtgagtgtgtgagcctaagttgggtctgccttgtaacgtcgtgtgccctcccttttatagctcaagggggacacgtacaaggatactgagccccgacatgtgggcccaggggcaaaacagagggaatacatatagaagtatccaatgccagtgtcgcccagaagatatccgagcgccataatgttcgtagtgcatattgtattgatatcctgcgttgcttcctcggtaacacgcgagtgatgatgagcgtactgcctgccaccagaatggacaggcacaccgcctgcaagatggcctggtcgccgcccgtcagtag

SEQ ID NO: 203082 - DNA, 347 bp, Zea Mays
ttttaagtttcggtaataatgtgtttgatgtgtggtttgctgtgaggataaatttttaaaatgcggattatgtgttggggaatgcatcgataggtgtctacgtgaaaagtgtattgttttatgcatgtgatcgatgattgggatagtcgaggcgaatgaggagtatgattaatcctgttagagtcactatgctgttgatgccttatgcgtaatgtggggacatgtatgtacgtgtgtgttgtggtgtattgtagtagtggtggcgtaagataattgattgaggtgtgcgggtttatgccgtaatgtggttatactcgcaacgaagaaaagatgtatgtattgtgtaa

SEQ ID NO: 203083 - DNA, 273 bp, Zea Mays
aatacccaagatcatcatctggcttactctttggtatttcattgcaaacaggggaaccatcattggcaagtatggctgaatggacctgcagaggctctataatctcacaaggatctccacgagcaccctctgcaccactctcgtggatattagtgatgacagatgactctttataggggcttacagacgtataatctgaaagttctagttgtgaaacctcaagagaatctgcatttgacaaactgggaaaatcaattgctctttcagaagtac

SEQ ID NO: 203084 - DNA, 833 bp, Zea Mays
agaaagtcgagaggagggagatggcttcaaggtctgagatgtggcaacattttatcaagatcaaggatgacaaagggtctctaagggctggaaggtgcaaatattgccatcgtgaaatcaaggctgacacaagggggcatggaacatctgcgttgaagaaacactttggtacatgcaaacgcaatcctcatgttttcaacaaggactcaaagcaaggcaccttgcaagcatgtcatggggaagctcctgccacttggaggtttgatcaagaagcacttagagatgcctttgctgagatggtaatagaagatgagcaacccttttgttttggtgagaagcctggctttagaaaatttatgtccaaagcttgtcctcgtttccaagttccatctaggagaacttgcacaagggatattgtacgtcattactttgaagagaaagccaagctcaagaagttgttcaaagattcttgtcagagagtgtgcctgacaacagatgcttggacttctcaggttcaagatggatatatgactattacagcaactttcattgatgaaaactggaacttgcacaagaaagtgataagttttttcatggtaaagggtcacaagggggaggatattgggaagaacttgacaagatgcttagctgattggggtttggatagagtaatgactataaccgtggataacgcaagtgcgaatgacagtggtgttgattatttgaggaagcagttgcagaaaaccaacattgccaagggcaagtacttgcatatgaggtgtgcagcccacattgtgaatcttattgtaagagatggattgcaagaagtggac

SEQ ID NO: 203085 - DNA, 272 bp, Zea Mays
aggttgttctacaccactgattgggagatctacttccctaactgtattctccagagttcggccaccatgatctcagatcattgtgctcttctcctcgccctgcatgagtttactcaaggtaaaagaagatttcacttcgaaagcttctggacaaagttggatggatttgatgacgaagtacaacgttcatggtctcagcatttggaggggtcctgccctctaaatctgctagcggataaattggctaggctcgctcgggatttgcagtcgtg

SEQ ID NO: 203086 - DNA, 310 bp, Zea Mays
gactccgtggtatatttgttcggcgaagtcttcctgctttggtgcttggggatgattatggtggtgtggatttgggtgatgtggaggcagaggtgggggtggaagaacttgcacttcctggcggtgctggtacgcgtggttgggtggatgctggacgtgctcgttgttggtggtggtggtatgtgtgcgccacgactctctggttgttagctggatgtgctctagacatcctgtccctggtggccttcatttcgggacaatctcttgttgggtgcgcgcagtcctcgccatgaaacagatagtagaatct

SEQ ID NO: 203087 - DNA, 645 bp, Zea Mays
ggaaactgaacaaatcaattgccaaagagttgctgccagcagaacctgcagatttagcaatagaaccatggtggggcgttcggtttgtcaacttcacattggaagaatttaaggttagatccatccatggtgatttttattttttgacagaaaaaaaagaaaataaatacagcactgtcttcctatcatgtaaagtgcacatcgtttgctctcaatggaagaaaataatacattagtagaatcttgcattggtgggaactgatgcgctacattactgtagaagctttcagaagacgagacatcagcgatagacaaaatatgtaaggaggaagtcaattcatatgttctatttgacccggaggtagtacggggcctttataggagagggatggtatacttcgatgtccctgtttatcctgatgatcgttttagaggtaagcagcatcagcaaagctttcagctttgtcactgtttaactctatgatttcatgacttgggcccattttaagatcattgccatgcgggcccatatggccatattcatctgcatagttgcctctctttttttctcctttttttttgcttcagttttgaattcataccaccacttcagtttccaggcttgaaggttttgtttcaaacaag

SEQ ID NO: 203088 - DNA, 362 bp, Zea Mays
cgggtgcaataggaggtggggaggggtgccctgtgaccgtgagtgtgtggcggagcttcgcgcactggttaattggactgatgttcactaggaaaggggagaaaatggagctcaccggagtgacggggaagaacagcggcgctagcttgatttgctcagggagaagcggaggagttggctggagctggtgtggagaggacggggctcgggtggctccttttataggcgcctgggagagggagagggatggaggggacggcgagcgccaacgagctctccatgatggcgggaatggagctaacggtgattgggacggctcgggctggcgaggggtgaggggacggctcgggcacagtggcggg

SEQ ID NO: 203089 - DNA, 283 bp, Zea Mays
gtgaactgctcgtcggatctccagggccgcgtctcaccgtgggcaggaaatcccactgctccgatctcggtacgaaccagtcacctgctctcgccttcatctacacatcacgtggcgtgtattggactatagcttgaggccggggagttagtcttgttttacccggttgcccgaactccggcgaattgcgtcgccgcggttccgcgcagccgtggtcgaggatggggtcaacgcgcgcaccgtgcgatggggaatgggcggtcgatcggaacctggcatcctc

SEQ ID NO: 203090 - DNA, 280 bp, Zea Mays
cccggacccgcctcctatatgacctacgcttttcctcggtacccaagccatagccgagcacgccatcgcctagcctcgccgcacaccgagagaaagggagagttgtcgccgccgcgggtgaatcctggaggcaccctcgcccgggtcgggcgtatggccagtgcggctcgctttgggttctgggttgtatttgcggtgatggcatggggaggatggagacctgggcatcggcaatcccttgccggagtgggggaaccaccgcatgccgccttacgctgtg

SEQ ID NO: 203091 - DNA, 517 bp, Zea Mays
tcttgaagttactatcagctgcttcttgggttgtgattttgcctgtaacttatgcatacacttggaagaatccaactggtcttgcaagagcaattaaaagttggcttggtgatggtcagaatcagccatcattatacattttggcagttgtgatttatttggcaccaaacttgctgtccgctacactatttcttttccctgtaattaggagagctcttgagagatcaaatcttaaagtcgtaacattcataatgtggtggtcgcaggtatttcttgttttacctttttaagctgattttgttcttactacgctttaggtagtattgattaatctaaaacttatacagcctcgcttatttgttggaagaggaatgcatgagggcgcattctcccttttcaagtatgcttgcctatctcagttttttatttcttttagtttaccattgaatgcctttaatgagtgttgttggcttgttgcgcttgtaggtatacaatgttctgggtcttgcttttggcc

SEQ ID NO: 203092 - DNA, 416 bp, Zea Mays
tgatgcggacatgtagctctcaagtgacaagtaacacagtgaagcaagaaaatcctattgtagcggttaaggcaaggccagctgctggtactttggttgtttgcccaacaagtgttttgcgacagtgggcaggagaactgaagaacaaagttacaagtaaagctaatttatcttttctgatatatcatggtagcaatcgcaccaaggatcctaacgaacttaccaaatatgatgttgtgcttactacatattctatagtaagcatggaagtaccaaaacaatcaaatcctgatagtgatggagaagagaaagggaagcctgacccgtatggtgcacctgtgtcctcttcagggagcaaaaagagaaaggcatcctcttctaagaaaacaaaaaataaaagtgttgcagagagttgc

SEQ ID NO: 203093 - DNA, 423 bp, Zea Mays
cgacggccttctcctgttcgagaagggtggctgtctggagatgaggatgtgtgttggtagcctccttgttcgtagcttgagccatggtgagcatgtcgtcaatcttcttgcgaaaggccacaacctcctcgatgtggccacgctccacggcagtcgatgaggtacctgccatggtaaaggagatgtgtgcgttgttgcggcaacgcagcacaagggaggtggtggccctagattggcggcaaccagggaaggagcaaaagtgagattacactcgtgataccttgttagagaaggcattaccacttagaaattccttaaatctcatactagaggtggacattgacatctttagcatgacaggcatcatggttcttaaggcgtcgcctaggcgtccaggcgccaaaaaatctatggtgtcggttg

SEQ ID NO: 203094 - DNA, 349 bp, Zea Mays
caatttataggagctttaggcggcggctccgaatttgggagaagagtggagcttatcttcctggtgaggcaatcaccaaggctcaccgtggagcgcatgcgttcacctagcgactgccactatctcggggatgccacgatcacggcaatgtggtgaatcaagcgactacgtgtcccttgctgcaatcacgacgagcaccgatggcgatattttaccgaccacgcggccaagtgggtacggcggtgactcagcttcggctaagaccttcttccccgagatctttttaaccctcacggttatctactcttcatgggcacgaatcgtgacatcggcgtgaatcgcagtgcga

SEQ ID NO: 203095 - DNA, 410 bp, Zea Mays
ctgaacttcagacaagcagtgcaactgcaagcactttgggcatgaattaatgcatgatcgagcaagtatttgcctaggattgctataacaatattgtagctggatcttaggactataactttgttaaagggtgttgatcatattactgcacaaaattggaagttattggctctgtaaattcccctgtcagaagcactgatggagcattccatggtacagtaacccgagtggatcagaacgccagcgtagcttgctcgccgccggtgaccccccctgcgcaaagattcgcgccgccgccgttaggatttacgctcactggtaaccggataacgcttcggtagaaagatcttcgccgccgtcaagctggaagccaccccggtcagccgcggtactcctcccctggctcacca

SEQ ID NO: 203096 - DNA, 494 bp, Zea Mays
tttggagacaggttcttctactgttcagtgagtcactgacggtttacactaaggccctccaccttctaaactttcgcagagcaaaatccacgacgaggaatcagccctcgccgcactccagcgagcctattccggccagatgacgccacgactggagctctcaagcgacaggaacacaattagatccaccccgaccatttcccctccatcaatttcactaatggtgcactataatgtcctggccacggtggcagagcggatggacaagagggtggacatgttccgatcggacaacggcggggatggccaaattgaggctaggtaaaggcttacgggttcactagggtccatggacatgcttcggtttgggcagaacaagacccgaacaacggatcgacggtgggggggtcacggtggtgtttgacagcgcacaggtgcgttccggtgaggagcttcggccaaactctaaattgccacatctaagggcaatagga

SEQ ID NO: 203097 - DNA, 337 bp, Zea Mays
attggagtctactaagatgcatgcaatgcgttatctccttatacagttactgctacaagttcttctccatccggatgagtattgggaggctgcagttgatgtgactatatgttgcaagaaatcctttcctgtcattgctcaaggtgataactcgagtgcacaagaatccgctgaacacggttcacaggagtctgatgaggatggttttgaggaatctgacgaggatggttcagaggatcccaatgaggaagtttccctagagtttatggatgttcttgtccagactttcctctctattttgcctcatgcatctggacctgtgtgtttcacagttgaa

SEQ ID NO: 203098 - DNA, 388 bp, Zea Mays
taccagttcttttcaaaatatttgaagcatacttggtttgagcaagatgaataccatcttttaccttctgaacttcaataccaagaaaataatgtatctggccaagatctttcaaggcaaaatcagatctcagatcattgagcattgcatctatagcttcttgagaggaactagcaacaatgatgtcatctacataaacaagcataaaaatagtatcagatttggaagcctgaaaacccagtttcaccaacttttcactgagtcttgaataccaagcccttggtgcttgtttgagtccataaatggctttatcgagtttacaaacatgatttggtctcaacttatcttcaaatcccgacggttgtttcatgtaaacatcctcctctag

SEQ ID NO: 203099 - DNA, 409 bp, Zea Mays
caactccatatgcttgaagggtgcccgcaacaccatccatgcgcaccgcgctccaccctggtcgagttcccaaggcccgaacggcatcccaggcgaggttccacggcagcgggtatctcccctccgccgcgagctcaattgtggatgcaacacgcgctagatcccggattggatagccaaaaggggttcacggggttgggttatatatcccaggaaggtagagtccgcgagggaggcggcaacccgatcacgcgcggattccgggctggttgcaatgaactcgcggcgatggattcagctgctgctggtggagatggagctgacagcgtggtgcccggtttcagcgacacatgtttgcccatgaacgcgcggctccggctggagagtgggggcggcctggcagagacat

SEQ ID NO: 203100 - DNA, 375 bp, Zea Mays
tgctgatcccaatgggtgtggccttgatgatgctgaccccaatgggtgtactatccgtattattgatgaggatgaggaagaggaggaggaaatccccttaattcggaagaacagtcggcgctacatagccagcggggagagtagtggtgttccttctccagctttgtctgctctcgttggtctgcaggaattgtctctggcaaattttgatcagactcttgaagacatggtccctgaagatatgttgtccgagcccgcggatggtgaaatgatggaagtttgtgctgatgtgcctgatgccgggttagagttatcccgagcagcgtctcgtgcctcgtcgaccttggagcgcggtcttaagagtcgagaggctga

SEQ ID NO: 203101 - DNA, 456 bp, Zea Mays
ggagcctacttgcgttctagaactctctattggaatggcccaagaggaagtggcactccgacgagctctgtacgtcatggtggttggcaccagaccaaaggttcttggcgctgaggttgtggaggaagtggcacgttgtttcggcatagatgctgattctttggcaattcatcaagccatgcccgaggactttctgctattcctccctaacgaagacaccgccacaagggttttcaatgaaggcaaagttttcagagggcctcgtttcaacttgcagttcaagcggtggtcgcggtttacgcatgcaacggcgggggctctcccatttctggtcgacgttcagatttgggggatctcggctcatgcatgggcaagatcaacggcggagcacctcctgcatgattcttgtttggtttcagatatccatcctgccacagccttgaagtcagacctctc

SEQ ID NO: 203102 - DNA, 601 bp, Zea Mays
tgacccagagattgatgcaccctggtttaccaggggcacgttggataggttggtttgcgtcccattgttaggggttgtcatttgcaaatttgttctttgacaatatacgtggtgatttgaatccctctctttcgcaggtttgttcgatttgtcagtacaccagaggtcctggagcgggtcacaaccatagagtctgagatattgcagatcgaggatggcattgccgtccagggcagtgacagtcttgggttgagatctgtaagcagacatctatgcctgataacttttgactaacatactaatatcagaaagatgagatgttcatatttgtgctttgttaggtggaatactataatgggaaattggtggactgcatggaaggtgaaatgctgacgagcatttctttatttcaccacgagtcatagaacaaacagcatatgtgccatctgtggagtctttgttttatcacctaagtaatgagcaatgtttatttgttaccaaaaaagaactttccgtatcttcatggaccatgatacttggcaaattgctatgcaatatttactttagcatttaatcattataaagtttggtgtaaatgtaa

SEQ ID NO: 203103 - DNA, 601 bp, Zea Mays
aaactagtgtggcaatctggttctccaagaacaaacatttttcatcagaaggacttggaggataagatctctaatattgaccagctctgctctgtttggttacctgtggcacctgcgggttatgttgcaatgggttgtgttgcttcatctggaactgctgaaccacctttgtcttcagctttctgtttaactgcttctttggtttcatcatgtaatctaagggattgcattgcactgaggtcaaatatatattacctgaacctgtttctgtatttgatgtatggctatagatatttgatatttcacactcatgcattatgtcctttaactgaatttttcagggataacactaacatgatattctggcgagttgataatgcttttggttcctttttacctggagatcctgcaagcatgagtgtggatgggaatgcttatgatcttcgacatatgctgttcgacagtgcagactcatcttccaagactgtctctagaaggcaagatagtagaaatgatttctctcaactagagagatcagaattgacctcaggtcggctatttgatgctgtggcaagctttaaactaatttggtcaaatagtg

SEQ ID NO: 203104 - DNA, 532 bp, Zea Mays
tcaagtcaaaagttggtagcataaagtcagggtggcgttgcgtattcatgatatttactgcagcagctgatgatgaggatgaatcaattgttgagagtgcttttgaaaatgtagaacaaggtaaataaggaatttatacagccggcttgtaaagtgccttacacagcttatatcctacatatgttgaaattttatttgctgattttgtgaactaaatggtgtcttacagttatcttggaacattttgaccaagttgttggtgattgcttcatggattgcgtcaactgtcttattggttttgcaaataacaagtgcactcctcggattagtttgaaggctattgctctcctgcgtatatgtgaagatcgtttggcagaggttttgattatctgtaaccttcacctacatattcatgagagtagggccctttttgcgtgtctcaactctcatttatctctaccatacagggattcattccaggcggcgctattaaacctattgatgttgttccagaggccaattttgatgtgac

SEQ ID NO: 203105 - DNA, 321 bp, Zea Mays
gtggatcttgactcatcttggtgacctttcttgatccttgaagacttgagttggtgctcatccttacttgatgaagttgatcatcttcttcggtcttgtctcactgattaggagttagtgtatattattgggctagagaatatggttgagatagatatggatgagacagactacatgatataggtcaaaagtttgtttgttgttaggtggggataggcagattatgcaatccattaagactctattggttgggttggtctatcagtctttatttagtgtagggtggactaaattacaacatgtgaatagggtctaatccat

SEQ ID NO: 203106 - DNA, 2262 bp, Zea Mays
tgcttccctcattcataaactttatggaaataaattggtaggttatatccagcatatcttttaaatgaatttgactttgtaactttgtgattctgcatgcttacatagaagcgttttccagagaccatttcttgagcatgctgagcatcttacggaggatgtggtttctgtatttccggcagctgatgctttggagcaatacgtaatgtctgtgatggcctccgtcacgggagatgatggtttggatagcctatgcagacataaactagttccatatcaggtcagcttaaccttcattaagcagtattaaaacttagataactgcaaagcaacccatttatttaccctacattttttgccattttatcaatcaatgtgtggtgcacaacgaaagatagataatgtgttatgtatttaagtgcattgttggtgtagtgttgtttatcctaattctctgctttctttttcttagattgaaagtaaatctggtacattagttttacgctgggtaaatgggcaacttgagagaattgaaacttgggttaaaagggctgctgaccaagaggtaacacacatttgtgacttctttgtttttatataatttctttgccctaattgtcttattactagtacgaccattcaccatgggatttgaaatgaaacatccaagttctttatatactcaaagtatcttttagcttaattgctagtttgacctttagtttaacaaagtaaaaacatatgtgttagtttattgtattctgtctaagtattatgggccttggcctagcccatgtaactctatttttttaatatatgcaacactcagctcactctatggactagggttttcattcctcaacatggtatcagagccagcagcctctctccctcccatccctagtgccataatcacctcctagcatgtaggtcgccggcgcctcctccaccctcccctctcgcctctctcgtcgctgggcggctatcaccactaccgcaccccactcttctcctgtcgtcgcggccgacgcggggctgccatcctctttgtgcggcacagggtcgtcacccttcttgttgggcgtaggcgctaccgcgatcgccttctcgagaaccgccgcgaccgcctttctactccccactacaggcgttgccgtggtcgctgtcccaagcgcccctctgcccgcctccccctcgacggcttggggcctagccgtcccaggtccagctgaccttgcctgggcatcgccggccagggcccaggcgtggtggctctcggcctaggcttggccctgccctttctagctaccatctcgagtgtcctatttgggcccatggtgtccttcatatataaagagtagttatatgggccaatatggagttatggaccttaacatgggtcactatggtgggctaggttaggataacttagcttagttagttggagctttttgtggtcagggtgatagaagaattggagccgatcttctgagagataactcaaccaagctgtcaacaaccaagtaaattggtctataactccagattacattattgaaccatattaaagtctagaacatcaacgacttagagttcaaatgcatctaaatgacaaagagaatagggtattcataattttcagatttgaagcatttaccaaacatgtagatcatcatccaatccaattggaagccttctctttcatctccagctgatgttgcaatagatggcccagctgcaacaggtgcttcttcctccatatcctcattagaatcatattctcctccatgtgctgctggttcatcttcatctcctcattgccctcttcgacaatatctagatctacaactatagtattctttgcacgtttctgaaccctaatgggcctagaccaaattcttcgagaggctggccctagagcccatgacatcacacatcgggctagtcgatggccaccctagtcggacgactagtcgtgattcgtcaccgactaatcggacgactaggtttttagtcgacctcatcggggagacttatcaagtccataggaccgataaggttgactaatcgcgactagtcagatgacttgaaaacattggaccattgcttgcatttccttctcagttctttactggcttattttttctttgttacattagttaatacttttaaactacaattatcgttttctatgttcctaccttctctattctaatttttatgcttcgcaggtttgggaccctatatcccctcaacaacgcc

SEQ ID NO: 203107 - DNA, 312 bp, Zea Mays
gtttgcatcaagcacctagagcatggaatcagaaattggatgagaaattaggtgttctgggttttattaagtgcccttctgagcatgctatctattgccgtggagatggagctgaaaaactggtggtgggagtttatgttgatgatctaataatcactggttgtagcagcatcatcattcaaaatttcaagtcacaaatgtccgatgtgtttaaaatgagtgaccttggagtattgtcttactatctgggcatagaggtgaaacaggatgagctgggaattacaatttctcaagagaggtatgcaaacaaga

SEQ ID NO: 203108 - DNA, 577 bp, Zea Mays
ggagggcacgctcgttgcaggagcttgaacatgatggcctttgtgaagatcctcaagaaatttgacaaggtttctgctcctatctcttgctctcctttgatggtgccctatctcataagagcaacaatcctgatgacagaagctatatatttttccgtgtttcaggttacaggaaaggaagtgcagcaaatttacctcaaagcagtggagagctcctactacaacagctctgacaaggtattttgaaacaatattggagcaattctgatttcattcaacctcagctccaaaactcctgactgcgcgcggttttcatcttaacaggcagtcaggctaatggacgatgtggaggagctgttcttgagacatttcacagaaggtgacagacggaaagcaatggtgtatctgaagccaaatcagcgggaagagtcacactgtactacgtttttcattggtaataacttttgacaaggtttccattccttcatcaccataggtttttccgatctttaaacaggcatgtaaattttccaggagtatccactggcggcttcatagcattgttcataggttactg

SEQ ID NO: 203109 - DNA, 428 bp, Zea Mays
cctaaagaattgggtggtcttggtctttttgatttaaaactgtttggttgggcccttagagtcaggtggctttggttgcagaaatcagatccagggaggccgtgggctgcgtttccgcttcatttcacaaaggaagtggtgtgctttttcaattctgctgtgtacactgtaattggaaatggattaaacacgcttttttggactgataaatggctgcatgggcactgcatccaagagattgccccggctgtgtttgcctctattcctagaaaggttaccaaaagtagattggtgaaggatgccttgactaatttgaggtgggttcaagatgttcagggagctctttcctatgctttctgggtgcagtttttggatttggctgagattttggaaggaaccttgctgcagcccaatgtgcaagatcgtca

SEQ ID NO: 203110 - DNA, 540 bp, Zea Mays
ggtcgcgaagaggcacggtgatcgacgatgagcttgacggcgtccttggttcaattggatgtggatggggggtgctctatccacacgcgccggtgtgaaccgaagcacgacgaacatcaacagcgatgctccagcatcctttgggcttgggcaaaggctccaggacatcgacacgtgacgaaaaatatggtgtggggctcagctcagacggaggagtatggaggaggtgtggtcacacgagctatccgccgacatccatggcagcatgacatcagagtgggagaagacaaggagggcgtcggcgagtgaggaggcacaaggcgagagcaatggagtgggcgagggaaatggagcaggcacgatagtagcttgcccacacatggggacaaggaacaacacgcgtagggcttggccaccacgtgtctcggtgagcgacagttggctaacgtgatctaccaagctcgcaggcgtgaaaacgacaagaaaatgggttcctcaagcatcaatcaatgtagacaaattgttctccactctaccgac

SEQ ID NO: 203111 - DNA, 441 bp, Zea Mays
aggaggagcctcagcaccagcggcatcaccagcggatgccatccaaatggacgcgcagatctcgactcactgcggggtgccatacacagcttcactactcgccttcgatcccgtccagcgcctcctcgctgtcgcaactctgtgagccccattccaaacccgccttcacattagtacatcacaaccaaccctaaaccactgccacacaattcattcagttgtaaactagagctttgctaatttatgttctccacccctccaaatcagttcattgcgttataacaaaacaaagaaactactttgcataagcatggaaacaggttatttagttgttgtatgtctcaaagacctagttcttattgtgtaattgttgatagcttttctgcactacaaactgcagggatggtaggataaaaatatttggcggtgataacattgaag

SEQ ID NO: 203112 - DNA, 345 bp, Zea Mays
gtcataggcttgaatacaaactttctccctttcagatctagtgtgtactgatttgttcttccacaatgctgagaatatcggtcatattgccaaggtcttcccaacagcaagtgacacacaaacatgggtgcaacattgccctccactgtgtcaacaaactctccaatcttgtacggaactttcaccttataaccaatcttgatatctcctgattcattcaaccattggacatgatatggatgagggtgtcgctgcaacttcagatcaagcctttcaaccatctcacgacttgcaagattatggcaacttcctccatcaataatcacctttactactttgtcttgc

SEQ ID NO: 203113 - DNA, 313 bp, Zea Mays
tcctttttcagcttatgaggcggacacttctaccgcggatggaatacagggaggctaccacacatatccagctctggctccttggtgccctggtctctctgagtttgatgttgttgatttccttatttgtgagatcgaggacaccgtattggatggtatgtgtgctcgtcgtcatctgccatatgctcactacttgtgccacatttttgctcaactgattcggcctccatagttccagggcacacttgaggcctcacgccttgtttttggatcctaccgtccagcgcctgaggatcctgtgccagcttctgct

SEQ ID NO: 203114 - DNA, 576 bp, Zea Mays
ggagcgccaggcagcgattgttcgctttaatcaggataagacacgttttgttttcttgctgtctacacggtcatgtggacttggtattaatttggcaactgcagatactgttatcatatatgattcggatttcaacccacatgctgatatacaggcgatgaacagggcacacagaattggacaatcgaacagacttctggtttacaggcttgtagtacgtgctagtgttgaagagcgtatcttgcaattagccaagaagaaattgatgcttgatcaacttttcgttaacaaatcagaatcacagaaagaagtggaagatatcattcgctggggtacagaggaactctttggaaatagtgacagtgtggatggtaaagataacagtgaagtcccaggtcctgttgctgatgttgaatttaagcatagaagaaaaactggtggcctaggtgatgtttatgaggacaaatgtattggtggttctaccaaacttgtttgggatgaaaatgctattttgaagcttcttgatagatcaaaccttccatcatcaatggctgaaagcactgacggggatttgga

SEQ ID NO: 203115 - DNA, 394 bp, Zea Mays
ccggaggatggcgatcagactgatggttcggacgacatggatgaccagaggaatgatgagcctcggcgtttgggcagtcccttgccccagcgacggtctgttcaccttcgccttgggcctcccccgccgtctggacatggaaggacttcacatacatctaggggacatgaacagccactctttgacgcaccggagttacagcagatggcctcggataatgggatgatactccttaatgagttgtctgcagagaagccaaacagtctccatgatgaggcccctactgacagctggacatgcactattgggccgctgaactccacccagccgttttcgcctcagtccaaagtgactgggtcgctggaaatgacagggctgagttcgcccctcccgg

SEQ ID NO: 203116 - DNA, 413 bp, Zea Mays
atcctcgctccagcccgcgtaaccgactgctacaagctcggcctcaacctcgcggaggctataaactgggcagctgattctttcccctttctgccccttcgtaggtttcgaccgccatagccaaaaccgtgcgcagagagaggagtcgccatcgctcgggctgtattactgggggtccacggtaccacaggagaacacgggtgctgaccagtgatctggcgatgtgttcttgaggaccgccatagtcgtagaactcaaacccaggggggaggaggaatggtgtgtcggggccgctgggactgccgcaagggctccgcgcatgtgacgtctcgcggccggtgaagatcaaccgggagcctctaggtcgtgcgtcggacccctcagatccgtgcaattgatggtgggaggctgtg

SEQ ID NO: 203117 - DNA, 284 bp, Zea Mays
cgggaaccgtccgattcaaaatgggcggctcagattagaacccttcgcgcaatctagttggaccacagatccttgatcggacggcttagattcgtccataccccttcgggcttggcgttttgcttatgagaccctaggttcctttgaaatagaacccgccgtccattagtcactgtgcactgtgtctctggatttttaccccgagccccctgctgttctcagattttgaggcccagtccagtcaacacgaaaaccagagaaagtaaatagaaaatgaattttta

SEQ ID NO: 203118 - DNA, 484 bp, Zea Mays
ccccattagccctccaaaaccaaagccgcgcacggagccatggtcgccctaccattatcgcaaacacagagaaagaaaagagcaccgtcgccgttgtagccaatcccgctcatccaccgtcgcttcaacctcggcatggtgcatcgcccgtgggtacagcacccatccatggtctcgccgtgcttggatggcatgaagcgtgaccggaatttctcgtcagggcaaggaaatcaccgccgatgccgtggacagaggctttgtgccatggatagtcattgagaggacctcccagatgttcgtcgggccgagtagaagctttgggtaacaccaatttggcgggtattgcttcggggctaagctgattgctcatcgaaagcacaccgctgcctccgatcgacaccctagcgtggccagtaccttccctatcgtcaccattggtgagtttcccctccacatggtcaccaactcaccatcatccccactc

SEQ ID NO: 203119 - DNA, 307 bp, Zea Mays
ctctccaccgtcaagccgcagacctccatagatcagcccatcacaattccaatcactggtaagtcggctacttgcatgctcaccatgtcatcctcagtgcgtgtagcggcttcggtttgggctgggctatcgagttggctcggagccgagctccggcgggttcgccaccgccttgtttctggcaccgccaccgtttctggttgaaagggagaagaagtgcggtgtcgattgatcagctaataaatggtgatgggtctgatgtcgttgattttggttggacggctgggatcactcttggcatccggtt

SEQ ID NO: 203120 - DNA, 1053 bp, Zea Mays
aagcgatatgtgatatccgtgttgaggtatgtgctgattttattttaatgtaacggtgaaccaaaagaactttgacaaaatggacacttagccttttccatctgtatactcttgcctcatttcttgaagcctactacagtcataattgtttatatcaatttcaattgagtctcagcctcccagtgtcaccagttcagtttttcggaaagcttatttccatataatgggtaaatatcagtatgatcaatatccatacgcttgcattgtttcaaaattatttaacagtttagcctacagattagataaattcctccatgcttcatttattggaatttcaacaatatttgctggctagtgcctgtgttacaaacctgtgtttggagaggatgtcgctagaaaaagcgtctctatcagaataaattttacagcatgtgtattaagtgcgtttgacattagctgattggtatgtgtatggacatggacaaatttgtatttgacattagctgcaagttaattttggcaacataacttattatgaatttattttgcagcaagaggatattcggaacttcattgacagttctcttaagcatggacagaacttttctacctttcgtaaagatcggattggaggggattcccttggaatctcatactggtactagtttatttatcttgaatgtaaagaatttccattattttattttcatgcaaggccatgcaaaacaggtatgaagatgatgagattctcgggcatagattgtatcgtgaaattagacgagtagagcaggtcaagaaggagccaggaaagaggtctaggggaaaaggaggatcttcagctatttcagtcgtgtcctaccagtgggaaactgttgcgtccactttcgacgagtttgatgatgtggcagtaagttttgacttttgagttcctcatatctgctcccaaagagtgctatttgttttctgctcaaaatttgtgttactactactactacagtggaaatcttggacatgaccaatatagaggaacaatagtggaagtagaccttgttg

SEQ ID NO: 203121 - DNA, 402 bp, Zea Mays
tgacatcgttgctgattttgctgatggattaagtgggcagcatagtaatggttttgatgggctcgagatgcgctctggtactgggccgctggacctggatattcacgttccaccccagcacaatgccatgtgtgcggggttgctggagctgagtggagcaggttcgccccaggctagactggtttgggggactgtggacactactggaacagcatcgccccaaattcacaatgggtcgctggagctggcagtcagaacataccgtatcatgatgatagatatctaccaactaaattcctggatgaccattttcctgagatagatgctgcaaaacatcagtcttacttatgcgattttcaatcttcaagtaagcatattcctgttcacccctcacatggtcaa

SEQ ID NO: 203122 - DNA, 338 bp, Zea Mays
gcaggtctggtctccctcgtcgtgcaactcctcatgctcgcctcccttcgccatcgcgacctcgtcgttggtcgcccccacgcggtgctccggttgccatccgtcgcgtcaccaacggttgtcccaccagacatgtcgttgtcatgcgcctccgacgtgttcatcgttgtcccgacctcatacaaattcgtgacattgtcccaccgtggacccgatggcccctgcgttgttcccttcatggcggcacccatctcctaccctgtaccgctcgctcccatcccacttacttctttctatggggtctcaccatctttggtttcgcttcaggggcctcctac

SEQ ID NO: 203123 - DNA, 468 bp, Zea Mays
gagatgatgatcttgcgagtggatagatcaaggcactggtagcccttctgagaaggagggtagccgagaaaaacacacgccgcagagtgaggagacaatttgtggggggtcgtggcactgaggtttggatagcacaggcaaccaaaaactcgaaggagtgagtaatctggcattttgcgataaaggagatggtagggaataccgttatgtatggacgatgaaggccgccggtttgtgagaaacacgacagtggagagagcctcggcccaataaggaggaggcatggccgcatgaatcagaagcgtccgaacaacattgttcagagtgcgaagcatccgctcagctttgccgttttgggcggatgtgtaggggcacgaggtgcaaagaaggatgccgcgggcagccaggaaggcggcagtggcactgttaatgaactcagtcccattatcggtctgaaaacagcgcaca

SEQ ID NO: 203124 - DNA, 370 bp, Zea Mays
ccggacttcaactccacctggaggagacgtcggtgggcgaagacggtcccagacagagccaccagatgcccgggtgtgggccttgggcgctaccggaagccggacagggtctactgagaccaccggagagagtctgccccagacaggtcccttggacagccgccgatgaactggaaccttactggcagacctcccaacaggaacatggcagttgtacgaactatggcccagacccatgcagcggagacatcttgtcctcaaacgacaagacgcagcaaagtgatcttcagcgaagcagttgaagcaccggcccaacaagttccgaggaacagaggtgacggagagcgggagctgcaaacgacgcctccta

SEQ ID NO: 203125 - DNA, 281 bp, Zea Mays
gcgaactgaagcgatgatggaacacggagcacccggacctgtcccaaagcaaccttctcacgtacgaagtgaatgtcaatctcaatatgctttgtgcgacgatgatggacagggttggcagtcatatagatagcactgacgttgtcacagaagacgattgtcgccgaagagatgggtgcatgaagctcctggagcagctgacgaagccaacaagtctcagccacagcgtgcgcaacagcacgatactcagcctccgcactcaaacgagaaaccatagtctg

SEQ ID NO: 203126 - DNA, 438 bp, Zea Mays
acattgtgttaaccttgtctcatctatattcttataagaaaacatattgtattatcgttacagatgctgcaaggtggccctgcagtggataccatcatatatgacatggttctggaagcggcaatgagggctcaaaatttcaacagcaaaatgcttcatatcaatggtccatggatttggctgttggacgagttttctgattactatggaatatctgatgcatatagaaaattgaggtgaacaattgttttgcttgtgtatagtcaatgatgattggtgaatataattatacatgatagaatcacatcatatgttactttttacaggtacttgtcttacatcatgaacgtggcaataccaaccaaggattgtttggaacttatatatgaacttatcgttccagtcacaaaagcacgagaagatagaactttaacaaga

SEQ ID NO: 203127 - DNA, 478 bp, Zea Mays
aattgggccctgcactcctgccatgggaaagggaggaggaagatgatgaggcattcagcggtggcagggcggtgaggcgcagcaacacggagctggccgagaggtctattccagagcctgaactgcggaggcttagggacacggcgttgaggatgaaggagaggataaaggttgggccagggggtgttactcaagacatagtggagagcatccacaggaaatggaaggtggatgaggtggtcaagatgaggtttgaaggccctccaagcctgaacatgaagagaactcatgatttactagaggtgtataattttatggttcatttttatctgttgtttttcaatccaatgaaaaatggttagaatttgtgatcttgatcttgcttttgtcatgcaggacaggactgggggagttgttatatggaggtcagggagatcagttgtgttgtataggggaatgaattacaactttcaatgtg

SEQ ID NO: 203128 - DNA, 571 bp, Zea Mays
cgcgccggtacccgcaccgcgccttgggctgtgcgtgaacgtgatggcatggtggtcttcgaggggcgtctattcatctcgccgttctcgccgcttctacaagaaatcatcaccacgatccacgaagacggccacgagggtgtccaccgcacgctgcaccgtatccgacacgacttccacttgcctagcatgtgtcgcctggtctaggacttcgtccgctcgtgcgcgacatgccagcggtacaagtccgaacacttgcacctcgccggactactacaaccgctgccagtgccctccatcgtctaggccgacatcgccatggactttgtcgaagcgcttccccgcgtgcacgggaagacgaccatcctctccatcgtcgaccgcttcagcaagtctgcctccacgggattccacagtccatcgtctccgaccgggaccccgtcttcacgtcgacattttggagcgagctcatgcgcctctcaggcaccaagctcctcatgtcatcggcgttccacccgcagacggatggccagacggaggcggcaaacagggtcatcatcatgtacctcag

SEQ ID NO: 203129 - DNA, 390 bp, Zea Mays
cgcaaaggttgtcctcggcgtcgccaagaagaggcgtgcgatttcgtaagtataaagtgccatcggcattggatgctcagtgctttccactatggaagatatatctcaagcttttctcatcctatcattacccccctctagctctgccttgctgtaaatggtgatttgcatcatccttcaggtcgtcgcactcagttgcaaagtactgcgcaaagaagctgcccgcgaagtgtgcggtcctcgccgtgagcaatggcaagattgagttccggagagagtcgagcgtccatccaggtaaggtctcggcagaagttctcccgtgtggtgatgatgagatgtattgcgtagtgccgttccgagctcgtcaggctaaagggggcgcactttctt

SEQ ID NO: 203130 - DNA, 1646 bp, Zea Mays
ccaaaccctaaccctaggtccgcgcgccggtgaggtacgtgtcatcctccttcacacgccttttttaggcccaattcggcgccccagggtctcgcctgaggcgttgttggcctctgtgggcaatggttgtacgaggctggagcgtgccccactgactcggccactcctggcaggggaacctctggcttaggctggaggtgatgaccccgtgcttcatttttagtctcttcggtgtccatgggatgctccatctctcagctgcgggtaagtgcgtttgcacggtgatgaccacgtgcctaaatgtactgtatgtaacctccatacattcactgtaatgctgccctatgtcaaattggcaatggcctactgcaagcagcactccctttagcacgctcaggtgtactgccaaaacgcagccttttgaatgtgccttatattaccgttcatttatgctgtttttccgtgttgtttctttgggattttgctttcagtccttcgcgctggaaggatacatctgtttgctggtgccatcagaatgaactgccgctttcagtgacatgcatgcgatgcatgcttttgcttttcttcaatggtgaatgctgagccatgctcgatgggtggaattatggattacggtgttggtgtgggcaccaaatcttcaccacgcagtatggccattgagaaagctcaggaggagctcaggcaggagtctgatgttcgcgatgaatggaggagagaattggaatttctagagaaagtatgcccgcaccaggttatctcttagattatatttctgccttcactgtacctacttactcctatttattgcagggaggcaacccattggatttcaattttgcacatctggaaacggtcggtgtacactctgcttctctcacaaatcaagtagaagcacaaactgtgataaggtaatggttgcttccttgcatcgatcaaaaccataatgccactctggagtcatttgtttgccttcatttgcagtgacgcgaaaggtagtttttctgcatcacctcttggagattcggtcgagagtaccgacaaaccaggaggttccatgtgccgcgaaaccaacacagcagacaatcttatgcttttgggtggaggtaaaaatgacattgcagaagaaaaggttgtaaaaagaggaaccaaaagattaaatgcagcacaacccaaacattcattgcccagtgacggtcacaaaaacacaaaaaagcctgctgcttctggtttgtcacacctcggtgtcaaaagccaggcatatgttcggcgcaacaggtcaaagccaagtagggagagcgggaatgtcacatctattagatcttctatgatccctgctaaagtctatgagccaaatgatgaaaaggttacagcacagaaaaacaatgcagacgatcatggtgtattgtccgtttctagtataaaacagtctggacctaaccgtgacattgcaccaaagagtatagcttctgatgaccatgcagcaatggagctggatggcattcaaacaattctcgaaagtgaatgtgtggtgaacgacaaagtaaacaaagctggcaataataacaaagctaaacagttgtcatcaaatgacacaaatcatgatcgtttccttgttgggtgtggtg

SEQ ID NO: 203131 - DNA, 309 bp, Zea Mays
gtgtcgtccaccatcgttttggcatcttccccgacatggatccagcgcctccattccgatgtcttcctcaaatgctcagatccaccccctccaccgcctctagcctcacgtcgcgctttgacagctctcctcgcctctagccccacgtccagcaagccccagaggaagccctgaggcgtatggctatgcggcaccaggattgaaacaaggacacaaaggtaagaacatctattagtattgaatctgtaacactgtgttagatgacagactttgccaaggttggggaaagaataaggcagtacggggggc

SEQ ID NO: 203132 - DNA, 319 bp, Zea Mays
cttttggatgtctcaactacagttttgccactgaaaagtgttgctatggatcctacaaatttgttgcatctgaagactgtcccatctgagaatggactcaaactggttgaaaattcaagcgacaatctacaggatttggcttgtgaaagcccccttgctggaaaagtcaagttcatgtgcagctttggtgggaaaatcttgcctaggccaagtgatgggaagctcaggtatgtcggcggggagacacgcctcatctcgataaccaggaacttctcgtggaatgaactagtgcagaaaactctcacaatctacagtcagc

SEQ ID NO: 203133 - DNA, 501 bp, Zea Mays
gagagattcaaagatactgacaacaacactgccaactttatcaagaagattcgtggccttgctttcgacattgaagatgttatcgatgagtttatctacaagatggaggacaagcatggcagttttgctacaaagatgaatcgtcggattaatcgtatttggacatggcgacgtctcacgtccaaattgcaaaagatcaaactgaaactagagaatgttgataagagaaatgttcgatatgacatgagaggaattgctagagaagatggaagcagtgatgctcatcatagatctaccgaccagatttcttacttccccaaagaggaaaatcttgtgggcattgatgaaaacaaggagttattgatgaattggctaaggggtgatctacatcagcaaagtgtaattacaacagtatgggggatggggggagttggcaagaccactttggttgcacatgtttacaacactgtgaaggtagactttgacagtgctgcatggata

SEQ ID NO: 203134 - DNA, 377 bp, Zea Mays
agctaaccccacccacacgacatggtggagtacaaaactatcattagtcatcgttgctgaccatggttgtattatagaaagtagctctgacttcccgtgatagaccacataacgacctatcctactgtctccagcagcatacctatatctatatttaaacttcacttcacaaacagtacaatctacagtgcagaacatcgcttttggataaattataaatagcttcgacttataataatattggctgggcaaacgactagaagcacgagatcacttcagatcatctttgccgagcataagcacgccgagaagagcagcttcgactttctatctcgatcccatgccccagtcccaacggttgtcatggctatcgaatc

SEQ ID NO: 203135 - DNA, 423 bp, Zea Mays
tagatgtagttgtggttaggttgccatattggtggagctgcaagcacacaagaggcaccatggtgatgacgaagacacatcgaggcagtaatcgtggaaggggatggtggtgaggtagatgtagttaggaccgttttagacgaaaggcgatgatgcaatcgaggcaaacatagagggaacatgagggtcgatgatgaagtcgatgtaatcaagtcgcctgaactaaggcgtagtacgggtttgctaggcccaccaacatgtcggggatgaaagtatgtgctgatgttgccaatatcaattgtatgaggtagagggccccaaccatatatcagtgtatgaggggccaacaaaggtcttgatgaaggttgctgtgcgcggaacagtgcattagaaggtgttgatgcgtgaaagtgcctctagctg

SEQ ID NO: 203136 - DNA, 347 bp, Zea Mays
agtgaatagccaacacattacacaatcattgagggatgcaacaatattgtataagatgtgatcatataaaaataacattactctaacattttcatcattgcatagcataagatatgtgatagtactagctattacaataatgagcatcacagcataaaattgtttatggccctaagccatcatcacaagcatagacgaatactagagttattacagaccattgttcattacataaataaaagcccctggagctaccaagtcatcaatcattctccctctttttggcaacgagcaccaaaaacaggaggagagaaacaaccacatatcaccaaggaggggatggatcg

SEQ ID NO: 203137 - DNA, 421 bp, Zea Mays
tcctaaaatgcgaagtgaggagtagtccgggaggcgtttgtggaggagttggtgaggtatctggttttggatggaggaggaaggacgcctattcaggagaaaaatggcagtagcgagggcctcagcccagtaggatggtggcatgaacgcatggaggagcatggtgcggatggtgttgtttgttgtgcgaagcatgcgttcagctttgccattttgtggtgaggtgtagggacacgagaggcgcagcgagatgccacagctagcgaggtatgaggtggtggcagtgttaacaaactcagtcccattatcggcttgaaatgatttgggtgtggtggcaaactgtgtctgagcataagcgatgaaatcgactatgtggcggtgtacttcagatttgtgtcgcagcgggaaggaccaacagtaa

SEQ ID NO: 203138 - DNA, 1007 bp, Zea Mays
ctgcacggccgccgagatgaggttctacttcgacagcctgatgggcggcgacgacacggcggaggccaactacgtgaggcccaacgtcaactgcaaccggtcgtcgtggatcgacgggtgcgagcccggctgggcgtgcagcgccggggccgaccagaagatcaacctgcaggacaccaagaacatgccctacaggccgctcaagtgccagtcctgctgcccaggattcttctgcccgcatggcctcacctgcatgatccgtaagaaagccaacactcaattgcattgcattgcatcttcttcagctgaatgaatgaatgaatgcatatatgcagcttgccctctgggtgcctactgtccacggtccagcctgaatacctccacaggcatctgtgacccgtaagtccactccactccgctccagtcatatccgccgcccaagcaatgatataatgatatatgcatcgccattgcagctacaactaccagccgccgcccgggaaccctaaccacacctgcggagccgccgacatctgggccgatgtggtcacgacagatgacatcttctgccccgctggattctactgccccagcactatacagaagctcccttgtagtagtgggtaatcctgtctacctaatgtcgtttccctgcatatcttcttctttcttcttcatggtgatcgttcattcgtcttttggtttgcaggtattattgcaggaagggatcaacctcacagactagtaagcctgccctgcccagccttgttcattcacagtagtcactagctagtaaaaacctttctgaatactgcacgcgcaggatgctacaagaagagctcttgcccaccaaactctgctactcaggacatcacaatcttcggcgcgctgcttgtggtcgcgtcctgcttagtcctcctcatcatctacaacttctccggccaaatcctgaccaaccgcgagaagcggcaggccaagtcccgggaggccgccgcgaggcacgcgcg

SEQ ID NO: 203139 - DNA, 504 bp, Zea Mays
tgaatgcttcgtaaccaactcctgcgcatatagaagcgaagataagccaacgaagaatcacacacttacatgttagtcggagacggttccacaaatgtaggagtagcaatagtgatctgcttaaccatgtaaccataatcccatcgaatatataatgcgggttagggacccctataaaacgattggatcctcctataggcacagtgagagcatagttctcatctactatataacctcgaactcaagagcaattccatcttagcagcacataagacatagggtattacgcatctcagtagcccaaacctgtatatatcattgactcccaacatgctacgcacgaaccatcgagctatcgtcgacttcgtcgaccgcaaaatcattatgtagtatatctcatagtgtgttgctggtgctaaacaccgagaaaagcatttgcttccaaagactctaaactatgaaatatttgaactgttaccggttaggagctcatatggagtcttc

SEQ ID NO: 203140 - DNA, 435 bp, Zea Mays
tgttgttagttggttgcgtcttcgcgcatcagttctggttggagttgttaaggcttatgagcattcaggggttaactcctaaacctaatggcagctcctttgaggattggtagaaaatgggtagcatttttgtgttggagccgctcaggagaggcttcaattccgtggtcattttgggtgcttggactttatggcggcatagaaacaagtgtgtgtttcaaggtcagtcgcctagcatccgcatgacgcttttgttgctttagaggagggatatctttggacgttggctggggctaaaagcttgtcattcatccatgccctagagcttctagtttgagtaggggcgacctatgtgtgtcgttcgtggtgaggaggttggtgtgagtctaggtgtgttgtactagggtctcttgaccctcttttctctactccttt

SEQ ID NO: 203141 - DNA, 454 bp, Zea Mays
gtccagaaccgattaccatcgatcctagcatcacaaatacgtaatgtaggattttggaagcagatgtcctggagaagggcagaccctccgctggcagtgaaatctatgactggctcatttgtagatcgacgggcctccgccctgtgaagaaccaacccccggataatgggtgcgttggcagaagggagatcaacttcatcatctttgcctccgtcatcatcgctagttggctcccatgcttgtggatttgccgcaggtcgagaccaaccggagggattccgggccgttcgaccacgagcaccatgagaccctgaggcctcaccaccttgcatcacattgccggatcctcgcctgcgcttggatctggaccgcggaggagtttcttcatgaatttcttgagcgtcatcatcggagtcagattcaactaatgacggattcctacgacgcaccatcc

SEQ ID NO: 203142 - DNA, 305 bp, Zea Mays
ctggagggtgccctggagatgctcccggtgctcgaggtcctctgctgcgccgccgccggccgtgggggcgtggactggtacagagtcctccaggtgctgcctgtggatgacgccgccaggatcgaggcgcgctacaagagcatcgtggcccaggtggagccggccatgggggctctgcccggcgccgaattggccctcaagctcgtcgacgaggcttacgcggtgctgtctgatccagagaagcgagaggggtttgattcgagcaacgttttcacccggttcgttcggtccggtgtcgttgatgc

SEQ ID NO: 203143 - DNA, 363 bp, Zea Mays
aaagagtatgtgcgtgtgagagggagcagagtcaagaacagcaagcagcccagaacccaacatacatttaagagggggatccaaaaaaattgcagtctttacctgcaccacccctccctaccacaaatttccctctctgctggaactggaagcagccgtggcatccgccgtttcttgcgtgcttcctttcttggttctcctactagctgtcatcgctggtactgaaccagcggagaagagagaggtgaaccacggtgatccccgtgctggacaccatggccgtgtcctggtaggggataagcaacccaggaaagcagcaaccttccgctgtgcggatcacaggagggggactgcgtggggacc

SEQ ID NO: 203144 - DNA, 313 bp, Zea Mays
ccaggaaggtgcagcagcgaccatcgtcatcaggatctccaggaaagtgcagcagcggttgtccaccatcgggatccttgtggtcggggccctgccatggggatcagaccgcatgcgggtgcacagatcagagggctagcgtgcgaggacgatgcaggatgcaggttctgggagccaagatctgtgggagaggcagcgggctggtgatgggaggatgaggtggctagcgaggtcggtggcgatgggaggttaggtttttgggtgccgatgtgcatgtgagggtgtggaggcgttcggtgggggtcgggttgac

SEQ ID NO: 203145 - DNA, 502 bp, Zea Mays
gcatcatgattcacatctgatgtattaggcttttcagtctcagtaccatcctcaatgtttggtgcaaaatttggattgtgtatgtaatgggccataggaggtggaacaaatccatggaggaactgcatattgggtaaccatggtgtcccaattaagttagctggtggaaccccggtcaaatgcttttgtgaaaaagatgttggagccaacagtgggggatgcgctacagacatatgagaaggtatttgcattggcaattgaatctgtccattgaatccatgcaacttcacggattccattaaattaaccagaacttgttcgtcatggtgcatatccgacgattcagaaacagaagggagttcttcattcattacaaaaccattatcatcacgatagctgcttgaaacactatttgagtccgaagctgctgcactagggtgagataaacagttcaaggaagacactgattcatcctgtgaagacttagtgctgtggttgctag

SEQ ID NO: 203146 - DNA, 433 bp, Zea Mays
gggtaacctgtatggcagcacagcaaatcaaattttagaccaaagatgcagttctacttctgagatgtcagggcacagaccaactatttcatacaaaatgccccaatctacccaatgtgttaggaaaacagagtctccaaagagagagacatgcgaaacttctgctgctctgtcatctggctctgatattcaggtttctggtggcctgaaaacagtcatttctcaagagaataatatgagtagctcagatcttattagcccaaaaaaacccaatgaagtgcatgcccctactggtgcaattgttaaagctgtcaagaatatggatagccgcaggctcccagacatatctaatgagagatcacctccgcttcgtatggatgctgctgcagaaagtgatttgtttgacatgtttgattctgaagttcatcatttg

SEQ ID NO: 203147 - DNA, 316 bp, Zea Mays
ccagagtctcggtaagcttcccaagcccccgtaccaagcacgacctcatccggaagcgtcggatcaccctctctagaatccgctgcacgacggagcacgtggatcaggtaaacagttgcaccattgtcaaattccatgcacacacagcttccacgacatccagtgaacctccccgagccatccaatcgaactaaaccgccttgtgtaggccggactcctcgccgctgatgagctcttccgccgcagcgcgtggccagagcgactccgaccacctccaaccgccatccgaccatcgacgggtttgccaggaccacca

SEQ ID NO: 203148 - DNA, 323 bp, Zea Mays
aaaaaaaactctagatccaggtgaaaagagaggtagtcacatgagatcgattaggatgagcacaagaaagtttatgaagattcgagacaggatctatggaaagaaacatggccttgatagggtttgcgcaactagacaccaaacgatttttttgacacaacaagtgcacaaggagacttgggttgatctagcggtcaagctatgggcgtctataagttgtgcaggtgcaatttcaagtgtaaaacacacaagggctagaaacaccaaaacaagcacgtgatttgattttttaagggtttcactagggaaccactagattattt

SEQ ID NO: 203149 - DNA, 312 bp, Zea Mays
tccggctgcacccttaggcgacttttgcgcggagtgtcttttaaataaaagacttcgattaacgcacttgttgtgctattccggtgcacccttaggcgacttttgcgtggagtgtcttttaaataaaagacttcgattaacacacttgttgtgctattccggctgcacccttaggcgacttttgagcggagtgtcttttaaataaaagacttcgattaacgcacttgttgtgctattccggctgcacccttaggcgacttttgcgcggagtgtcttttaaataaaagacttcgattaacgcacttgttgtgc

SEQ ID NO: 203150 - DNA, 280 bp, Zea Mays
tctctgttccagctgatgtctcatcctggcttaaagagcgctctctcatgcaggctgtggcccgacaacacttgctccgcgcccaacaacgcatgaagaagcaggccgacaaatcacgctctgaacgccaattcgctgtgggcgacctcgtttatctcaagctccaaccatacattcaatcctcactgtccaaccgttcatctcagaagctgtccttcaagttcttcggaccatttaccatcacagaccgcatcggttctgttgcttacagattggcgct

SEQ ID NO: 203151 - DNA, 2435 bp, Zea Mays
tgcattttcaggagtagagagaaccaagggaggcactgcaacaaggtacggcgcctacttgctgctatctttgcacaccgttcttcttgacgatgcgtttgagactcgtcgttcttgagctcggtcgtattggttttcggtacagcgagttctaggatcgatccatcgggttaattgactcacgcgtttttcactagactagattgatgttcatacgttcctttcacttcattttccccgttaacatcacgaaacattacgtatatatgcaaggaattttcaaaccaaaattcagataggcgaccggttgcgctccttttctctttagttactatgctatgaagtgcagcaatatacccccttcattctatactactagttacctatatattatataggtaaaccttatttaaactatcatataattcatgctatcgctacgattctagagaggaaaggagagagatcgatgatgacggtggcacgagtgagggaagggagagggggtgggggcggtagggtcatgaggggaggctagggcggtaggatcgtgggatgagggaaagtgacgagggatgatctaaataatattgttgaatgtatttgagtaagagagatatagttatatagcaatctaaaccgttgattttcatgatgtgttaaatctgagtgcgatttgtttggtggatttagtggaggttatgggtgtgggggtgatttggttgggtacttgggtgggttttgtaaagtttaaataggtggattatatagtaatatagaataagatagtgttccaaatctttactatgatatgtactccatttaaactaatcgtgtagccgatctcaagcttctaccatataacttgcataaatatttcatatggcaaatgagaaaccataattctacccgcaccgtcttccatgagatggctcgaccggcaccaaaccctacacactgccacctcttcccatccccacactactaccaccatactaagtagccgaaagtcccgaacgacatgtgaggatagtggtattgaagtcctcgcgtccttgtgactttaggctctcgtgggcgtagcgggtgtcaggtggtggtgctaggaggggtgcccaccagctccgacgtctctcctctccttattcaatcaactacagtctcgaattaaacctaactaatctaaacttaccaaatcaaaaaccaatgtacctcaatcgatgacaaccctattatgctaattgtagccctgcctgcattggctatggtcttgcttgcatcattgtttgcctgtgcgggcatatcactagtgtacaggtatacatattcaagtggaccaccactggacttgtgtcgtcctggcccattgtccaccatggtcgtgccgacccggtccaatcactatgttatgattgggcgttaggtgtggcacggtccgattttattttttcccctattttactcttgtttgttcttacatttatgtaccgtttgtttttctgattgttttgtgaaaactaaaagtatataattgttacgatggattaggtttaaaaatgcatagtttatggatttagagtaacacgcatgctataaacacacgaagtcagttttttcgcatattaacaaatctatggatagagaaattaatccataatatagagtaaagacttatctagatttcgaattctttgcttacttgaaattcgggtagggtgtatagtatgtacttggttgtcatggtaacagctagtttccagattagatgattgtgttttttttttcaccttttgatctgatttgtcatacatcactatgcactatgcagtagactgtctcgtgggtaaacattagaataccgattttatttgtagttcagtattgatctctctacctaaaaaaatatttcttgttttttgaggaataaaaatatttaatcaaaactgtagaaaaagtgctacataatacaaaaataataccattaatgtatttttacaataaatagatgttaatattataattttggtcaaacttgagcttgtttgaccagcacgaatcctataattacattcttttgaataaggtggtaattccgggagacttcaaataaacttgtcagtaaaccttgtttgatagcagcaactctgtaatcagtaactttttaactcttctgtttcagaatatgtttgatagctacacttcgtagaggaagaagtatccgggaagaatggatgagaccggggatgctcctctgaggtcctgcatgttccttgtcggtgacgagaaagagcggcttataattgaagcaaccaataagatctcttttgaagatgcaaagcttgatgagatggccatcgcagaaaactacaacctttgcaaaattgttgcctcaaaggagaagatgatcaaagagctgaaagaatcaaaagcgcatt

SEQ ID NO: 203152 - DNA, 461 bp, Zea Mays
tcatggggacgacgagcaatctcatgacagatcttcgtaagggtgttgaaaggatgtttgattcaaatactgctgcaatagcactccaagagtatgacttcttcaagaggaagattggagacttctcgagtgatcttgcaaggagaatggccgttgaccgtgggacttctccttcgagttggtggtccatgtttggatcaaatacgccaacacttcaatgtgttgctaagcggctgctatcacagtgtgtctcgtcgagtgggtgtgagcgcaactggagtactttcgcattcatccacacaaagctccgcaacaaacttggctacttgaaattgcatgagcttgtgttcattaactacaaccttcatcttcgcatccaacgagcaactagtacaccagagcctagtgagtttgatcctgccttggccttcatggatctatcattacataggtataatgaa

SEQ ID NO: 203153 - DNA, 959 bp, Zea Mays
gttgtgacacgtcttgcacgtacaatgggcttcttaaattccttcaagtttcctatgtcttctagcataagatctaagcaatgtgcagcgcatgggctccaaaaaagtgaaggaaacctctccataagtatcctacctgctgccttgtagttagccccattatcagtgataacctgaaccactttttctttcccaatctcttcaattttcttccctaataaatcagctagcataaatgcatcatgaacttcacttgatgcatccacagactctaagaagtatgtcccctctggactattcacaaggaagttgatcaaatgtctgcccctcctatcagaccatccatctgacataagcgtgcaaccataatgcttccatgccctctcgtgttcctccctcatagtacttgtcaatttcacagcatccttaagcaatggctgcccaagttgatatggagatggaggcttatagcctgaaccaaactgggcagttgcctcaactgcaacctgaaattgtcttgctgctgctgcattaaatggcacaccgcattcataaaaccacaaagcccattgcatatcaacataattcttctcctctttggacttcatcttggatgcaattgtgggttgagaacaccctttacgcctttcatcaactacatcttcaggtgatttccgaagcatctccacaattgacttttgtttgcttgcttgatttgccttggtcttgattgatgttgtatccttgtacagataggttgcacgcctgtgtttggctgcagtccctgaacttggttgtaccttagagccttgggattctataggttcatcttgttgaacttgaacagattcagctgctgcatccaccaccattacatcctcttcctcctcttgctgctcattatcatctaggaaaatagctcttttccttcttttggattccaagtaatccctcatctc

SEQ ID NO: 203154 - DNA, 296 bp, Zea Mays
cagaaatacattgttcggaccagctaccacaacaaccaagcacccacacaccgacctgattcaggtcaaggacaactaccaggcatagtccaaattcattacatcaagcaggaaagacagtaaccaaaaggagccaaaaaacatcatcagactgcgacgcagcgcataaaccaaacagaagtctagacgaagctgacaatagcaagaaggacccaagtcacacatcagccaaacagcacccagaagccgacaattactccaaatccatcttctggtcgttatcatcagcaggccct

SEQ ID NO: 203155 - DNA, 295 bp, Zea Mays
gatgcgtgcgcggatgtttccgcgcgattggatcgattttttcaagtgaggaaagattgggagttgatatagggattagggagttgttggaggcagtttttttcaatcttgctaaaaaatctagattgacagtggattttggaagctcttggagatgctcttagctacagaaccagtgaagtagaaagcatcagtagcactttcttgacttcaaataacagcaatcacataaaataatagaacagtggaacaatattaatgagttgtttttggcatcttgtgttgttatgatttg

SEQ ID NO: 203156 - DNA, 343 bp, Zea Mays
ttccgtatatcttttcttatgctgaaagactgcagagtcagatctgatatgtgtgtgatttctatagatgtctgagaacaggcgtagaggtgcgaggcgtgctcagccgaaacaacaggcacctcaggaggatgcagcccagcagcagcagttgccaccgccacccccgatgatagttgagtagatgttcatgatgcaaactcaggtacttcaggcaattggtcagaccttagcagcgatgcagcaggtgcagcagcagccacccccacctcagcctccagtgcaagttcagatgccacaagtgcccagagacaagcggatagagttcatgaggggccatccc

SEQ ID NO: 203157 - DNA, 476 bp, Zea Mays
cggaaacagcagggagcagcttgctgactggagaatgaggcttaatgaaatttttgagctatgaaacatggaaaactgggtgaatcatagcagtctccggcagcctgagtctgtatgccacaacacccactctctgcaaaatttcaaaaggcccaaagtacttatatgccaatttgtgattagctctggtagccactgaggtctgaacataaggttgtatcttcaaataaaccatatctcccacatgaaatacgcgatctgacctctttttatcagcctgtgactttatgcgttgctgggcacgcaacaaattgtgttggacaacacgtagcacgagctcacgttgagagagccacttgtccaaattagcatgggactctatatcatcgacagttaacccaaaatgcctgggagctcggccatacaatacttcaaatggagaccgtcccaaggacgaatgagcactagtattgtac

SEQ ID NO: 203158 - DNA, 274 bp, Zea Mays
gctgtgggtgcgctcccctgtccaaacaccagcaaacctttaccctttgcctcactgtagactggtcttatgtggacataggagtcgaggccgcgtgctagctcatgcaaacctcagctgaaacacatcggcgcccagataagtgcaagtccggccgagtgctctttgttttactgtaactgtgaccaccagtgccgtaaaccatctctccctgtttgtgtttcttatctaaaaccgagcagagttccactgtctataccccacgctcctaaac

SEQ ID NO: 203159 - DNA, 308 bp, Zea Mays
atcatcccaatttctctttatgtgtccattgaggtattttgttcaacttgttatttatttagaatggcctaacctgtgataggactatcagagcttatgtttcctttggctgccagatgatcaaattcatacagtgcacaaaattcattaataacgatcttcatatgtaccatgctgagagtaacacccctgctttggcgcggacttctaatcttaatgaggaacttgggcaggtaatctcttccttttgccccttgtcctgttttcaatttgaagttaactcctatttggtcactcaactgggagta

SEQ ID NO: 203160 - DNA, 400 bp, Zea Mays
tcgcgggcggtagttgtgtcgtctctatccttggtgggtgtcgctgctttttgggcatcgagcaggtggcgttccatggcgcgaacagcgtcttgttccttctctagggcaagagcaatggcatgtgcacgctgccgagcggcctccaaatcaaggcgtgccttctccacggtggcgcgagcaggcgcctgttcttgctcttgtttcttggtggtagcagttgctttctattcgtctgtcaagttggagtggcactcgctgatgttgtccatcatgggaaaaaggaggggctgctaggggagagagggggtgtagcgcaccctaggataggatcagagggcggaagtgaattggatctagtctcgtgataccatgttaaagagatgtggcactgaagtca

SEQ ID NO: 203161 - DNA, 317 bp, Zea Mays
agtaataaaataaaacaattaaatgtagtcaaacgccaatttcttcctcctcctgccttatcgtcttcctccttcctgccttgtcttcgtcctcgctcaacgccaatctctctcctcttaccattacccatttctcaaatttccaactgaaatacgcccgccccttttcctgcgcgctccgattccaaaccctcggagctctcaagacaagagattcaacagagccggagcggtagcacctctttcctgtttgcctgtaaccttcctgctacagtacgccgcagcgattagcggcccgaacccaaatccgcaacggc

SEQ ID NO: 203162 - DNA, 1528 bp, Zea Mays
caggcacatggtgatcgctatttgcgtgatttaactcaatatgcaattggagttcttcacatcataacacttatgccacaaccacatgtccgcaaatcaatagtgcagggaacattaagcaacaatcgtgctggtatggctgtcttattagacacggtgaaaagttttgactacattgatcatgaggtacggtctcactttgaaaatatgaatgaattaaataacctttgcaattctctgatggtttctgaagtgttatttcaaatatcagctcttattgttactcagtgaacttcacaaatctgcttacacttttgagctacaaacctacatcattctgtgcccatttcacaaacccaccaggccaccattacttgggctacattctcacaatagtaaaacttcgtgatagttttcatttcatggtcagctgggcccacttgtaagcggcatgctcttggccagatgagcccatgtcaaatttgatgagctgtggctgatgtgggcccaattggtcatgaatggtcacaagtttgtagttttgtgagaagactgctcaagtattggcagttttgcacaaaatatggtgtgtctgactattaacccaagatattggtgaggttgtgaaaaatctgctttcactgtttttgtgaatcaggtgatctgtccagcactgaatgtcctcgtcaatcttgtatgcccgcctccttctatcagcaacaaaccattgtcaactgccaatcagcaacctgcagccgcgcaagcacttgcttcagaaagcagagataggaacttcgaaaaaagtatttcagataggaatctactagcaaatcagggtgaatatcgtgaaagatctggtgatggcaaccctgctgaaaggaacaataccttgcatcaaggaactcctaacacacctgttgtgacatctggagtagtcggtgatcgaagaataacattaggtgttggaggtggtggtcctggtcttgctgctcaattggagcaaggataccgtcaagctcgagaagttgtaagagccaataatggcataaaaattcttttacagcttctcggttctcggatggttacacatcctgtggctatagattctattcgagcgcttgcctgccgtgtcctgcttggcctggctagagatgatacaattgcacatatactgaccaagctccaggtattgcatactacagaacataacttatctcatatccagtgttacaaactacagtcatagtggtaacttataattattgttaactatgattccactgcaagctgagtactccctctgttttttatagggcctattaacatttgaaaaggtcatctttatcagtttttctaccacttttatatgtccttgtgcctttttaatatagcacaagatgattagttttgtcaaataattctctgatgcgcaccttgaagatatttatccactcattgtttcaggtggggaagaaattatcagaactgatccgtgataccagtgcccagacatctgcgggcgatagtg

SEQ ID NO: 203163 - DNA, 273 bp, Zea Mays
ccgggactaaggtgctacaggcacaaggttacaaaataaccgacacccgtagcagtagtatttttcatttatttttagggccagaccggcacacctttatacatatgaaattacaattcagccctccctattacatagcatcccttcacgattgaggggatacaattccgtcattttacacccttgacgtgtagtgtatgacttttcttctcttggagatcaccttcggctcccttcactggcaaaccatatcggaggcaccaaaacttgttt

SEQ ID NO: 203164 - DNA, 408 bp, Zea Mays
ctcaaaaaggacaataagtttgtgtggactcccaaatgtgaggaaagtttccaaatcatcaaggagaagcttacaaccgcaccagttttgactctgccagatatacaccaggattttgtcatcttctgtgatgcttccaagcaaggcatagggtgtgtcttgatgcacaatgagaaagtcattgcttatgcatctcgcttactcaagccgcacgagcagaactaccctacccacgatctggaattggcagccatagtgcacgccctaaaaatatggaggcattatctgatcgggaacaaatgccacatcttcactgatcacaagagtctgaagtacatcttcacgcaaccgaacctcaacctccgtcaaagaagatggcttgaattgatcaaggattatgacctcgaa

SEQ ID NO: 203165 - DNA, 888 bp, Zea Mays
cagaaatgctttgttcgtttacaaacaaaacccttggagttacatcaacaatcatgtacactttaatattggaaggtagttagtattttttagctcctgtccaggttttatcttgtgtctgtctttatgctgtacttgactctgggtgtactgataggtggtatggagttctcgggatacttgacgtagccatcaagcacttgcttgaggtcattgcttgtagccatcagtcgctgactacacaaaacatgttcctcaatgattttttccattatgttcaggttaatgaccaactataacacgtcagcttaataccttattgaacctaacttttggtgcatttctaattttgtgatatgttttgtgtgtatagagcatggggaagaaatttgatgtgtacaagctccaacttcctgtttttaacatgtcatctctcaaagttctacatgaggatcatcgcacttatgcatcacatgcagatgtaaggcctaacaactgtaccaggactttttctaattcatctatcattgcatttctgcgagcaatcaaacattgaacctccctatattattatagaatgttgtcttttgggtacttgagctacccttcctgtacccccttaaagaaaaaggcataatatatggctaattccacatctatttgataatgaaatgaaacactattactgtcttttacctgatctcttttcctgcagctaatttgttattatgctattgatgcccttgtcagcatgtgtcggttgtcttatgttacaggttggcgttagtgaaagcacgtggcaggagctggaggaagaattgatcccatcatcatcaattgtcaaaactaattggctggatactcagccaatgagaaaatacaaggact

SEQ ID NO: 203166 - DNA, 354 bp, Zea Mays
gggagatggagccggagatccaggacttgacaacgcagtccatgcgtgcccagtcggggaaggcgcgggagtgtcgtcgaggatgtggctgtccagggagtatttgccagtgacgagaaggaactcatcgcgccagcgggtgtagttgttgttggcgaggtcgaggacgacgtgaacgagactccggatgttttgcacatcgacgacctggagtggaggttgacgatcgcagtagcctcgtgaaggaggatggcgtcgtggaggcccttgtcagcaccacccgctggatcagagaggtgggactgattatcgtcgacagggctgctatcggcggcagtctgagcagcgagggcg

SEQ ID NO: 203167 - DNA, 1142 bp, Zea Mays
gaagggatcttataaccgctctgtacattctgttgcgagtaatatactaatcattttcgttccaattgtggaataactttgcttgaacgatgattttgatatgttttccatgtcttttgtagtctgttgcacttgaccaaggtcttgatgccgatctgatgtctgaaatcgaggatcaaatccaacctttattcaatgatggtctccgacaacggataattactcttgtaaaggttggacctgatgaaacttgaatacaccatttgtatgccttttcatttttttggttcaacgaatttaattgggcattttttttttaaaaatcatggtgatgttaaggccacatcctgtaaactcagcactcaaagagcggttctaagctaaccttttgggctcaagtttgaactttaaacgcttaacaacatgtagagtagtgtacatgggcaggggtcgaccttttgcactaaattaggtgggcttaagttgcttttgtgttggcttctccctggtctcctgttccatcattttctttgcagttatatctgaagctagttaattccagctatttagtatggcttaaaaaccattttaaaaatgcaccttcaaaggtttagtcctttttctttgtgagtaatgatgactgaggtatatttaactttccataaaggagctgaacagggaagaaccagctggaattggcagtccaagctctgagcgttatgtgcttgatttcagaggggctcttgtggaaagaagggcaattgtctcgagagagagattaagtttgagccactgccttgccctttctgcacttattaaactaacgagtaagttaaaccttgtgttaaattgcctctatcaaattggcctttttttcctagcgcttgccaggtaatgttaattgttcagtggcatgagccttcatactgtgcttgtttaaccttttggacattccaatttatgggaagcaagcactaatgctttattcaatttcatttaggccccaaagaggttaaggatgtattttcaatattgaaagactgtgcagctgaagcaaatcaaaatagcagtgtggagctccaggtttgaagtttgaacaaattactctggaatgacatgatggttgttgacatgttgtttgt

SEQ ID NO: 203168 - DNA, 317 bp, Zea Mays
tgaaattccaaaccttcaaacttgtcttctagctttaggacggcagtgcagtatttccccatggaatcattcgagcaatcccattctttgtttatctgacttatgaccaccagagaatccccatataccatcagtctcttgatgcccagtgatatggcaatgttcagtccatgaatcaaagcttcgtattctgctgcattgttggacgctgggaataacaattgaagagcatatttgagttgttcacctccaggtgcgatgaagaggatccctacacctgccccctgcagcttcaacgagccatcgatatacattcg

SEQ ID NO: 203169 - DNA, 1433 bp, Zea Mays
gctctgttcacgaggggagaaacacaggtaaggtaatacacctcatttgagagtatgttgtatctgtcatctctgattgtcatagtatggcatgtctcgtggttttatttgtcacatatgctgctgttggtgtcttgctgatctgttcgatacctgatgatgtttacagaaatttgcgtgtgtgttctatttatatccatcccacttttatttgtaagaatcctactttattacatcaaacattaactgttgcaaaacttaatttggtgtgttttattgtggagttcatttctaaataatacataacgcaaccattaactgtactttagagcattatactttctgctggtttatttatagtctgtttcagctagagtcaaatgcatattaggtttgatatcttatatatttttttcacttattccttttgttcgaccatacagtcactggctgtggtcactttaggtggctatcagatggcacaacgaattgacaaccttgttgatacggaggactcaaaaagcttctatcttcaggtaaatggaacacctttgctgactgaatgatacttcaccttgctaggtcaattcctagtttcctacttactatgtttcttgtgcagcattcttgtttagattgttttattcattgggaatattaccctttttaaggggggaaatctttagatccatatttctgataaaaatatgtgaaaaatagaatgagtttacgtttaaaagaaagaatgggtagcatgtattgcctccttgaaagatttgttatgtaaattgtaaagggagacatgtggtatgtacagctgacaagattatatcctgctttattgctgtgacgattttaaatggtggcaaatggcattgaatctgagctaattcattgtagattgcaagtaaaaatgagttgtcaagatgccatcttatattaaaatgtcttgggtttgtgtggatgttatgttttgtattttagctgtgtcattgagattttttttatcagggtttacatgagtatctagccaagctctgttctgtcctctgaggatcactttgtgatgttctttttgaaggctgtatgcttactattttcactgctaacctgtgaaatggtccaaaatagtttttcattctagtttggagttttgttatcaacacagttagactattagattatcctgcattgttaactaatttctgtgacattctgcagtactcatttcctccatcatgtgttggcgaagttggtcgaattggagcacctagccggagagagattggacatgggatgcttgcagaaagggcactggagccaattttacctctggaagaggattttccgtacactattcgtgttgagagtactatcactgaaagtaatggttcatccaggtaatactattcttgtgcttatcattcgttttt

SEQ ID NO: 203170 - DNA, 276 bp, Zea Mays
cttggttcgggtgagacaatgcctacagggcgcagtttcgtacctagactccttatgcggttagatgttgagcaagacggataccaaatgttgatttgtcctattcttggtccttaagggtaaggtgtcagtcgaggtggaggcatgaagtggaatctgtccgcaagagtcgggagtcaaacaaggcatgttactctatatttatgttgcacctatattacttatcttcgacagtaccttacaacctaagtcatggcaacaacacgtctattaggc

SEQ ID NO: 203171 - DNA, 281 bp, Zea Mays
ccggagcaccagagcactagtgcgtcgacgactcggcgtcgtcgccttcgaggtgggtgtactgagagggaggacaagaggagtagaatagagggccacatgttaacagaggagctagagcgacggccaatagatggcagagcaccagtgcgacggaaggactgaggatggacgtaaagagcaccagaagcttcgcgagacgccgagagcggagagaccgagaagagaggcgtgcgaaaaaggagcgagcagctctatgcgttcggttttaggtttagtgg

SEQ ID NO: 203172 - DNA, 481 bp, Zea Mays
aaaggatcaagacgcttcaggtggtatcagagccataggactggccgtagatcgtagccccgaccttaaaagtttgccttaacaagaaaacacctcttacccctaagaaaaatcttctctcccttcccccgatattaacagacccttcttttcttctaccagatggaaggctctttagtcattaggacatactactgctcagaggaggaaggattccctcatctcttgcagagttgcgcggttcgcatggggatccgcaagaagccggagtatgtctggaaagaataccgcgagaacggaattgagaagtgctctatggcagtctacctgggagaaagccaaagttacccaaaccaccctcctttccaagtcaccttcaccggacatcacttcccagacacttgccaaaatgttgctcgaaaagccctccgacagctatgccaaaactacaacagagaggtttttgaaaccccccttcgtt

SEQ ID NO: 203173 - DNA, 668 bp, Zea Mays
tatcatggtcaaatgggcagcagagctagagaggaatcccataggtttttcatctattcactgtgtgctctattttgggcgtctgttcgctatgttgtttttcttgtacatccattttccttgtgcaatgtaaatccttgactgtattgttttgagttttgaccactgctcaaatgatattctaaaccatttgtcagtatctcctctggaaatgattttgttgaagtatttttattgacctgttactgttagatatgcttcaccttgccattatgtgaaatgaatatcacgtggttcgtaagtgccatgatttggtttagtctcagcattctctataaaatatttactagattgtctttgttctgttagattcacattggccatgcaatcagttaattagaaaagtaaaacctttacaaatacgtaggtcacagggcataacaatgatcagttgtttgatttatgcatccagtttgtacaaattatggtggcagctttataattgaccattggttgttttgctcccgcagatccttcattagggatgaagttcttgtaatggtggcaactatagcttttgggatgggtattgataagcctgatgttagatgtgtaatacactatggatgtccaaagagcctagagtcttactaccaggaaagtgggcg

SEQ ID NO: 203174 - DNA, 444 bp, Zea Mays
cgtcgggggtcttgcgagccgctgcactgacgctaggaggggcctggcgctgtgggtgtgcgccgtcaacgatttcgggcataggtgtcggagttggaacgagcgtcgaacaccttgtgggcatggtgctagtgatgttgctggagcagagcatcagcaacttatcggtgtagtggccgttgagcgcctggtcgggtgtggtgcaggaggcggaggcgtagaggtggtcagcgtaggaggcgcatcgcgccttgcccactgtgtgcgcgccgggcagcacgtcgaggatggtggtggcatccagcttgatctcgtcgtagccatcgagttcggtggtcacgaatctcgtggggccgtctggcgaatcgaggtcctcgccaccgaagaatccgccccagttatcggcgatgacgaatggcgccgcgcagtactgctcatcgtcgt

SEQ ID NO: 203175 - DNA, 344 bp, Zea Mays
agatggactgctgactgctgagcgccgccgccctcatctgcttgttggagctggactgctgactgctgcgcgccgccgccctcatctctgcttcgacctgtgacctgtccctgctccagcatccagggcgcggcaacctctgctctaggcttccttctgctctgttcagagttcagaccatcctccactccctcctgctctgttgttcttttgctggaacagagatgagcacttatggtaatcccttctctagtcttttgttcttttgctggaaacggagatgagcacttcttgagttgctctttgcttgctgcagatgaggatgggaggcaacgtaataatgt

SEQ ID NO: 203176 - DNA, 480 bp, Zea Mays
catgcagccatgccatgggggcccgcatgttagcgtcttagttggctactgtctgtgcccgagtagtggatggagcacgacaggagcctgacatgtggggtcctctggccacgccggcaggaattggagcaggggcatacacgcggtgacgtgggtgtgggtggtgggtctcctctcctgatatggggtctggaaggcgttatccgactgcggtttctacatttttatgctgcaacagctacagcctacaggacaggacttgggggagtctgccgtgcgttccttctcatgcttgtgtagtctgtactctgtagtagtagcaagtggaatgtggaagagacgatacttgtactaccagggcagattctcgcactttgcttaacgcgaaacccatcattagttgacctccctgtcgccgtcatgaccagcagacgggaaatctcaccctttttttttcttggtttggatctctctttgtgc

SEQ ID NO: 203177 - DNA, 568 bp, Zea Mays
gatttataaacgattaaacaagcttcttgggataaagaatcatatggaggctggattttcatggagtctggttcactgttttgctaatgatcaggccatgcccaataaaaataaagaaaagttggcacagtgcaactccaagacagcccttgctttcacagttctggatgagtgctttcagccacacattgacgatagaagtggaattaatatgattcacaatgttgcatataattgtgggtaagtatgccttccatctcttgattcattgtggttataattccatagaagatcaagataaatggttttcctgaattagctgcaattgcaacagaccaataaatcttggatctaggaattttgtttccttacccttcacttttcttttaagtttacaagagcatgtctaggaatttggaagtacctagggagttagctgtaacatctctagagctgttatttctgtctttgtattctttggattccacttgattgttcatcacgcaagttttcttgatttttttaaatctcaatattgcagttctgatttcagtcgtttagacttcag

SEQ ID NO: 203178 - DNA, 610 bp, Zea Mays
caccggtcagctccatcctccctacgtaactgcagcgcccacatcgctctctcccctcggcgaactgctctgcccgcgctgatcgctcttaagaagttagccgcgagacctacagcacaatccccttctccactcgcgcttgtacagccacagggtgccatgcatctccctcgcctctgtgccgccgtagttcgtcgcaccctcgttgttgtcgccgggtagtcgccgcgcacagagcctcgccagtaccctcgatcatgacgtcctgtcgccaaggtacttgctatgcttccctctctctcttgtctctcttctttggcgtagttggccacgaaggcctcatgcgcgtgtcccccgtgcgtcttccccctcgactctccctgcacgagttgcagcgttgctatcggtgaagcacgcagtgccagccagtctatccctgccaccatctgtccccacggccttgggctggtgtcccagcccggcgcgcgtgattccttcccctggccgaatcagtagccggtgaaacccctccgttgtcgcggcagcagcaccgcccctacgttgcagccccatcgtgccccttcttggcctcgtgctcggccccggcaag

SEQ ID NO: 203179 - DNA, 290 bp, Zea Mays
cgctgctgcagggtctccgctagccggcccagccgccgttgtagggtctccgccagccgacacagtcgccgctgcaaggtctccaccaaagacggcttatggcaccggttgttccttagcccccgtcctcgcatcttctgcccgggtcaccaagctttctaggccaccaaagtccttgacttcttccttgttcagcatctatagaaacagcaaaaacgttactaaaaaaccctgctccagcgctcggtcggccctctccgggatagtgtcacggccgtgagggccccaca

SEQ ID NO: 203180 - DNA, 394 bp, Zea Mays
gacaaagtatctcgctaccttgtggaaggtcccggtaagcaaatgctaaaaactcctcaacaccatttttgtatgcagtgtccaatcttgattctttcatccaacttcgatccatcaatctttatattatgacctattaaagttgaataaaacccgtaagtatttatccaaaccagtttaatttatctgtccaaatccctactagcaatctgtcaacaactccaatcgaaacacaaatttaccagagggacagagaaggcagtcagcatcacctcagcggtcactggtcagtcggttagccgctcagagccttggacagtcggacctcagcaagcgacgctcgggcatccgcaagcctcagctgctagtgggcctaaaccgtgacaacacctaa

SEQ ID NO: 203181 - DNA, 954 bp, Zea Mays
gtgggaggaaggtggcaacagaacaccggcttcgcctgccagggtcgtgcaatatgaaggtgtgcatggtgcatctctcttggtactgaatagcatgatttgatcttctggtcccatatccatcattttcaagatgtgcttgcattggaagggaatgtttagactttagattagtacatgtgctagcatgcagttggtaactgcttgattgttgtctgtagtagtaccagatcctatctggactatatgataccgataatagaaactacctatttacacggggggtgtaagttacaaattttcacatctttgtttccatctaattctactttgctaacatcaagaagtttgttgcgtagccggatatggaacacaactgtccaagcgtgtcataaataagtatccccttgtttctatacttgctatgtgttacttagagcatatcgaacaatctatgtatagatgtttatcaaacaatctatgtataaatgtttatatcctttcagtgtcacctccagtagtcaaattgtgcaagctcaaggatacatttccctttcattttaatagtgatgataaactactgaaatgttaaaacacaactaaagtatgaccatgagggagctcctataaacattttgctatagtgcttatggagaatgtggacacatttcactagatcatcggttcaacttgtatgacaatgttgtagctattgtctttctgccctctccagatgtgtttatttatattgctttgttgttaattaaataagtatctcagggaattttagttgctgttggtcatgagattctttttttatgtcctctgtagctgtcagccttttagctaatagataatgacattggtaggtggattgtgcagcttctgatgttggtggagacgatgcattaggcatttggaaaatagatgatattgataatagcttccacacac

SEQ ID NO: 203182 - DNA, 476 bp, Zea Mays
ctatagaattgggagaaaaagggtggtgaacttggccctgtatgttgaactgaagaagttcagaacagtccaaaatccctgaaaatatctcaacccactggtttctctgggtagttctggcgtgcagcagatatggaaagattgtgttgaaaggggggaagtgcatgacatgagtttatcaccccatggatgagtttgaggaggtctaaaacctatgtaccctgctggctgtttgccttgctgtcacatatgcagcaagggtgaacttggcttttcccctgttagcttgtatgccttgccatggttggttgaagcacaaactgagtttctctatgctcctgtcgacctctaccctgctcactgtaccaccccattcacctacctcctatcaaactgagtctttgtgttccggctgtttgctgggattattcacctacctcctgtcaaacctacctcctgtcaaactgagtctttgt

SEQ ID NO: 203183 - DNA, 731 bp, Zea Mays
aaagaacccagcgatagatcagagtcggagagaaaattttgcctcctcccatcggaatctagctaattattttccagtccttctcccccatgtaagtctccctctcccatccccgtcgcctgcacctaccggaagcgaagccttctacagttcaggtccatatccgggtcgccgccgtcggctagctctaggcggacatggtggccgcttgccggagcacggcctccacctacgcgtttctgctgctcttgctgtttgccgctgcggtcgccgtctcttcttcctccgggttgcgccgtgtccaggaccaggacagatcggcgctgctccagatcaagaacgccttccctgccgtagacctgctccagcagtggtccccggactctagcggccgcaaccactgctcctggctgggggtaacatgcgactcaagctcccgggtcgtcgctctggaggtgctctccccttcacggcgtttcggacccagccaggagcttgccggcgagcttcctgcggcggttgggctcctcaccgagttgaaagtggtctcttttccgctccacggcctccggggcaagatccccggtgagatctggcggttggaggatctcgaggtggtcaacctcgctgggaactctctccggggcgcccttcctgcctccttcccgccgcggctgagggtgctctcgctcgcttccaacctgcttcacggtgagatcccgtcttccctt

SEQ ID NO: 203184 - DNA, 282 bp, Zea Mays
gctctaaaagatgtcctctgtggctcgggacacccaaaatgtggtagacgatgagaagcacaagctctcaattgcttgtgacgccaccgtaatcgcatggctccaagccgaggattcactctcggagtagagcgtggagcttcatgctctatggttggccacgggcatgtcatgtgtgcacctttgtccttcgatgacgacaatggtcttgttgaccgagcaactgggaatgttgtggggccacatggaatttgtcgtcctagaggacgcgttcttcatgag

SEQ ID NO: 203185 - DNA, 278 bp, Zea Mays
ggggatttggggtggcggcaatgggcaacgccgccgggcgctgtcgggtggatgaaggtgacacggtggccttcgatccttaatggacaactgtgattaagtaccgcgtacaagtttggtcagattgtctggacaccgatggcgggactcctgcggtgggttgtgccatgggcgcgtccgcctgtgcggcgtaagccggccccaacaatggcttatggaggaagaagccgcttggccgtgggatggacagttcgcggccgagatcgaatcgatgatac

SEQ ID NO: 203186 - DNA, 425 bp, Zea Mays
gtcgaaccccagcccgtccgtaccctacgcatcttcctctcccatccatccactctttgcttcatcgatccccactgctgtgctgtgctgtgctgcgtagcttatccgaggggacaggtgagggagtcgagggggacggcgcatgaaagaaagagaccgagggggaggcggcgagagcgagaaggcaccgccgacggcgagacctaggatgcagacaaggccaaatccacatcgatggagccaagcccgatggccgttggtgttggcggcccaaagaggaggtggacgcgcagtcggaggcggaggtgcgtatgcccatcgtcgccatctagctgcgcctccttatatgcccctccggctccgattagcttacctccatcgatctccccaccatggacgccaacgccaatgccctcggcatggac

SEQ ID NO: 203187 - DNA, 307 bp, Zea Mays
gtctgttgtccggccgcggcattggtggcgcaagatcttgcaggatcctggtggtgctccacggaaccttcaatcggacaagaaaggctctagtcttttcaaattgaagctcaggggtaaatgctacaactgcctctcatctgcacatctcgcgttccgctgctcggcccctacgcgctgttggcactgtttgaaatccgggcaccgggcgagatcttgcagccaaaaaggataccagggaccattcaatgctacgctcgtcaacactgaaccaaccaagcagtcatcaaggagttccaactaccag

SEQ ID NO: 203188 - DNA, 794 bp, Zea Mays
tcctgaggcatggggaccactgaagaagtcactgaatatgttttgggatagtgcaaacggtatatcaccagagtcagatgcatggagttttggttgcacgcttgtggaaatgtgtactggtgctgttccgtaagtagcatgatattcaatttgttgtccttaatgttttgtgaatggtgttgttatatgctcattgaaatgcagatgggctggactgagtgcagaggaaatatgtaagtctgttgtaaaagaaaagaagccaccgcctcaatattcaagagtagtaggtgtaggacttcctggggagctgtggaagatgattggtgaatgcttgcaattccgagcttcaagaagaccatccttccaggacatgctgaaaacttttcttcggcatcttctggacataccacggagcccacctgctagtcccgaaatgtaatttcatctaattttgtattactttatgttaaagcataatacatggaagcttaaagctttggagaacttttacctgaaggtgtagaatcaaatactgaattatctttcagctaaccattcctgaagattcctttacctggaggtgtagcagcacatgttgagatatcttcgagctaaccattcttgaaactatttgcatattgtttccccgactgatttttgacctagttacttgcttatgcagtgattttgcaaatgaaaacttgcccaatggcatgcaacctccaacaacctccatcttagagatggttcatgataatccaaatgccttgcatcatcttgtatgcgaaggagat

SEQ ID NO: 203189 - DNA, 965 bp, Zea Mays
agagcccctgacgttgacgctcggccatctcggtcggtgtcagcttcttgaatggtcgttgcggcgctgtactgactgctgttggaatttgtgggtgtggtgctgggacaggtactgatgggcgatggggctgtcgcagagccttgttgggtgttgatgttggatggatgtctagggcctaggatctcctttcatatgctcgcgctaagctcagagcttgattaaggtctcgtggcgccataagctccacatcgatcttgatccgatccggtagttctgcagtgaacaactgcacctgctgctcttgggagagaggtgttgtttgggctagcagatcccaaaacctttcctggtaatcatccactgtcgtgtgaaagggtagtcgtgccagttcacccaatggattgctgcgaaatggcggtccaaacctttgctggcagagctgtttgaaatgagaccatgacaatggtggtgcatcacgctggagctgtccataccaggttcgggcgacccctgtcatgtgataggaggccagccagaccttctcttctatcgtgcgctggccgtcgaagaactggtcacaccggtttaaccactggatggggtcctccttgccaccaaacgtggcgaattccagtcggtggaaacggggaacaccgaccatggtggtgggaatgggttgctgggcacgtgctgtggaatgtttggcattggtggcagaggtgatggcgagtgcggcaagggcagtaggtggattggcaggggtgtggtggtggttgtgtatgcgggtgctggggtttgggtaggatgtggaaacaacatggtggtggtgtatgcggcggcggaggtttggattggctgcgggggtaaggatccctcagggactactgtggctggcggcaggccgccgtaccctggcatgccgtaggggcagccagatggaggtgtatcagctgaggttcctg

SEQ ID NO: 203190 - DNA, 294 bp, Zea Mays
tgactatgtcgttgtgcgcctctcgcacatggtctcccaactattcatgctcttcgtcaccttcttcgagcaccgctaacgcgacactccaacaccatcgcagctctccttgtgtggtgcgactctctcaccgctgccactccaggagcctcgatgcgtcacttatctacttcttcaactttgtccaacacaaactcacgtcattgttgccccttgtcctcatctacttcgtccactccaacaaccgcgggctgcatcgacaccttccttgttgttcttttgcgcattgcaatc

SEQ ID NO: 203191 - DNA, 540 bp, Zea Mays
cggcgaggagctcatggccaagagaccatgccgttgggtgtacaggatcgacggactgccctatctgtgtggtacgaaatcaagatctgttgggggacaggctctgttggtgttcaatttgctatcttgttttagttcttgcttgtttcgatagccatattaattttcgtacagatctggtagggttttgtttcccctgcgaggcgatttcctttttctctgttgtggttggggttgggtggggttaggtttggttaaacaattccccttttggattagaggggacagggcaatgaactaatttgccaactcaagcccttgctgtacacatgatttaatcatgggttacggcacatgtaccttttagatcgcttgcaaaaggttgtttagctatcctattagacatgtgtagttctttacttattcgtcggatgaagatgaagtaatggaggagattaggttggggccaaaaggcggtctcatgtactgcatggagtatcctattatttttgcagtgtctttgttcattctataggctgc

SEQ ID NO: 203192 - DNA, 477 bp, Zea Mays
caggattggaggatgatgatgcttctcataatatgccacactctccttgcaccaagggcatcatacaacactttgtaaggttggtgaagacacacatggaaggtcttgataatgacgtgcaggtgacaaatgaaaagatggggcaattggaggccacacagatcgacacaaataccaaacttgcaaatgtggaagtgatagttgctcatattgacaagagtcttgccacactcttgaggcgatttgatgagatgcatgctaataccaatcgtgggcatgaggaaagcgtcgaagataactgagatgactatgttggtgatactgaacaagatgaccaagaagctccaaatcgtcgatgtctacgtactaatcgtagaggtatgggtggttttcaccgatgtgaggtacatggtaatgatgatgcttttagtaaggttaaatttaagataccttcttttgatggtaaatatgatcttg

SEQ ID NO: 203193 - DNA, 344 bp, Zea Mays
gttactctagcctctgatccatccgtccatggttccatcaggttttttccttttctccgtcgtgcaagatcagtcctttctttttttctccgtccacggttcgatcaggttttaccttctcttcgtcgtgcaagatcaatccttcattttctccgtcgtgcaagggggtcagttgaatcagatgctccacgttacgtccacccttgagctcgatggcagaaggaagcagtagccataggaggagtgcattctcccctgggctggctgtgttattatctggcgatgaagctaagattagctcccagaagtcgcacctggtgtcctatcatgacgaaattgggcac

SEQ ID NO: 203194 - DNA, 308 bp, Zea Mays
gcgatggctcatggtggacgtgggcgacgcattgctcttgttcctcgcacaccattactgtcgtgctctgctaggcccgacctccctctctctgtccctggtcataacgttttgggcgagcagcgaggccacaaggcggggttgtagctagaggagaggaagcatgagataggcatgtgaaactggcacagcccgagagatccttggcagaggtacaagcgtcaaggaggaggcgaggtgcgaaggggagggaggccgtgatggaggcgagctgatgtctagggccacggcgagcagtgaggccgtgg

SEQ ID NO: 203195 - DNA, 282 bp, Zea Mays
gtggaggcagttggaataggtgatttggtatatcgaacgaatccacccttttttatgtagatgttatgtattagtaatatactactatatagtctatgttaacgctacgatcttagggaggagaggggtcgacggcgggggcaacaacagcgcgagtgaggggagggggatggagtcatggagaggctaggggcgccaagattgtgagagaatgagaaggagagggatggtagaggatccaaagaatgttgttcactagatttgagcgtgtgagactatctt

SEQ ID NO: 203196 - DNA, 281 bp, Zea Mays
ggctgctgttgcacctgctgcattgctgctaagatctgaccaattgcttggactgcttgggtctacatcagaaacatctgctcaatggtcatcaggggtggcggtggcaactgctgctgagctacctcctcttggggtgcctgctgctcctgctgatcacgtcttccacctctgcgcgtattctcagacatctgtagaaagcacacacacatcagatctgactctgcagtctttcagcataagaaaagataaatggaaaacttcatagcactgaacaattg

SEQ ID NO: 203197 - DNA, 283 bp, Zea Mays
ccagaagcgaggagggagataagcctgaaacaaaagggagcgaatggcattgtttatggagcgaagaatgcgttcgactttatcattttgggcgaaggtgtgaaggcaagacatgcgaaggtgaacgccgtgcgaagaaaagaacttgcaggcgctgaggttgtcaaactcacggccgttgtcgcattgaatgccctaaatggtgacgccaaactgagtatgaacatatgcaaagaagttagtgagggtggagaaggtgtcagatctcaggcgcaaggggaac

SEQ ID NO: 203198 - DNA, 350 bp, Zea Mays
caacacgggtcctggtttccggaggtgagcgtgcaaataaaattggtgccaacccttctgtttcgaaagaccaggaacgaattgttacgcagcctcagagaggcatgttgggaccctctatgctgccaaatgtgacgcctgatcaacagaaagtcgatagcacttctaaattagggtcctctgccccagatgagttgatgttgacagcaccctcaatgctaaaaagtaccactgatacctgtgcacaacgtgttggccagcagaaaaacaaggctaatctgttgatggatacagagaagtcagctttcgatgctttgtcatctcaaattacatcatgcaatgcattgatg

SEQ ID NO: 203199 - DNA, 540 bp, Zea Mays
gtaatcgtgcagtttgacagtgaacaatttgagtgtctttgaagtctttttattgatgatatatttcccagtttacagaatacattgtcgtcccaatagcttttgagatatagctaggggtaaaacttcctgagatgttctatgttccatgagttcccaatttccgtgccgtccatttgagtgagatgatatgatccaggccgagtgacttctgctactatgaatggtccttcccatagtggtgatagtttgtgccgtccctcccccgttagaatttggcggaggacgaggtctcctactgcgaaggatcgatgctgtatggccttgtcatgatagcaccttagagtttgctgataccgggctgactgaatcaccgtattcaatcgttcttcttctagtatatcaacatcttctagtctagtagcctcagcttctgctatgttttcaaagattaacctcggtgccccaaacttaagatctgcgggtagcactgcctccgaaccatagaccatgaagaaaggagtgtttccatgtagagct

SEQ ID NO: 203200 - DNA, 653 bp, Zea Mays
ctcttcttctccactcggccgggcactctccttgccccggcctcacaccatcacatgtccacaatgctgccgtcctccagatcgaggtgacttactttcgccccctcccctgctcccggactcttgcgttttctctctcttttatttatttatttgctcgcgctcttgttccgcctgtcggttttctcttctttcttgaatgacagatctagtatccagtaatccagttagagccgcctgtcgctcttgctgccgtagttgcctccttgtcaaatatgtgtatactgggctactggctcgtgtgatttccgccacacgccaatgtgcctttcttcagatgccgtttcatctctgcaaatcctcgaattccgatcgtggccgttacggtttcatttgatcgatttccaacaagaaaaatctgaacctgcctgcgttcaaccctgtggcttcgtgccactccactagtttgcagtttgcactcgattcggcgacagagaaaaaaatagatttttgatttttaattaacggcgatggatgtcgccattggcagatctgggccgaacgagtcccccgtcagcaggggcaggccgagcacgccatcctccaaccaccgcccctccacgccgtcctccaaccaccgcccctccaccccg

SEQ ID NO: 203201 - DNA, 567 bp, Zea Mays
ttcattttggggaggggagttttactgcaatttctagtttttggaaatcacaagcagcagaagaaaaagtcggttgctttatttgaggactctggaaaatgttgaattgattggtcggtatgcttgtcgtgtaatcctacgctgccattcttaagccagggctacataaaaactcacagtagattttagcacccaccaagcaccaacagatagaaagaaagaaaaaaaagtttcccagcctttgacaaacattagaaaacacagcactgtgcacacaccggcacccatttctcttatggcttgtgatgaacagtatgatcaagatcagagctgtgccattgtcatcgtagtactgtgcagcggcgaaatccaaatgttccaactttacatgggtaccgtagcagatattgctttctgatctgatgcaagtgtagtggagtcctggagtggtgaaactgacatgtgggataatagatttggtatatgtgccatgttgctaggaggcaggctcacttccacacactacatacactgtggtggccggtgggatattctgatggaatgtta

SEQ ID NO: 203202 - DNA, 389 bp, Zea Mays
gaacaaccgttgttggcacatgcttgttcagcagacgcaagtgtatgacgcatcttctgtatgcgatgttgtctgttagcggtggcaaccgtcaccggaaagtcgagtaagaacttgtcgcctgcaaccgacgtgcgcacatgtcttagtatgcgcatagagctagagcagataaaggcagcagcaaaagctcgagagccactaacatggccgctttcgacgaacccgctgagagtggaatcgaatttcataacgcgacgcatgtgccgccgccgaagcggatggttgatgaagtgtgttcatgtgtttgatagtagttgttcaaagaaataatgaatgtttggttgtttatgcgaaaggggaagagacagattggcttaaattatggc

SEQ ID NO: 203203 - DNA, 555 bp, Zea Mays
cagcggcagcaccatggctgtgggtagcagctgcagcagtcttgttgttggaggagttctcatcaaatctccaccagcaatcaagagcagtattccagtcttctcacaaacctgacatatgatgtcagactttctagcatctgatggcaccattctttgggcactatgaccaggacctcctttgccacggccaggaccattacgaccacgaccacgaggtccatatctaccacgaccatgacgagcagtattgaccgaagcttgtattcctctgtgaagcagttccaccctgttctcaaagctgagaagctgagaatggacatccccgaccgagacaggttccacacgagaaacaatggctgagacaagtggattaaattcttcatctgatctcgttagtatatacgagactagttcttcatcatcgatagcctgcttggtagatccatctcatctgcaagagatttcatcttggtgatatactcagaaacaaccatgttacctttccgagtagtagctagagcaattcgcgtgttgacagttcgtgtgcgagac

SEQ ID NO: 203204 - DNA, 480 bp, Zea Mays
tccaggtcgcctacaggaatactaacagtttgtcctaggcacaaggaggcgaaggacacctcgttccttaccaaagccgaggtctcgactggagaacgggtgaaggtttggaggcgcaggaatctaccattttaagtgggggcttcttaggacttcgctcggcaccacctcaagcttgggcggctcggagtcacaaccttggcaaggatcaaagacccggatccctagagggaagagttcatgtcccagcgaggaccacgtcgtccgatggcggcccctaggtagtaccccgctggtcgttcgagcccatttgtaagccccttcctggggtagggtatgccgtatattttattaggttgtacttaacctcaccataatgactgtaatgacccacatgcgggaatattctgggctgtagcaggtaactaggggcataactgtatttaggagggcatgcccacccgtctggttacctataaa

SEQ ID NO: 203205 - DNA, 941 bp, Zea Mays
tatagacaaagatatcagctctccactagatgaaataagatctgagaagactgacgatattttgggtactatattcttcttattttctggccatctcccctgaatcaccttgtctactgatgatccattagttttaaggcctgatttttatacttttgtgtactgttgaccacatctagcaattttagactggaatttggtctgtacctatgtcacaggaagcggatcatagcaaaatggtgatatgaataaatgtgatggaccatcataatacaaaactagatgtccagaagggttatggttgtctataacatagacatttgtactacacatttgatgttcatttattcagacccattttaagttgttccttaagcacataaatattattatcaagaaaagtgacttgttaaagtattatagatccgtatatggtaggaacttgtctgacattttaatttgaaaacatcagactatgcaagttttgaccaaaagtcagtccaatatatgcattgcatgctttagtgcacaaaagttgtataaatagatcggtatttccaagtatttataatatgatgcttattttgtagcaactgtctatatattgtaagataacttacgataaaaaataaatacttctgatgacttctcgttctgagatataccgtaaagtaatgcacagagcgatttttctaaaggaaactcagtcatttgatatgattacttctgtacaaccaaatattttgaagggaaattcagattcactttgttgagttctaattattttttaatttaccctgtttttttcagccaagcctagctacaagacaattgtggtagatgagaacagacggaaaacttatgatgcatctgaaggacagtctccaatggaatctgatccagtttttgatgttttctctgcggaaccaaaagagctcgtg

SEQ ID NO: 203206 - DNA, 548 bp, Zea Mays
ataggggggactgtcaggttagggatttcatctaaaaaggtgaagtccgcagctgcgggcggtgagggctgcttggcgaaagggaaggtggactcgtcgaagataacatgacgagagatgatgattctattggtggtagggtcaagacatcggtatcccttatgatgagcagagtagccgatgaagatgcaaagcgcagaacgaggtgcaagtttgtggggagcagtggccgagagattggggtaacacttacaaccaaaaacgcggagatgatcgtaggacggcgcactaccaagaagggcagaatgcggagtcgagaaatcgagcgtcttggttggtaagatgttgaggaggagagtcgcagtgtgcaacgcctcgtcccaatatggagggggcatgctcgcctgaaacagaagagagcggatgacagcgttagtggtgcgaataatccgctcagctttaccattctgtggggacgtgtagggacacgacatgcgaaacaagacgccatgcgtgagtaaaaaggtgcgggtgctggagttgtcaaa

SEQ ID NO: 203207 - DNA, 298 bp, Zea Mays
tctccttccttgacgtggttgatcttttccttctccggtcttgctctttggtgtctccatccgggttcgggacaagaggctaagatagatttgttatgtaggtcaagttgttgggtatggccgagatgatctaggtcactagtttaagcttaagtggatttgaagtatggcttaatcctttgtaccagcattaagtaacttacactagattggatcatataagcttagataggatctagattagacggaatatgactagattaaactagtgaagatctcattattttggactagatca

SEQ ID NO: 203208 - DNA, 303 bp, Zea Mays
cctgacctgaccggcccatcgccatcgccatagcatcgggggtcgagcagctcggcgaaatgacgcagctgggctgaggagagcggtcgatcgagagatcatccatcggggtcagggactcagggtgtgagcgagggtgtaggtagggtgggtaaagatggacaagatggagagctacctgaacgagaacttcgggggcgtcaaggcgaagcactcgtcggacgaggcgctggggcgatggcggagcgtcgtcggcgtcgtcaagaaccccaccaggcggttccgcttcaccgccaacctggg

SEQ ID NO: 203209 - DNA, 469 bp, Zea Mays
cagtttgcctatatatgagtaaaaacagaaagcaaagaaagtgagaataatattctcacacaaagtctgtaaaaaatgcataggcatatatgaaactattcgtgcccgtgcgatgccacctcgtccagtagcaggatagcaagtagatgggtatgtgaaagactggaatttgtggaaaatccaaatgcatttcttaccaaacaaagctcaaatctacatggattactaaaaggaaaaattagaattcttctagttctggactatagggcaggattctacggttctacccatcaagaagacacagtgcaagtgcaaaagtaccatatcatgtacaatgttgtttagtttagcctattatatagaggcatgcaagtgcaagagcaacagtggctgtattagtctgtttctcaatcgcccaaatggtcaatatgacataagccaagaagtattcaaggcaaggcggatcctg

SEQ ID NO: 203210 - DNA, 341 bp, Zea Mays
ctggttgatatttttctacagccaaaatatccgtcccttcgttcagtaaacagataggaaagggagtagataagtctcccatttgggtatgcactatggtccaaaacttgatatttgctactggggtgaaggcgtgaagccactggatttttgctgtccagttaattccaccacagatcctatagataaggcctcactgcctaccaaaacagtccaaatctgctattttcccagtagcaaataaggcctctagacccttagtgatgtatctcaaccttgactccatccaatactcgagtaacctaacagagaggaagtgatcttcagaatccgaatgccac

SEQ ID NO: 203211 - DNA, 520 bp, Zea Mays
tcccagcggggccgatgacgagctgcgcgtaccccatggtgacgcgagggcgggtagatcgaagcgagtcggcgggagaggttgcaagtatagtaggacctacaaagctggaggtggggtgtgctacaggggggaggttagggttggggagtggggagtgggaatcagaaggcggaggagatggcagcggcgaggtaagcggcgcaccagatggcggcggcgaggagggtgctgattagggcggacaaggccatcgacgccttcaatacggaatagaaaattcaaaaatatcgcaagccgagatgaagatgaatatatctactggcgccctcgtggcctccccttcctctttgctctcctatggccagttcaacggcggggatcaggagcaccaccaccgtcgacggaggcagaagaggcggcgcttcggggtgggggaaggagcggcggcgctggggcagggcaagacaccgacgccaggatggatgaaggtggtagcggaaggagccgcggcgtttac

SEQ ID NO: 203212 - DNA, 382 bp, Zea Mays
gctgaacaaacgaaaatcacaaccgaagctaaggaaaacacagaggatgctcagaaccttatcacaaggcttgagacagagaaggagagctttgaattgaggtgtagacatcttgaagaggaattggcgttagcaaaaggtgagatactgcgcctaaggaggcagattagcacaaacagttctcagaaaccaagagcaagaggaccaccagaggccagtgaaactctgaaggagcaacctgtgaatgattataatcagaagaccagtggagttgttgctggaactccacagcctgtgaaaaggactgtaaggagaagaaaaggtggcgcataaacatgtgtgtgactgtgtgtattggaagccctagccagagccatcgttt

SEQ ID NO: 203213 - DNA, 531 bp, Zea Mays
attgctaacaataatggaagagtgggagggagaaaagcgagggaggactaccatccgatgattacatgtgggaggtggcgccagtgttgaggacctaggggctgttgcagggcagcctctagaccagatgggtcttggctaggggagggcgcttgctgctgccgcctacgggcatgctgactagcccccacctttatgtggtcggagatgcctgggaccaagcaaatgcggcgttggcttggcgaaaaggcttgagagacatgcagaatgtgggcgcaccattggtctacgacggattggtcgccgagatggtgatggatgaaatgatgcagtccgacgaccaaggctggagaggagtgctgacgggtgtgtgtgtgtggggtggggtgggttgtgtggagggcgtagaggagtaggcgtccaagggaggggaggtggcactagaggaagggggggggtcagcggctggtgggctggggcagcaagatgaaaacctagactcttgatatcaggtacaaagatagacgggaa

SEQ ID NO: 203214 - DNA, 297 bp, Zea Mays
ggattttgtaatcggactgccctagacccaaaaagggaacgactctatctgggtgataatagaccgtcttaccaaggtagcccatttcatcctagtgaaaactaccttcggaggagccacccttgcccggatatatcttaaagagataatcagactccatggtattccacggaagatagtgtcagacaggggaacacagttcacctcaaaattttggatgagccttcagcaagctatgggaaccaagctagacttcagcaccgcctaccacccccagtcagatggtcaaacaaaaag

SEQ ID NO: 203215 - DNA, 309 bp, Zea Mays
cgcactttcttcctcaccaaagccgaacgtattattcgcaccatcaatgacaccgttcgttcgctcctttttcaggcaagcgtccctccttactgggctgaggctctcaacaccgccactcgtcttctgaacatcttgcccaccaagacacttcacttgtccacacctcactatgccctcttcggcgtagctccaacatatactcacctccgtgtctttggttgcaaatgttatcccaacttatcttccactactcctcacaaactcgtcccccgctctaccttgtgtgtcttccttggctattccgat

SEQ ID NO: 203216 - DNA, 657 bp, Zea Mays
tcaccaaactagatctgcgctcaggataccatcaggtacgggttcattcggaggatattcataagacagcctttcggacacaccacggccattttgaattcctggtcatgccatttggactttcaaatgcgccagcaaccttccaagcccttatgaatgaagtcctggggtcgtacctccgtcgttgtgtattggtattttttgatgatatcctcatctacagtgcatcctggtctgaacaccttcgacatgtcaaggcggtactcgaaacattgcgcagtaaccacctttttgttaaacagtccaagtgttcctttggagccacctcagttgcttacttgggtcatgtgatttcagcagacggggtagccatggacaatagcaaagtggaagcggtctcctcatggccggttccccaatcaacacgtggattacgtggcttcttgggattggcaggctactacagaaaattcatcaaagattttgggtctattgcagcaccattaacagcactactaaagaaagaaggtttcaagtggggtttggctgctgacacggcattccaggaactcaaaaaggctctttctacagccccagtgttgcagctgcccaacttcgatcaaatgttcattgtggactgtgatgcttctggttcta

SEQ ID NO: 203217 - DNA, 458 bp, Zea Mays
gtcctccaaaatgacgttgagtcgttgaagaaggacaaggcgccgttctcctcgccatccggcagcggcggccacgacggccagcaccacatcgatcgaccgccgaggttccaaaagattgacttcccgcgttttgacgacaagtcggaccccatgctcttcgtcaaccgctgcgagtcctactttcatcagcagcggatcatggaggaggagaaggtttggatggcttcttaccacctcgagggcgtggcccagtcgtggtacctccagctatagacggacgaggggactccgcgctggcaccgcttcaaggacatcctccagttgcgcttcgggcctcctctacactcggcgccgctgttcgaactcgctgagtgcaggtggacgggcaccgtggaggagtaccagaaccgcttccaggagctactaccgcgcgccggaccactggaggaacgcca

SEQ ID NO: 203218 - DNA, 683 bp, Zea Mays
gtttcttggcacctcgggagtcaccttgccattcttggttgatctggagattggaggcatccctgttcatgcctgggaaactagtacggtggaacatattcttagcccctatgcttggattcatcaggtgcatcaggagaccttggcactgcaagatttgtcctgctttcgatgctctgcttggtgtactgatccgtctactattcctgcttcacgtgacttgtggattgttgagtctgttcaggttgttgagggcaatgttgaagaaactatggctctgagctacccaatcactattagtttttccgttgccttccgaccgaatgattccaattcacagtctggtcttcctatggattctgtgaatgatggtgatcaaagtaatggctactatggacatgccaatcagggattgactcaggggcttggtgcatttgggggtgggagatctagcccattcttgagggatgggcgtaattcatccttgggacgcgcagccagagaccgttcagggacttgccagccaccagtcaccaaccaggggatagcttgccagatatcatgcattgttgacacttctgaattacataaaattgctgacccacttctggattgtcttcttgctgattgggagactcgtcattcgtccatgtttcatcaatcgtccaggattttcattgatc

SEQ ID NO: 203219 - DNA, 346 bp, Zea Mays
acacaccttttcgaccacctgctgctagcccaaatataggtaaccaaaatttccccccacccatgtgggatcctcagatgtggcaggcccaagggttcgacccaacacagggttcaacatttagtaatccttcattttcccatatgatcaatcctacctggtcccagggacctaatgacccatctgcatgtacctttcgtactccatggaacccatattttggtatgacaaatcctgggggtcctcctacacaaacatctttcggtcaaccacaattggtaccacccattccatgtccaccggtgtccacccatgttcccaaccagactgaccctataacttttga

SEQ ID NO: 203220 - DNA, 394 bp, Zea Mays
ttgtttcctaataatccatgagcggtcatttttattttgcacatccttggtgatctcgttaattccttgtaacttccttcgataatgaacttttacttcaactcttatgtcagaatctcacttatcttttccttgattgttttctccacttcatcactttgcgagtcttgccttaactctgtccatggattatgcttttcatcgttatcaccttgcccttatcgcctctatatcttaccttgatgtttatcacctttttctcttcctcgcaactccatccttcgttgtgcttttgtttgttgtcacatttacctttcccatttgtcgcccacaccttgttgattacgtcatatctgttatctaaaatctccaatcttctatctcaatttgtgag

SEQ ID NO: 203221 - DNA, 395 bp, Zea Mays
caagaactcctgaatgcttatgtgacagataaagaggctcaagatctattggctcaattggccctggccagtcctaatgagcaaggtttttctttacatcaaggtattattagaaaaggggatcaaatctggatagctaacaattctgcccttcaaactaagttgatttcagccctgcatgatagtgtggtgggaggacattctggtggtgaggccacttaccaaaggatcaagaggttgttctggtggaaagggctcaagtcagccgtgtttcagtttgtgcagcaatgtgaggtgtgtcagcatgctaagcatgaaagggtgcattatccgggtctcctacaacctttaccagtgcctcaaggggcttggcaggatcttacattggatttcat

SEQ ID NO: 203222 - DNA, 673 bp, Zea Mays
catgaacaacagcccccacaacaagagcagaaatagcagcagatacttttgcagttctcccaacaaaacctttccctgagttgctgagctcacttgtatgatttccatatgcatcatgggcctcaggagatggttgaaactgattgcggtgcatctttggaggagcaaaagctgctgtaacagctgcagaagtttcaaccgccagagctatttcaaaggcacggctgaagcgatctccaagagtttcttttagtaagcaaagagaatttatgtgaataagtaaagtgtgccgaacaaaatttagcgaagtagccacagaattaacaccttgatagtttcctcctgcaaaatccaaatgttttgctatcatatgcccagcattcacaacgattgcagaaacagcagaagcaactattgaaaggtctccatctggatttgcacccccattttgcctgatgcattctactaagcccaaaacaatgtcatgtgcaatttgataactatcttctttctcaaaagtgagtggattcctgggtgctgcgcctgcaagaactttcttttcctttaaactgcgctgaattccatcagcttgccgttgcactatctctttcatattctgcacgagtcttgaactccttccattcaacttttggcggacctgctcatcaatctc

SEQ ID NO: 203223 - DNA, 284 bp, Zea Mays
attcatgcttgggatttggctactgctcagaatttgttgagggatcactgcactgatgtggagctccatcctgacacggtgaatcaacacgacttctcttccttcaaggtttttggatggtgccgacgtccacacctcattccaaatttggtggagctccttgttcctgaacctttgatgatgacgcctggctctacctctcttgagagaagattgctcgcttaccaagtgactgcccttgtgtctctgatctctccgccggtgcatagcgctgctgcacctcc

SEQ ID NO: 203224 - DNA, 279 bp, Zea Mays
cgatacaaaattggagtgacccagtataagttcaagaatttcatcagctgagaactttccttgtgatagcacaacaagaatacatcgaattgcttttatggcgacaagatcattgaatctatgcaagagggacgatctgatgaattgagcaaggaaaggtattgatttcagctgatttagatagctttgaatctctaaagacagttcaatgatattcttgagaaatacatattccagaaaacagatgacctttcgttccttggtagagagtgataagat

SEQ ID NO: 203225 - DNA, 389 bp, Zea Mays
caggccagatttctttgtctgacttgtggaagcctcttacaactattgtacaaggctgctgtattgaagatgtctgagttccttgacctagagctacaagatgggataaggatgccctggaatgttattccaggcacaaaacaggagactgtgaactgtgtgattcctgtttccgctatctacacacctttgaaaccaatttctgatatccctgttcttccatattcacctcttcgctgtcgcatgtgtcgttccatcctcaaccctttctccattgttgactatgttgctaagatttgggtctgttcattctgctttcaacgcaaccagttccctcaacactactcttcgatctcagaaaataatctccctgcggaactctttcctca

SEQ ID NO: 203226 - DNA, 525 bp, Zea Mays
atctcatttaatcaagtcggtggactatgcacactatgttttcttgaagaggtgtgttcttaccttccaaatccagcttaatttgtatatgcagagctcgtccttgaaacttttaccatctgtatcttgtaatcctgtaaaaaattcatgttggtctggatgcctggttcgactgttcaaatatgtttgattttttttttgcctatttttgcttgcttctaatgattctgcattttaatagattgacaacttgatcagccaaaaccatttattcaagaggagtatcatattgataaaggcatggtgtttctacgagagccgtattcttggagctcatcatggtcttatatctacttatgcattggagacacttgttctgtacatatttcatatattcaacaactctttcactggacctcttgaggtgactttgccttctcgtcttttaaacgtaccctgatatgaaaccagtgcttattttctattcgtgcatgtccaggtgttgtaccgtttcttagaattttt

SEQ ID NO: 203227 - DNA, 388 bp, Zea Mays
ttgatattcaaactttggctgaatttgaactttggtttgaaaatagaaaacaaaataaaacacagaaaagaaatagaaaaaccctcacctgctgggccacctcatcattccgtcccacttctcctccgcgatcacgtagcccattccattcaatccctcggcagccaatcgcttacatgcgcctacatgcaggccccactcgccaacctctctaaccgcgcacacgcctcaataatcatagaccagcgggcccctcctgtcgattcaatctccttccctacctcacgcctggcgtaacagaatagctgatatccacatgtgtgcccctgtagcgcgttgcctcgcctgcctaaactttgccctctctgttggctatacaaacctaact

SEQ ID NO: 203228 - DNA, 337 bp, Zea Mays
atagaatctcacaacctcaccactcttaccaaccaaagctcttataagttcactgcggtttgcatgaaaatgtgtggtggtaacaagaaagtggtggttaagcgaatacaagaccagagtaccgattacgatggcttatatgtggagcttggtggggaataataaacaagggatgcaatctgaatcctagttgttgtaaagttaaataaccatccaactagaagttccctgcttaatgctgaccacaagatacgagtgatgtaaatagatcaaacacacgcataagaaatttcagatttgatgcagacaatgagtatgattggaatgcaagtgttgc

SEQ ID NO: 203229 - DNA, 368 bp, Zea Mays
cattccaatgccaggcacacaattgtaaagataagagtaaaggaaccaaatatttaaatgattcaaaaatacagcacaaccctgcctcatagagtgcacacagcatgtctccactcaccacactacatgtgtattccaagcagcacttcaccacactatgtcatcctccttagcggatgtagtatcgctcgagcaagcagcaacaacacaacccagcaagactgcaacgcaagcagcataaagctttcagtcggtttgtagttttttgtttacaaaaaatgaagcttacttccatgtccaacccaaatgttgctcctgtagctgcagatggtaaaccaccaattctcatttgctagaacacccaaaat

SEQ ID NO: 203230 - DNA, 391 bp, Zea Mays
ttctttgctgatagacacttgaacgcctgtaaggctacctagaacagagctaaatctcattgggagatgtgataaatagcaagatagaatagaaaaagaataaatggtagtaaatgtatttttgatcgattggatattggacacatcaattgcttatgatccaaaacacattctccaagtttcccacattaaaaaccaattcaaaaacaaattggtttagatcttaagaaaagtctgctaggacatgtttcatggtggctaggcattataattggtttgacaatagcatgtcagcttgactggtttctaggggtggcctagctgactccaggaatatgacctaacttgatctgttgatcgacctgattagatttaactgatttgcgccatg

SEQ ID NO: 203231 - DNA, 304 bp, Zea Mays
gttttgtacagaatgtcaggtatagccaggtgctcgttgtcgttgcttcagttttaacgagtcggtcaggcaatgcagctaacgttatggcgtcggtcatgctctgttgcagagagtaatgtggatagcatccagatatctgttagtaacgatgagaggaggaatagggcagatgccgagatctcggaggacgagccgaggcacaccaggatgcggaggctgaagaagaaaaccttgcatgcatcgacaagactcacacactccctgaagaagagggggaagagaaaagtggactgcagagtgc

SEQ ID NO: 203232 - DNA, 427 bp, Zea Mays
ctctgcttcatcactaggacaagaatgtttactatattgatggtcctggttttcttcaactgttgaaggatgtcctggagattgtgatgtttctgatgcttcatcatcacccaccttagatgcaagtgcctcagtgcagccatcaagcttttcttctgctactgaaggatgtgctggagtttgtggtgttatggactgctcagaaacatctgccttagaaacaggtgactcattggagatactatgagcttcttctgattttgaaggctgttctggaaatgttgttactgatacttctgaatgatctacctcggatgtctgtttcttagttggggtgctatgattttcttcctctactgacagatcctttggaaattgtggcttttctgatacttcagtgccatcttcttcaccattgtgtcccatg

SEQ ID NO: 203233 - DNA, 326 bp, Zea Mays
agaaaaagcgtctcgcagagggagggagatcgagtcgtccaaagagaaagaaccgcaacaagcagtccacgcgcgccgcatctcggccttcggggtacgatctggtaggatcaccggtacacatgaaggctcctcgaggttcgttggatgtggaagacccttcgcgtcataaggaattcttaatggagtttgcatcgtgcaaggctgcttgcggcatgggagggagccctgcatcatgtcagcttgggtatgttgctcccaaacaaatcgctatggtcccgcgtgcatatagagccatacggggttgggattcgtgcgtggggacg

SEQ ID NO: 203234 - DNA, 524 bp, Zea Mays
cgggcggatctcggagacctcctgtaccacgcggaggaaggattcggcctggcgtcaccgcgtgctgtcatcgaactgctcactccctcaacgacgccgtcggccaagtccactccatcgacgggagactggggtcccgcacggtgctgtgtgctcggttctctgctgctcgaccaccggtaaatttccgtccatgttgttcttgctcctcctctcgtcgtagtgcgtgcgctggggttgttgcttgtcggcgcttaagccttcgcggcagcggaagcaccaccgtcctgccgagctgagggttgaagatatgtccgtggccgtcgatcgttaagtgaacggatcggacgagatctcgtccggatgatgtctggaccgttgatgtggatagacggtcgggattaaaggtcacgtacccccttcgctttttggtctagtgacgttaagatcagatcggagggattagattgaatcacgccttcatcaaattttggccatagatctcgaagcgtgtggccgtgggt

SEQ ID NO: 203235 - DNA, 394 bp, Zea Mays
ttccaagagactgaaacagtgatatgatcacgcttgtgtgatatcgaagattgctcaacatttcagcccttccaagtgtagatgaatcaggtctaaggttgccagagaagaaaggttctataataaggacaactgccacagtagcaccaaaatacttcagaaagaaatcttgaatcatgccgaaccaccagttttcatgacgcacaagattcaggtgctcaacaagagcctcaaaccgctgcataatatgagatgcttctctgttctcaccgccataaaatgccacactctcagcatgtgttcttaaccgcgagtgaagttgacgatagtctccttctagttgctgttctgtagatttcagcttcccaaaagcaggagaaaagttctttattac

SEQ ID NO: 203236 - DNA, 552 bp, Zea Mays
atgaacaaaccggcttattccaatgatctgtccgttgagggtggagggcacactaatgttgagaagctagtaaacaggacagatgaaacatattacagaaagagtgttgatgtgcatgaaacttttacaaagaactctgctttacttcagaattccgctgtggtgaatttagggcccgctaaaaaccatccagttcatgcattcgacttgaacccacttaccactcctagtggaagcccacactttgaagcaagcatgggaagacattacaatggaaatcatttggcccatagtcatggaatccatttggagaaaaactttgatgcgtcattttgtaatcctatgccacgttttacaggagttatgaaccatgatagtagggcgtgcagaccaaatttctccaataaaacattccaggacactttgagcaatgcttcaaacactgaattaaagcttgggcaatcttcttatcatcaatctatgactactctttccccattggggcaatcaacgatgattgaatttcagaaaccccaaacacataggcctccg

SEQ ID NO: 203237 - DNA, 335 bp, Zea Mays
tggcagtcgctccgtcgacgggctgccctccatcactctcctgccatccgtcctgttcggatccagaacaaaccactgccacgcgcccacgcctcgacgtctcctctcgatctcgcacgtcctgaccggcccatcgccatcgccacagcatcgggaccgagcagctcgccgaggatgctgcagctgggctgagcctgaggagagcgaccgatcgagagatcatcgatcgaggatcagggacgactcagggtgtgaccgtccgtgtgcgcgaggttgggcgcgcgggcaaagatggagagttacctgaacgagaacttcgggggcgtcaaggcgaa

SEQ ID NO: 203238 - DNA, 344 bp, Zea Mays
cgtggtgaaagagcaagaatacactttgataatcttgtcaagagatggagggcagctgttctaatacagaagtacactaggcgtcgacttgcagctaacatgtttaatgatcaactgaatcatatcattcttcttcagtctggtaattaatatgataaaaatgggcatattaacattaccctagagtactggatctatctaatcatgtgttgtcatatgttgctgcagtgatgcgtgggtgcctgactagaaggaaatacaagtgcctgcagaatgaaaaggagtcaaaggccagtcacaacatagttccaggggaaacaaggaagaataatgctgagtcaaga

SEQ ID NO: 203239 - DNA, 284 bp, Zea Mays
ctggacctttttggctttttggtacttcaatttctgccaaaggacttaaaatttctgttgtctttgtcctctcagctcttggctcttcaattctttcagccttcggcgttgcagtcaacttgtcaattttctgcgaaggtgtaggctctttggcttcagtagcagtagaggtctcaccaccaaattcgggcaccaaggctggatcgatgaagcgtggtcggtgagtaaggaccttcactcttttcctctttgccgcagcctcactcagagcaaccgaagtatcg

SEQ ID NO: 203240 - DNA, 289 bp, Zea Mays
catgctcattctacatctgctcgctgggaagaaagtaaatgcatatctatagtgtatttctctgtggtcaaatgcccatgctttgatatcatccactaaacaaatgcatctctgttgtcttagattctaaggagactggggacttaaaacccatgaccacagacatttctttgattgtatacacctttgaatttaataataagaacgataaagttccaaaacgggatacaacgcgggcccatgaagcgtacccttatagttacaggaatcattgacaatagacttaaac

SEQ ID NO: 203241 - DNA, 359 bp, Zea Mays
ctaacatatttacattatgtagtgatgtgagtttgcttttcagatgacagggagacctattcaagttgaaactaattacacagaccggtttccatctgttgattcacgctcgcatcgaatgcgtgaatcagattcggttattgaggtaaaatgttttcatgatctgatccatgttttatctgttctgcatggaaacatgttatgctgtttggactgcatgttagttaatcattagtcactcttaacaattcttttgccttttagattgtgtgccagggccgtgattcgatggatgatgagacagtggaccaaactgaaaaggattctcaaggaggtaacaaaggagcccattgtattga

SEQ ID NO: 203242 - DNA, 621 bp, Zea Mays
gccaaaggatgctgtcttgagcctcctcttcctaccagaaaattggtctgtccatgaattttattgggctctaatccggcagccaccttactgttttcatgcttttggatactgtcaactatatgttggtttggcttctgaagcagcttcatgaaaagttcattgtttgaacccagtatttccaatgcatccttgaattgtttggatcgggctgccatggtgttagaaagattattctggtcagatagcttagcatcattaccctcttgagattgcgcgcagccaatattgcgaggaagattattcaattcattgacctttttatggattagggacttcagtgaaggacacaattcattcttattcttgcaatcactgtgtgggcattcatcgtgacaactataaatttcacctaggaaattcatcaggacagattcaagatcatattcttcagcataattcaaaaccccagaatccattggtggaattgaaggtgtagagattcctgcctggtgatatgatctatctattgatttatttgtatgctctgaactcctaccaagagagacatcatttcccaggtccactaatcttctctgaatctcatcatttggatttttc

SEQ ID NO: 203243 - DNA, 478 bp, Zea Mays
agaggacttagcagcttgaagtgcggggaatcagtcattacctttaaaattctgctacttcgacattccccagccactggaggtcagaaatattctatttgccaagtactcttgcactagatctctagtgctgacttcggctgctaccactctgaattctacttcggctacctggcatggggagccaagctgcatgtggcacaagggccttgtcatcccgaagctcaatttcaatggactcatgaccatagtcattagcttctcccttctcttctcgtctgcctttatgtaaaaccattcgtttttccaaccggtcagccacttggtacgatagccgagaaccggggcctttgtatccttccgatacgcaaagttgtagcagccaaagttctcatgaagaccatttgcttcacccttcgtttgatagtgcagcccgtgcacccggcagaaggcttcggcattgggactcataccctgg

SEQ ID NO: 203244 - DNA, 310 bp, Zea Mays
ataccctctcgtgtgattacaatgccctcaatatcatagaaacgtcatttgaggtttaaaaggcaatctattgttttgaattctttatattccaactttttagcaaatgtatggtggaaaaaaattgccttacaaccttaacctatgtatggacagttcactcacgcaatttggctaaattttccatggtctttattttattttattttgagaaatgatgtggcataatgatgtgcggtgttttacttgagtggacataaacaccatctaggtatgccttgaatagagaggattataggaaacctggtat

SEQ ID NO: 203245 - DNA, 327 bp, Zea Mays
aatttacagaatacaaggtcgtcccaatagcttttgaaatctagctaggggtaaaacttcctgagatgttctatattccatgagttcccaatttctgtgtcgtccatttgagtaagacgatatgatccaggccgagtgacttctgctactatgaatggcccttcccatagtggcgacaatttatgtcgtccctcccctgttagaattcggtggaggacgagatctcccactacgaaggatcgatgtcgtatggcctcatcatgatagtgcctcagagtttgctggtaccgggctgactggatcaccgtattcaaccgttcctcttct

SEQ ID NO: 203246 - DNA, 863 bp, Zea Mays
gggtggtacaacacgcaaaaatttcttcacaacacgagcatcatctatggactcacctagagacttgatattggcaacaagatttgtaattctcataccaaaatcctcaactgtctccccttctttgaattctatgttctcaaactctttcagtaatttttgcacatttacctccttaacccgatcagcaccaaccctcattatcctgcatcccatgtctccttaacagttttcttcgcaccaagtgtcccccacatctctttaggtacagacctcatcaaggcacccattgcatgtctgtcctgagaccgtttagcactggtccccggatctatcacctcccagatctccatagcctcataattgatttgcattaacatagcccattccgcataattggaacgagttaacatgggccataccagggaactttctttgatgccagaggtcgccgagctgggtcctgtacgggtgtcagccatctccttctcgaccggcgaccgacgtgggacgacgcgcttctttctcggaggttctcgcggcgggctcacagatccgccgtagaacatccactggctccgataccagttgttagaacccaaggctggtggcggaagatcaacgatggcgagaagaaacgacggcggcggcgctgcgtggtgactgcggcgagggtttgtttctaggcgacagacagactcaggtttggcctgcaaataatgtcgtgccttttctgtgtgcaattcaacagcaaataaacaactgcaagatacatgggcttgaagcccgatcccccgtcgcaccatgcgctccacgatctcctctaatttcggactagaccgtgggcatgtgcagcacacgac

SEQ ID NO: 203247 - DNA, 321 bp, Zea Mays
ctgatcatggctggtgactaaccttccctcatcctccaaatgagagataaaattcctcttcttgcggtggcgagcctgcaagtggaaaaattttgtgttggcatctccttccctcaaataatggacccgggatcttaaccgtgcaactgtcctttccaaagaagcaaggacaaggcaatgctgcttcaatttgcgcagcagccacacttcctcagacgacaacaccctgctgtcctgagccatctctatcctgtgcagcacctcacgagccacccccagctgagaactgacattgccgaccgcgttatgcccccaagattg

SEQ ID NO: 203248 - DNA, 320 bp, Zea Mays
tctacctttccaccgcgtcgtcgtgactctctatagccgtctaatcgtcgccggtgaagtcaccacgacggttgacacgaattcactacgccagtgagcttccccttcctccgaccgccgcgcgtcatcatccaaattcccggccgccgctcttgcttcctataaattgagccctccgtcagctccgcaacatcaccacgcacccagccacccagcattgccccagtcgatcaccagtgtgcccgaattttgggttttccccaattcggtttccgccgccgtgaaatcaagctcgccgtggccagcccaaatcaggtcca

SEQ ID NO: 203249 - DNA, 347 bp, Zea Mays
ctttaatcccctccaataaaacactttctttacccgttgataagttgcctgagtaccagaatgaccaccaatggcactatcatgcaaagctgccaccaacttggttctcagagcagaattagcaccaatccaaatcctgcctgccttacgaataatgccttgatacaatgaaaacccattctcatcaggaccgcgcaccaacaattgagctatcaactgttgagcttcagcatcagtagcataagaattcagcacctcctgtacccaaactggttgcacttcagaaatggcagccaagtccaatactgaactcctccttgacaatgcatcagcaacgacattttctg

SEQ ID NO: 203250 - DNA, 673 bp, Zea Mays
gtaagaaactgcgaagagcatccaaggtgcaaactgctaagaatcctgggaaaactgatggtgaagacaatggtccatgcccaaaagtagatgaaaaggaaatttttgaagcatatgatattgacagagatgaacccgagcaccgatatgacatgttttcctcgtatgatgacgatggtatgtatgatgacgatggtatgaatgttgagacaaatattgattcttctgacaacgaaacggagagcgaaatggatactgaaaccgatgacgaagagtctgttactattgaaactacagaagaggatgttccagtattagcatttttgaaagatgctgagagctcatctgcgttgaaggcatcatttggagctttgtcgggaataccaaatgtgctggaaagtgtcgaggaattaagtgatgctaaatgtgaagaaaagaccagcacttcacttcgttgttttagtaaatgcacagaacataagcctgtttcacatggtagacttcgtgtcttgccactttatgcaaagttatcagcttcacaacagcttcaagtgtttgaagatgtcccagagggggaaagattagttgtggtggcaactaatgttgccgaaacctctctaacaattccaggcataaaatatgtagttgatactggaaaagaaaaggttaagaa

SEQ ID NO: 203251 - DNA, 599 bp, Zea Mays
gcgagaggcagagttgtcaaacttgcggccgttgtcgcactggagggcacacagtggacgacagatctgggtggagacccaggtgaagaaatgagtgagggtgtgaaaggtgtcggacttgagccgcagagaagtctagagaatgaaagaaatcatctaggatgaccagatagtacaggtaaccggagaggctgggaacaagggaggtctaaaggtcacagagaatgaggtcgaaggggtgagtagctcgggacatggaggaagagaagggtaagcgagtatgatgcccaagttgacatgcatggcaaagtgaggtggcgtcgctgcgagggtacagaatggctgaagtggacgatagacgagagaggatgtcgtgcccggggtgaccaatacgacgatggaaagtggaggcaggggcagtggaggcgagggcgtagggttggacaacatgggcggaggaatgtggtgcgagaagagggccaaggggggactcctatagagccaccaggaggggggtggaggcctgggacgacaatcatgtgaggtggaggcgttagggaggcaatcacgaccttgggaaacacaagaggccccaaagc

SEQ ID NO: 203252 - DNA, 328 bp, Zea Mays
cgctgtttatggccaccagaacttgtcagtcagtgagtttctgttgccttttgttttcttgcgcctcgtgccctccgaatatgatgttaacttcctggtcgatgcgcgggaaggctccacctctacctccctcctgctgttgaggctgccctggctcggcaggctctcctcggggagggggaggtggtaccgattggaatggtcgaccatgcccgacagagtttttgaaatctctgcagtttcgtagggtgtgtcgcatgtccctatggtatgggcactaggagtcgaggatcacgtctagtgaccttactccaccatagggtgcgct

SEQ ID NO: 203253 - DNA, 987 bp, Zea Mays
aatttcttgttcatgatttccttatggaaaaactatcacgagaaacaccaatattcattgtgtcagagggtagcgagccacaattttttactagattcttcaattgggactctacaaaatctcttgtaagtagtttatgtgtcatgcacttgcttattatgaataaacacaaattctattccatgagatttatacatatgtatggttgtctgctatgtagctttggaaattagattcatttttacacttttgatttttattttttgttgcaggtgcatggcagttcataccaaaggaagcttggtgtcctaaagggtggagcacctccaacagtggatgtaagtctaaacaaacgatcttctagtagctcggtggaaatcatcttgtactcacatatgaattcagtatcagtttatatcacaatatttggttgcaagtttttattcatgatctccatgtttgttgatactcttgcctttctcgacactaataacttcttatgcgagtatataaataagcacaaattcaggtttttagcaatgtaagtagaaccagtatgtcaattttatgactgaacctcaacatatatagatttatgttccatagaagaactaccgggtggctaaactaacatctgaattgcagtccttctatctaaaagcaactatcttactatgaccatgttttcagaaaccaaaacgacgaacaccagcatttacaggaagaagttcaggacaagataaatctcatcgttcaagaagcatgtccactagcccagatcgtccacgtgttcgtggaaggtctccagccttcaatatgttaacttctgcctttgagaacacgagcaataccaggaacctttccacccctccccctgttgtgagaaagcctttctcaaaatctggatgtcctgaacactcaagggtgtcacccaaaaaatcagctatcagttccctcaccaggtcttttgaaggtcacatgaaaagt

SEQ ID NO: 203254 - DNA, 311 bp, Zea Mays
gatctactggtattgaccagccaaacaaggcagcgagggcctccacctagatctggttaagagggtggttaaaaagaacaccatatttctgcaaggcttccttattcatatcttcactttctgtgatgatttgcaagaccctcatagcttttctggaagtcctgcttctgcaatcatacatttcaaattccacactaatgccggcaactcttctgctgcgcctgggagcattaatcacctgagatgatgcagtcttcagggaaggcttgggagctgggagaagccctgccgtcttcctgctgatcttgcag

SEQ ID NO: 203255 - DNA, 331 bp, Zea Mays
gtcagatgttatatgcttctactatcacatgcttagaattttctcatcacttaacccttctatcggtgcaatgcctattctcaacatgcttgcattctcacctggatttctagttgatttatgggaggcactagaaatgcccatttttggtccacctatccagaattcacaagaaacaggacacgagaaacagttggctacaagtagttcaggtgtgcaagtatcctccatgaggcaaagaaggaatgccaaggacacagcaaacaggtggtcaaatgtgctccagaagattactggaaaatccaatgattcagaggagggcactttatct

SEQ ID NO: 203256 - DNA, 380 bp, Zea Mays
accggacgagctgggagccggagcgaggtggtcgcgcgcgatgatgaacctagaagcctgcacgaccacagatctgggggcgctggttgcctgaaacagaatcagcggcaggcagacacgagtgggttcaggggagggcaaggaccagacgatggcgagtcggcgagatggcgaatcagtcggacctggtgtggagagacgacgactcggtgagcagtcttgctgtggagggacgaggacgacgacacaatgaggtggtcttgctgtggatggacgaggatgacagtgcaacgaggaggtcctgctgtggagggacgaggatgacaatgtggcgaggtggaggaacagggacggcgacgtcatggcgagatggagggagg

SEQ ID NO: 203257 - DNA, 651 bp, Zea Mays
atcatccttgggatcactgtttgggatttcttcatcagtacctgtatgtcccacatggttaaccaaactcatcacatcctccatattgccatcaaaggaaaacaatggtgtcccatctttctctctgccgtgaggtcctctcaaggcaaccatcatgtttgatttccaccgaatggcatccggcaatacagtgctgtcccttataaactttactatttgctcttccaagtcccagcgtttactcttgttaaaacctatcaacaatgatgttattgtaaccaaatcaacactgaagccttgctgctccatctccttcaccaactctacagcctctgcaacttggtccccaatcccctccttgcagaactccctcaccatgatactataagcaattccatccaacagttgccctttcctccttagctcgtaaaaaagccgacatgctgcttctgccctcccattattaaacagcccatctatcacagtgttgtgtgtgcttgctgagcattggattccatcagccaccattgtctcaaaaaaactgcatgcctcatcaagcttcttcactttaaacagcccatcaagaagtgaattgtacaccaccacgtcactcaccccaatgatgccccgcatctcatgaaacacacgcag

SEQ ID NO: 203258 - DNA, 1025 bp, Zea Mays
atcacctacccaggctccgacaacctttcttgaggcggttatcaagggacccatcaaggcaacctgtcccccggcggtgcagaaattcccggaggttcacggcttaaagctagaggctttacgtcagtcctctgctccagaagctgagcgctgtcctgctactcaatacagcagggacgaagaagggtggcagctcgtggaacgcaggcggtctcggcaggttgagcgtgagcctcgtcgtaggccccctgtggatctccgaggcaagtgctataagtgcctgtcgacctctcacttcgtggcggcgtgccgtagaccccctcgctgttttgggtgcctacatcttggccatcgcgtggcacagtgtcctacacacttcaagaaagagaagaagccgctcaaggagagactgggttcgcgggcgcctcgcacctcggtttggcagcgtattgccatggaagacggtggccaggccttggctccaactcaggcgaatccaactcagttgaatccaacgaagcttccggtctggcgtcgtctctcccctccagtgtcttcagaggtaccccctcctctggccatggcggatggcagtgacataccccataagagaaaaaggcgtcgcggaaaagggggtcgggcagacccgcaagtgaagcatccctcaggatcagttggagaagacgacgttcgtccggcaacggccactcacaacatggttgccaggccttcttgtgtattggatttttcctccgacatggcacgagaagaggcggcgcttcgccgcgctttgtttgtcacgatcattggtacaaggccagaggtgttaggctctgaagtcattgaagaagtggcacgaagttttgagatcgaggcagattccatgtccattcatcagacctacccggaggacttcatcctgattctttcggatgaggatgctgcaacaaaggtgctcaatggaggaagagttcttagagggcctcagtttcatattcagttcaagcgctggacaagactggctc

SEQ ID NO: 203259 - DNA, 558 bp, Zea Mays
acaagctcctgtctcagtacagtgagtgcatgcctgcacaatattcctttggattggtacaaacggcagaggcaccatatgtcaccttgaacattatcataagcaactttgtagtctaccttgtttgtttgatcgacatgctccgaaactatgtatgtaaccactgactcattccgttcaagtatattataattgcaatgaaatgaatgtcctatttcattgaagaacttctgaaagatttctgcagtgtacacctttgctgcttgatcttccacaggcaaccccgtcaccattggtggcctcatctgagctgatcgtaaatcttcgtaagattccttttctaactttcctttaacagcttcctcatattgctctacaaacattttcaaagaggttcctgacatcaaccagccatcaaaatagtcagttacactatcacttctgtctgtgacagacattcctgcccaaaatgaatccttaacataaacaggagcccactgcatcctgacctcatatagtttggacagccattcatttctctccaaacgaaaatgttgg

SEQ ID NO: 203260 - DNA, 310 bp, Zea Mays
cccagtatcaccaccgacatcgcctggccacctcccctgccgcgccagcccccgagccgttgcgctgaccctaactccgtcacggtccccgtgcctcccttggctctcttctcgcatcccttgtcttcggcgtcccctcctcccaccgactgggtcgccgactctagcgcctcgttccacaccactcccgacccagagctgtcgctttcccccacccccataaccccaccttcccttccttcgtcattgtcggcaaatgggtcgactctgcctgtcacctcagtaggtgacacggtccttcctggcacgt

SEQ ID NO: 203261 - DNA, 284 bp, Zea Mays
gccatttctggccgtccgattaggcgtggacgcgcgagattagatccgcaacggtgtgaactggtaaggaataggcatcgtccgatcgaggatcgatggtgggattgatttgagccgagaggaggccaccagatctaatcctagccgctattctcggatccaacggttctaaacacccttccacccatcatcgcaccagggccatccattaagagatctacggtcctggcgcgccatcaaccacgagctcccacgttacggcagcacacccagagccacggcgg

SEQ ID NO: 203262 - DNA, 308 bp, Zea Mays
ctttcctcgtcttcttcccctcaattgccttggctgatcgggtggtctccggggggcaatcccttcatgccccttcgctcaggttgcatatttgaaggtggtctcgtcaggctttcgctgttgtaagtggtcggccgctggtgcccattggcgttgagctacgtggaattcctgcgcatctctgggggattgagtctgcggaggctgtgcttggtgcttactgtttgattcatggactgttacccgactcagtcgcggaggaagacatgtctgttctcagagggcctgtttggttgcctgcatggctg

SEQ ID NO: 203263 - DNA, 402 bp, Zea Mays
gcacctgggcaagagcacgaggtggcaggccataatgcacttgagcaagagcgtgaggcgataggctcaagtggtcctatgctagagctggaccacaatgcatttgagcaagagcgcgaggcggcagaccacaatgcacctaggcaggaggacgagctagcaggccaaggttcatcgatgcgtgatgatgatgactatggggaggactacgatggagaggccgatgacgaggttgttacaacgacacaggcaacgaacttcaggtatttttattttgacgacgagttctattttctgttggattgatattattacccgtgcacaatttacaattttgtaggtttcggcggtcccttagagttccaccgacacgacccttggaccaacgtagggtcataaacc

SEQ ID NO: 203264 - DNA, 291 bp, Zea Mays
ggcggcttcgaccgtggttgcggaaaatgattcgggtgattctgtgtctaagttttttgagtctgatgattctgggagttcggtgatgtggacggaagagtcttcggatgatgatttggattattttgcggcattggatgtggctgctcggaggcctctccgcgtgtggtgggtgctgaagttcccggtccaagtgttgggtgtaggcgtcgaagggcggtggtgaagcgtagagtgagtgaggtggagggtggtcgacttcgtgtggacaggactggcaagcgggaattg

SEQ ID NO: 203265 - DNA, 956 bp, Zea Mays
gtaatatttgggcatgtataacaacttaaacgtgttatgtgcagcgaagcatgcacaaagttcatgtcactttgccagcggcgtcctgacatcagtcctcaaactgcacagccagcagtttcatcacactggaaggtctttgacgatgggaatgtccgtggttcttcgagttcagacatgtctatagatgaaccactagttgatctcagtgaatccaagaacaaatctacagtcagtggaagtggctctcaggtccacagactaagcaacatccaaggtttagaatctgctgcagcacagcaacccaagccaaccatccaacaagcagtagataaacaagaagcagaaacagatgcgtctcctgcaccttctaaaggagagctttcaaggcggctgagtgtgaaggacaggataaacatgtttgagagccagaaaaaggagcagactccaagttctggtaacagcaactctgccggtactggtagagtggttccagggaaaggtgagcaccgcagggttccttctggcgcctccatggagaagttagttagaaggtggagcagtgttagcgacatgagtattgacctcagcaacaatgagagtagtagcttaaatgacaaaaaggataatggaactcctgccgggactccaacatctactgatttggaggccgactctaaagtaagagctaatgaggactctaatggacagaaggattcaatcacgtcacactcttggccttgtcaaaaggataatgtaccaatggatctggccaccacagatttgtgcccaccctcaattttaagtaatacacttgctcctcataaagagagtatatatggtgatggtgcagaaaacgacatggttatgaactctagcattgaaagtgaagcatcctttgggaaagaaccgggggttattcaaggacacacaaggatgtcaaatcatgctacttc

SEQ ID NO: 203266 - DNA, 444 bp, Zea Mays
cgttctggtgatgggcttcggtcaaactccaaattgttgcatccaggagcaataagagatcacatactaactaaaacaaagagtaatttgatcattactgaccggaggagcgctggccacgatgaggttgggtttcaggtgtgcttgaaccgaattggggcgaatgcaaaattagagctcgtagggaattggctaggagcaatacttggtgtgggggtgcacaatgatattgcgaagctagtcacgagctcaatttataggtagcttcgtcggtggcacttgaattgaggatggcgcggtggcggccggagaagaagtgagtcaccggcatggtgattcatggcagttcacgggatgagaagccacgacagtcactgggtaatgatcatagttcacggcgacgtggtcactgaccggaagcgtggcacaatcgcggcggaggat

SEQ ID NO: 203267 - DNA, 405 bp, Zea Mays
gggacgttgggggtcgaagcagacgtcacgacagggaggattgcgatgtgtgtggcaggacggtcgggctgatgaagttaccaatgaaagatggccatgcgaggattgtgggtcattccgcgcgtggggcaggtggcttaagggtgggattcgcctcagtgtctcacgcgcgatgacggttcagcaacggtggacatttgtggtggctgcaagccagatcgagcctgcaacacctggcacccggcaatacgctgctggtatggctgttgtctgaacgcacacgactttgaggggacgagggggatgcggcttctggcagcgtggggatcggcgagaagaagctaagctacagcgagggcgtcgccgccgcggttgagtgggtcgtgggaagcagagcacgaggat

SEQ ID NO: 203268 - DNA, 424 bp, Zea Mays
tttttacttagcctaatgtgagcaactgagctgacatttaatttatcttagggttacatctgcaacattattgaagctggttgttttgtccgtttcctcggacatttgactggtttctctcccaaggacaaagtaagattttttcagctccatcattctttttgttgttttgaaaagaatgtctaatttttcttgtttcacaaaggcagttgataggtggatagaaaagctttctgatgcgttctatgttggccagtcagttcggagtcatatactcagcgtatgccataattgttggtatatatttgttgccatcctctattatctgtgttatttagaatcttctttttgttcctccctgttcaggtaaatgcagaaactgctagagtaaaactcgcacttcaacagtcaatgtgctcctcaa

SEQ ID NO: 203269 - DNA, 287 bp, Zea Mays
aacagacatcgcactcgccaactactgcatcaattctagtggaggatttgatagaatttgagacatcaggtctttgaactctttctttgcctcctgcttaaaataatctgacaactcttctttgtatcgatcacgtttcttgtacaaaccttcccactgtggtatgaatccttccttccatccttccttagacgagattcctcatacacggccaggatgctcagggttaccgagatcagccgttaggatgtctctctccctttatggcttaaatgatccttggctct

SEQ ID NO: 203270 - DNA, 444 bp, Zea Mays
tagccataaaaagccacgaaccacgccctattgtcccaacagaacgagggagagggtcagcatcattgctatgcgagcagagatagaacttgaaccaccgtgccgagagttgagagggtgaagctgctgcgtataggagagagatgaagactgctgctgcaggaatcgctggccgccgataccgatcgggaggccgggcacactgacgtcaagcaaggtgcgtcgagttaggggagtgaaaggagtagctgtcgccatggatgaagcttgtcgggccccagccgtggagtcctcctgccgcgctgagaacccgtaatgctccctggcctcttgtttttcgccgcattgctagcctcccgtagcgactccttgcactcgatgccgaactgggatgcgccactgtgcttgctggtttggaggaagaagataaccggtacaccgttg

SEQ ID NO: 203271 - DNA, 399 bp, Zea Mays
accggatatagcatgtctatcacattgaaataagacaacttgcaagtagagggacatcacaacggaagaagagcgcgatgatgagtggaaggtcattttagaacttatggaaggatgggaaggacacggagcgggtgatccacgtttgcacgtgattgtagtgctcattgacaccacatagaaggttgaagacgactagacgagcgtacgattagatacaggctctctactgcttgcttatgactgagctgaccctcatgatgatgctgtgatatttgttgtagaatggagaagtactgattgcttttatgttgttctagaatggagtaaataatgatgatgttgaaaaatatttaactagaaagtaagggttcagtttccttttatgtttcaaagttc

SEQ ID NO: 203272 - DNA, 379 bp, Zea Mays
ggcgttccgcaatcgttttgttgaagtgcatgttgatgaaataccagaagatgagctagccacaattttggagcagcgatgtagaattgctcccagttatgcgaaaaggatggttgaggttatgaaagaattgcaaacacatagacaaaatagtagagtgtttgctggcaaacatggtttcataacacctagggatctatttcgttgggccaatcggtacaggacatttgaagggaagtcatacgaagatctggcgaaagatggttatttactgctggcagagagattaagggatgtcaatgagaaagttgttgttaaagaagctttggagcgtcacctacgtgtaaaactcaatatagctgatttgtataactcggta

SEQ ID NO: 203273 - DNA, 430 bp, Zea Mays
aatggcccttcccatagtggtgacaatttgtgccgtccttctcccgttagaattcggcgaaggaccaagtctcccactacaaaggatcaacgtcatatagccttatcatgatagcgcctcaaggtctgctggtatctggctaactaaattactgtgttcaatcgctcttcctccagcacatcaatatcctctagcctggtagattctacttcagctatgcttttgaagaccagcctcggtgccccgaacctgagatcggcaggtagcactgcctccgaaccgtagaccatgaagaagggggtgtttccatgcagagcttgactgggttgagttcttaggctccaaaccacataaggtaactctcttatccactttcctgcgaacttttcattcttgtcgaagactttcttcctaagtgcttccagtatca

SEQ ID NO: 203274 - DNA, 315 bp, Zea Mays
ctcacgcccgcacgctcgctggaaggtccttgattgagctgataatggaaggtcaccatacacggatggaggacgcggatggaaggtccgtggccaaatccgatttgccccctcgcccgcgagatgccgccgcccaccgtgcccgcgattccgccccaatcacctctggttctcaagtatggggaggaagggaaggtggtggagcgagtgaacctcgccactcggcagctgcgcctactgccgaagcccgttgtccggatctgcggtctcctcgcgctcgacgtctcccgcgaccagctaaaggttagatactcg

SEQ ID NO: 203275 - DNA, 289 bp, Zea Mays
gcttgttgcactccgctacgttactgcctccgtgctctacctcaaggcccatcactacggcatcatcatcaccctacatatgcctttgctttgtgcttggtatgtcacccactccactccagtgacctattaaatgaaacaccatgccaggttgtgccatggtcgtagagacaagtgaaatgacattatcttgcttcatctttgacgccagtggtctatggaggtcacatgatggttcggatgagaaagtctagttgctttgtgcttggtatgtcacccactccactcc

SEQ ID NO: 203276 - DNA, 310 bp, Zea Mays
caaagaagaagaagacaacagatgatcgaaggatgagtgaagagaacaacgaggcaagcaggctatttataaaggccgggggtgaccatccacttcccaccacgctcgccgaacagacgcaagtattcaataagcaattcaagccgcctgaaaacgagtcaggcaataggcgccgcttcgcgtaacacgacaccgtttggaccaagctcaactgctcaggcaatatgattacaccccacggtcacatcaagttactactccaggacagtgtggtaaacactctgcgtaccaagacaccccttgggcacac

SEQ ID NO: 203277 - DNA, 361 bp, Zea Mays
cttctgctgggtgaacctgctgctcatctcccggcgctacggcgtcagcttcggcagcgccgtcgcggagtcccccgtgtcgggctgcctcatcgtctacaccttcgtcacggcgtggttcgtcggcgggctcacggcgttccactcctacctcgtgtgcaccaaccagaccacgtacgagaacttccggtaccggtacgagcgcaaggccaaccccttcaaccgcggcgccggccacaacatcgctgagatcttcttctcgccgatcccgccgtccaggaacgacttccgggccaaggtctcgcccgccgacccggacgccgccgcgctctactacctcggcccgctgtcgtccgagtcc

SEQ ID NO: 203278 - DNA, 343 bp, Zea Mays
tcaaaaactctacactctatggtggagctactctacgggtggagtagagctaaaaatggagtagacctatcccaaataccacctacatatccattgagatttctatttgatgttagcttattgtatatttgtattgttgcctattctagaggataaaaatctcagtgattgtttggaactcaaatctcctccaattcttagagggacttgagtttccaaagtagtcccttatgtagacagaaggccaactacataatagcatatgccatagaaattttactttttttgctccacgagtgggcttggaaacaaccgactatggtgccttcccgtctctttttcc

SEQ ID NO: 203279 - DNA, 536 bp, Zea Mays
gtcatgacatctaatgaaccaacagtgaggagcaggccaagacgtgaaaagaggcccaactcaaggttgagtgggctggaatggacccactagggtgtgtgcgttctgtttgccagtgagattggagaggggattaaaaagagaacaggggaaccttgagcgtgtgtggaggattttggagaacccttggccggctgcgtccggatggtgggctaatcagccctgtaatctccaccatactctatatttctgagatcttcgtgagaggagaagtgtgccgggagcggtgcacatcccaccccaatttagtgttctcacaactggtatcagattcatctgtccgatcctggcggaaccaccaagctacgtgctgcgtccgcagtacaaaacccgcgcccagaagcaatccgacgccatggagcaaggcatcgctgaattatccaagctacttcaagcgatgcagtcccagaatgaatcaatcaagacagctctggaagaaaatactgcagcagttcgtgatctgtcctcttggagac

SEQ ID NO: 203280 - DNA, 339 bp, Zea Mays
tgtttaagtaggcaggagaaatttagatgtaagtatttgaaacaagagtatcgaagaatctaggggtacgagtatgtcaataccaagggaataaagatagccaaagggtagaaatttaatgatgggagagggaagaatccaaacagataaaaaggttattgtcaggggcatctacaaagatgtcgcaagcacaagagtgagattagatctaataggttgagaaaattatagaatatactagaataaaatacttttggcaagggggcatataggagcacaacatagaattagtcgaggtgactaatattttgaaacaacatcaaggatgaggtgaagtaa

SEQ ID NO: 203281 - DNA, 440 bp, Zea Mays
gcactcttgctgatcatcggtgtgggcgtgtgccatgtggcctcgaaaaggctcagttcccatcccacccatcccaccccacggtcctgcaaggcgaagcatacgagctagtcctcggcgagcaactcagcaaggggaagggctgatccaatacagtggacctacatctgcatgacaagacgtgtcaccaccaaagcatgttcggaccacgagtacggtgtcgagaagtccctgtcgaacacgacgacacgcccacgcgtacagtctctagcgtagccccgctgacttgtggggccactcaaccccaatcgtggggacctcagcatcgaagtctctacattgacccacgtactagtaaggacgggacgatacatcataccgggtgtatacctacacatgctggaaggtgacgcgaggtccatgacaagagacgaagctgc

SEQ ID NO: 203282 - DNA, 499 bp, Zea Mays
ctgatgctctgtccagaagacccaatatggatcaagatacagccaatgctcatttgaacacagtatcaatgtctactattacacccgactggttgctgcaggttactcaagggtatgatcaagacccgacggcaaaaaaaatattaactcagctagctgtgggtggtcaactggcacactatacaatcacccaaggtgttattcggtacaaaggaaggatctggctgggaagtaaccaagagatgcatcagaaggtgatgtcggcattacatgatagcgcagttggtggtcattctggatttccagttacctattgaagaattaaatctaattttgcctggccaggaatgaagcaccaaatccgtgaatttgttcaagggtgtcagatctgtcaacaggctaaaccggaaagggttaaatacccaggattactattgccgcttccagtccctaaacaagcatggcaaacggttagccttgattttatttctggacttcc

SEQ ID NO: 203283 - DNA, 445 bp, Zea Mays
gttgggggagctcgccggacttctcagccgttggtgcggtggcgctgccgtcgcggggtaggaggtggaagaagtgttgtgagccgctgatgtgcagatgaacggtttagattaaaacggggcgcactacttcggctaggcacgtggtggccatctgatcggtgatcgacgggtgggattaggactcggttattttaaatcacgaccgttgagactagatcggacggtccgaatcgtgtaccggttcgtatagggctcggtctaatctgcgccctcgactttggatcggacggccagatttggccagtacccccttcgcgatggccatttcaccaaagagcccctgtagtcgttaataattgaacccgcaatccatctggtgggtttcctgtgtctcggtaacacttgcactgagacccctgacctttctggaaatcgaggccca

SEQ ID NO: 203284 - DNA, 536 bp, Zea Mays
atctgtaaattcttgggccatcgtgcaattacttaagaactgactaggatcgcgggttgattagccaattgttcagggtctcttttacaaactcacccgctccgaaggggtatggggtcacaagagccgtccaatcaccatcgaaccaccctgatcagaccccgagggtttatgaagctgtaagcaatcaaggtcgttggatcaacgaccaggcgcctggattttaagtccttaggtcgattatcacgcgccggatccacatcggacgaccgagaagagttcaggccaaaccagaatccgggatcaaatcccagcccttcatctgggattgacggcccatattccacccccatcgcccaagcctggtaacggtggcgctgcctgaggccacggcgaggcatcgccggtgagcctactggatggcggtcctgtgctctagatcccaatccggggagcgctacacggagacaagatcccaacaacagatataggttcacgtaccaatggtgaggatgccgatattctccgaccacggc

SEQ ID NO: 203285 - DNA, 322 bp, Zea Mays
gctgtttcatgcggttgcgtgcccgaagtaggtgctgatggaccacacgagacatcaactcgcgttgtgatagccacgtagacaaatctgaatttgcgatggaatccacaggtttgatgcccagctgtcggggagtgcggccatacagaacctcgaatggggaacgacccaatgctgaatggaagcatgtgttgtaccaaaattctgccaaatggagccattgatgccatttagatggacaggtatgcacgaagcagcggaggaatgtttccaagcactggttgacacactctgtttggccgtcagactgggggtgataagc

SEQ ID NO: 203286 - DNA, 449 bp, Zea Mays
accaaattcctcattaccctctcctcatatatgctcgacttgtatgacgctggtaacaaacctgacagcaatgcaccttgaagggcactcacagaagctcctgacaaagcactagaacttggcagtacatctgtatcatctaaactcaatctcattcttgctgagtgtcttttgtcaacctctgtgatatctgtttgtaagcttccaagctctgccgataacttggcagactgcatcgccttttcttctttcaattgagaaaggaagttaagtagcaaactagattcagtgtcatcttcaccgatggaaactggtgcctcatctaacaacgacaaatcctgacccccatttatcaagtcacatccaagaatctctctgaaaaaacagtatgctggctgttaggcacgaacagccatataattattatttccagtcttcagacagcaaag

SEQ ID NO: 203287 - DNA, 272 bp, Zea Mays
ggggacttccataggcttattaattccttggatctaaaagagattcatttgaagggaaggaggtatacttggtccaaccagagggatgctccaactcttgttaagctggaccatgttttttgcactagctgttgggaagatctatttccggacacttctcttcatagtaacgctaccacatcttcagatcattgtcctttgaccctcaaggtcagagatggctgcatggggaaaagatggtttcactttgaaagtttttggcccaaaattcc

SEQ ID NO: 203288 - DNA, 452 bp, Zea Mays
agatggtagagcagagacgattctaccgacttgtccacccgtattctgtttcctcctttgccacactttgccctgctgccaagtgtaccactcagggaagtcatgatacaggatgccccgagcctcctcgtacagcttattcgcctcaaaatatgttgtaatcattgacctatcagcacctggacggttgacgactcgctcgaccatttgtcgctcgtgaaacgtcaccatgtgcatgttgggaagatggagttgcagctgcatcacagatggagagttctgactaagctcaaatccatatatcctccataaggcttccggaggagtcacccaccttgcatctctatactgctggatctcatctacatcaccattttccttactcgcatctctcataacaacagacgcacgatcatggcctttgtatatgtacttgaacaggtacttaacag

SEQ ID NO: 203289 - DNA, 303 bp, Zea Mays
gaatagaaacatcagcttgcaccaagcgagcaaaggcatgattttggagggaaaaatgactacaaaagagtcacatattaaacaacgagaacatgtactcgagatccttattttaagtctgcgttcattttacatccaataaaaagcttatctaagcggtcatggagtagtaacgagaaactcgaacccatccctgcttggagacttggaggaatttttggaggattgatgatgatttgggttatggttcactaaacgaggacatgacctagcttagggtttatgcaaacaaactacctacat

SEQ ID NO: 203290 - DNA, 416 bp, Zea Mays
cggaatggtggggtgtagaaggtgtcgacgcaacatgcggttgtcgaagtagacgaagtaggtggtgacaagagggtgtcgctgatgatgtggttgtgttggacgaagaagcagtgtgggagcggacttgtcgaacccaaagacgagcaatccaagtgaaagaggatgctctagagtgagcagtccgcacacaaggtgtggtggtggcggtagatgagcagcgacgacctcacgtgcaagggcagcggcgacctcgcgctcataggtagcgctccaagtcgatgatgaagatctgatcagcaggataaagactgtgttcatatggaattatggagggtgcaacaaagattgctcaacatggtcgtcgatgcacaggggagggtgatgtagatgcaacggtggagcggatgcatgat

SEQ ID NO: 203291 - DNA, 318 bp, Zea Mays
cctccattggtagctgctcctcaggtatcctgaggcacttctttagttgggatacatggaatacatcatgtacatctgctagatgatcgggtaattctagttgatatgcaacttctcccactcgcattaagatcaagaaaggttcaatgaagcgaggggacaactttcctttgacttcaaatcttctcataccctagattggtgacactttcagatacacgtgatcaccctccttaaactccagtagtcttctccgggtatcagcatagctcttctgccttgattgtgcaattctcaaattctcccatatcattcgaa

SEQ ID NO: 203292 - DNA, 280 bp, Zea Mays
ctccgactcggtggccgcgccctcctcgaacaggtacccggagcacctggtgaatgcgtcctcgtcggagctgacgacgatggaagcgggcgcggaggcgaggggaggcggcaccagccgccgacgtggccgaggcctcccccgcagagcaggcgcagggactgcactgggctggaggagaagcatctgggttttcagatgatgcggaggatctggggagattcgagttgggaacggaggctctgagtggagctgcagcgagcggggaagacgaaactgg

SEQ ID NO: 203293 - DNA, 1139 bp, Zea Mays
ggtattgttgttcgtgtgctctcccctattttaaggtgccgatgtgatgagccatgatggttcgacttggaccgacgtctgactattgctggtggctcgtgcaggaacaccaccgaaggggacgacggcatggccgccgaagccgagcgacgatggcagcggggcaaagcagcgagagatgggaggtcagatgaagattagtgcaatgtgggaggaaggtggcaacaaaacaccggcttcacctgccagggtcgtgcaatatgaaggtgtgcatctttatgggcactgaatagcgtgatccagtcttctggtcccatatccatcatttcaagatgtgcttacattgaaagcgaatatttagttttgtacatgtgctagcattcagctggtaactgcttgattgttgtttgcagtagtaccagatcctatcaggactataggatactaaaaacagaaacttacatggaaggaaacgttatgatttttcacttttcaggtctcagaagtaccttgtgtctagcgactactgtaccatctttgttgtttccgtctaattctactttgataacattaacatcaagaaatttgttgcgtagctggatatggaacataactgtgcaagcgtgtcatgaataatatctccttgttcctatacttgccatgtgttacttagagcatatctaataatgtatgtataattgtctgtattcctttcaatgtcacctcaatagtagtcaaaatgtgcaagcccaaggatacatttccattttgtgataaagtggtgatgatgaactacggaaaagtgaaaacacaactaaagtatgatcatgagggagctcctgtcaaaccttttgttatggtgcttatggtgaatgtgaacatatttgcactggatcatctcgttaacttctatgacagtgttgtagtgtttatctttctgccctccccagatgtgtttatatatattgctttattgtaaattaaataattatctcaaggaattttggttgctgctgatcatgggattcttttttaagtcctctatagctatcaatcttttagctaatagataatgacaaggtaggtggattgtgcagcttctgatgttggtgcggatgatgcattaggcatttggaaaa

SEQ ID NO: 203294 - DNA, 339 bp, Zea Mays
tgttgccaaaaagggggagaaggtttcttatcttggcagtaccttctatttatgtaatgaacatcggtttgtaataattattagtctatcttgtgatgcatgcatggctctgaagccataaacttctttaatgatgtgatgagatgtgatatcattattgtaatagcagtagtaacttttcatatcttatgctatgcaataatgagcttgtatgtgtaattttactctttctatcatcacactctataattgtgtttcatccctcattgttttgtgtatggtgttgattgttcactctctctaaatatattgcaaattgacatatcaagtcaatgttaa

SEQ ID NO: 203295 - DNA, 308 bp, Zea Mays
gagagcgaggatagtaaggtcagtgttggtaatgctacaaaacaatcacacgatgttgtgggagtaggcattaactgtattttcaatcatgtaaaagtgtcaactgaagccgatcttgggacacaaccgggtaggctctcttatctacactcctaaatgtaaatattgtcttatgagtactcctaaaaatgcttttgtcaagagatttatgtttcattcactcctcatacagatgtgatacacctgacatctttggatgttccaaatgaatcaagtcaaataagttttgatgcggatatggtagagca

SEQ ID NO: 203296 - DNA, 351 bp, Zea Mays
gaagccttcaaattgccaccaccagcaaccacaatgtgccctcctgatcccaacaaattggatgacgcctctgcgtggtttccttctgctccactgcctcaactttgtttgtttcctgcatcaattgctcgcaccaactgtcaaattgctgccacccctaccctctaagtccctctgctactgattcccctgcagctgatctctgcgaaaattgtcctcagccatccttcacgacctattctcacagcagttgtcctcctatacattagctgtactcgtcctccatttttaacggtgtgccacctgccctcccatgcttctgctcgtggcatcaatttattgccatcaaat

SEQ ID NO: 203297 - DNA, 517 bp, Zea Mays
ctatgactcatgtcctccgatgccggtattctctcctgatccactcctacacaacaaccttattccattattgtcggtaacggaaactctattcctgtcacggtgtcacgtccactggtcatactgttcttcccaactcccttcaccttaataatgttcttgttgcacctaaccttattaagaatcttatttctgtgcgtcagtttacttccgacaataactgctccattgaatttaacccttttggttgttttgtgaaggatcttccctctcggggagagatcgtccgctgtgacagttcggtccgctctactcgctacggttttcagcttccgcctcgcatgtcgctgtctctccatcattgtggcatcaacgtcttggacatcctggtcgtgaagttatgtctaaactagcacacactttagggctcccttgtaataaaagtgctgctagcgatactctatgtcatgcttatcagttgggtcatcacatccgtcttccttttagcatgtcgtca

SEQ ID NO: 203298 - DNA, 886 bp, Zea Mays
gcagagggtgttgggatttgtgtttgactctcttaatcctgcagtgacgcgagaccaggaatataaggttacctcaaatgatttgcagtttttttggccccttttcaatggtcatatttgttatattttttctttcccttttactttgcaaccctcaactggatactgtgtgtacactatttcgaacattatgaatcttttattgtgctatatgggtttacttcccattgaagaactattgacatcctgctttcttagcaatgttataactacagttatgttgtatctttatgaccaggctggcgctcttatgattgttggagtacttggaacccgtgcgactctagcgcctaaacttgttcaaaatttgattcttttcgttgcaaggactgcacaacatgatgcattcgagtcagttgacttgccatggcttcgtgtttcagtgatggctcttataagtcttgttcaggtttggatttaacttattgtcattcatatccttaggaaattctggcttgctatgtaaatcattgaactcaatattggtgatgctgaggtagaagtattgataaatgtctgctaattttacagtcccaatctgtccatgttttccctaagaagccactgatggttttgaaagacatcaggtttaccgttgttttcccagcatacacattatatatttgctcctttctgtttctcctggtgttgaagtgttaaattcctatggtaaacttttttcagggatttttctggtatactttctgtattatccagtgaatacaacatcgagaaattcattaggctttatgttgaatcattaattgactacaggtgattttgcttatctgatgtaattatatttgcatatttctctctggcattg

SEQ ID NO: 203299 - DNA, 277 bp, Zea Mays
aaaatggcaaggctgagcgtgtcctccggtccgtgaacaacattattcgctcccttctctttcattaccatgcccctcatcctttctgggttgaggcctttcacaccaccgccacttatcttttcaacgccaccccgccaaaaccctctctttctccaccccataccaggccttgcatggtacaaccccaaactgcaatcaccttcacgtctttagctgtcgatgttatccaaacctctccgccaccacgccacacaagattgctccccggtcttcc

SEQ ID NO: 203300 - DNA, 308 bp, Zea Mays
tccggcatgtccgaccagtggttacagaggtggttgcgcgataggcggacgcgtgagctcggtgggagaagaacaacagtgtcgcgggcccacaggtcagtggcgaaaggcaggtgtgcgtgcagacttagtgagactggtgcgtgggcccaacggcgcagtggtagtgacgacgcagtacgtgggctgcgggggtggagctactgggccgaggaggggtgaattcagcccaaccgcatggtttgttattttttgtttcccactcaaattcataatttgaattcaaatgttcttatgggtttcacata

SEQ ID NO: 203301 - DNA, 323 bp, Zea Mays
ttattgtagaattagcctgtctgcaacttgagtgtcgccttcgtcttgtgtatgctaaacttactatttgtgtccgtagatccctttgaacaattgattattgtcttgtcatggctttttccgtctcaggcggtttctacgtgtgtttccggttacaaattatgaacttaaaaaatagcggctgtgcaaaacactatgtatgtataccgtctgactgtttcatttatttacagatggaagaagtcaaggaagctccagtggttagcgcacctcaaacagtcgtctcaagtggaacgtctgagttccatggtttgaatggggct

SEQ ID NO: 203302 - DNA, 373 bp, Zea Mays
accgactcaatgggcaagtactgcgcaactgtgcgaaaactggaaggcaagttcgaaggattggagttccatcacgtggaaagagaccgcaatgcaacagcagatgtgttgtcgaagctgggatcttcatccaagaaatatcacagccgagcatccttacggatcaggtagagaggaatgcaacgccttgagtcagccagaggcagatcccaacgactggagagagcctatcatcaggtacataaagaatgaagaagaggcggatgacaaggctgcggtagaacgcatcgcaagacagtcagcccactacaccatcatagggggcttactgtacaggagaggcgcaggaggagtcttcatgaaatgcattcac

SEQ ID NO: 203303 - DNA, 527 bp, Zea Mays
tcatgagcttaatccctcgatagttggtacaactttgaatatctcccttgttcttgaagattggtactaatgtactcctccactcatcggacatcttgtttgatcgaaaaatatgattgacaacttggttagccaaacaatagcaatatccccaaggcatttccacacctctattgggataccatccgggcccatcccattgtcccctttcatcctctttaaagcttctttgacctctgattcttggatcctgcgtacaaaacatctatttaaatcatcaaaggagtcatccaattgggtgtccatagtctcattctcaccattgaaaagattgtcaaaatacctctgccaccctagttacctttcaccaagagttgatccatctcatgcttaatgcatttaacttggttgaggtccctcatcatcctttcccaaatcctagctatcttatagacatccttctccccttcctttgtacttagtcttcggtaaagatcatcataggctcgaccctttgcctcactcac

SEQ ID NO: 203304 - DNA, 427 bp, Zea Mays
ttgctctatagatcgataaagtacttaaaccatgcctgtgttcaacatcacctatgatctttttaaatgaatcagaaagaaactcagcagcgtctttgccatcaacatctggcacctcattcttctctagaggtttcttgtatccgatagaaaagacggggttcatccaggagaaggtgacaagttcaagaatatttgctcttccatatgggcatggccgtttgacttctgcctgctgtcccacagatggattcaatagtgcctctgttacgctgctgtctgtgaatctgattcctgttttccccctgactgaaattgcaaacagataagtgcaaacaacaagcatgcacatatcgatccattcttcaaatcctatatcttcatgggttgccaaaattgacctgagatcaaatacaacgatggcaac

SEQ ID NO: 203305 - DNA, 325 bp, Zea Mays
gaaaatccagtttctgcatgagcttaaagacatcagggcactctgtacaggaccttggttgcttgctggagattttaatatgatttatcaggtggctgacaagaaaagctccaatcagttttcggagttttttggatgatacaagtcttaaagaaattcctttgcacggtcacaaacatacatagtccaacgaaagagcttctcgtacccttgtgaggcttgacagatttgtttgctgctctgattgggaagaattattcccagaatccctcttgcaaagtgcagcagcaggggtgtcagatcactgcccccttactcttggcct

SEQ ID NO: 203306 - DNA, 358 bp, Zea Mays
gtgagtagaagagctaacccaaccaatagagtcatgatagattgcataatctgtctatacccatctaacatcaaacaaacttttgacccatatcatgtagtttatctcatccatatccatcttaaccatattccccaaccccgatgatatacactaacctcgaatcaatgtgaccaagaccggatatgaaaagatcaacatcgacaaggaaggatataacagtcaaagcgaatcccgagatgaatcaagacttaaacatttcggataaagtcttttccttgccataatatttcttacctcaacttgtccaagcttataacttacataataagtagctggatacctatgctctcctaat

SEQ ID NO: 203307 - DNA, 332 bp, Zea Mays
caaaatttaagagtctttttttgtctttaatactgattagcatgtgattagaaaagtgttagcatcttttatttctggccatctagtagacaagatttggttagagcaaggataggttgaggcaataaaggcagggcaagaaaagacttcatcttggatggtggatattgattcatctgaagttctgattctattcatatccttccttgtcgatgttgatcttctcttctccggtcttgatgtcttcaaccaggttagggataagaggttaagatagatttgtaggcagtgacttagtaggtagtgtagctggtttagtaggtagttataag

SEQ ID NO: 203308 - DNA, 467 bp, Zea Mays
ttggagccttatcaccggactaatcactgtgccacttgtcacgcgattgattgaggtgtcctcgccggagttcgccgtctttcgtagccgcgccatgtacttagaagagctaccgcatcacagtagatagccgtaggtattctgtccatcacctgagacgttgccccggtgaacgccacggtagttcgcgccggtgactcacccctctcttcgaccgctgatctctccctttcaaaatttggaaccatcgcccttatacactataaattgatggtgctgctagctctgcaaggttgtcacaaagccagagcatccacccctgccctcgattagccaccatagtaggagaattttgttcttcccccaaatatgttgtccgtgccacggtgagacgtcgcgcggtggccagccgtctccaagtccaccctctctctccatggccatgttttagcacccacacatccttg

SEQ ID NO: 203309 - DNA, 338 bp, Zea Mays
aaagtcgctagtatcgccatcacatgtttagacaaatgtcatcacatccttgtatatatccttgatgagagtaatgtacttagttgggactttgttcttctccaagccccaccacatgacatttctcggtactttgtcatacgtcgtcttgagatcaacaaagactatgtacaagtccttctgctcgctatatctctccatcaaatgtcgtatgagtaaaatcgcctccatggttgaccttccacgcatgaacccaaactaatttcaggtcacattgtcactcttgttaggtgatgcttgataaccctctcctagagcttcatcgtatggctcatcag

SEQ ID NO: 203310 - DNA, 362 bp, Zea Mays
gtttctaatagatcatttcagccttatgaatcccacattccatatcttcttcactttttggtaagcacaatgctttcttgtcatagtgtgacatggtgctacaagtttgtttatttaaggttatttctgttgaacttatgttttagatttttgaaagttaatttatgttttaggttgactacaacttgtatggaatggggcacatacatgtcaaaaacttcaagtttcgtcctccattgccagttgattttcatcctaagtcatctcttcgcaggaaggtgggattgttttactgcattagagctcaaatatgctgtacctccgtcttgaaaaattgcagttctagttctgtcccttagtca

SEQ ID NO: 203311 - DNA, 487 bp, Zea Mays
tgaagcactggcatgagacgggtggtgtcagcattgatgaaaatatcctcattgataaaacagtgcacaaggccatcgattctagatctgctgtattaaaggtttgtaaactttttggtatatttttcttgcctgcctaatcatttttatcttcacaaagcgttcctgttttgtatggcatcaaatgacaaatggttcatcctgaatttgctttaaactacacatgtcaaattcctgctcaactcaagattgataactattctgttgcatttaaagaaaatcctgctgcggcctaatgtatatagcatgttacatacttcaattggtttatcctctactgcagagatatattgcagacattgggaagtcctggcctgtgttcatcgtttgtggtggaattctccctgttttcctgtcagttatctggttgcttatgattcgttatttcgttgctgccatgacttggattacagtagtcctcttcaat

SEQ ID NO: 203312 - DNA, 282 bp, Zea Mays
ggcggagtaaagtcaacgaggaacttaatgccgatgaaaccgaatgaacgtagagaggaagggataagcaaaacatatatctcactaaaacaaacggagccgagtaggaacccaacagcagatgaagcgcctgtgttcatccagaaaggaggagaaaggaagaaagtgatgtaaagcgccacagttgggagaagaagcgagaagcaaggagaactggagatgtggccggcggatttctctggaaagcagctaccataccttttggccggaccctttttttac

SEQ ID NO: 203313 - DNA, 390 bp, Zea Mays
ctctgaatctcgctggtcctacgatcgggtccgaagctcggagagccagagccccacggcacggagaggaacgctggaaggcaggctagacatcggagggaagatcaaggacgttcttgaggtgggttcaccgatactttccactgcttcaggctctctgcgcgcgcaccacatctgctaataaattttctcgcctgatgaatgagatgagatctcgtttccttgcagaaggagggcctggcggtggccgacaacacaatgtcaggcaacagccacggcggtgtcgtcgctgctgcccggaagctgcacatcaggaggaaggcgtgcagcatggacttccgggccgcaaacctgaccccggccagccccagcatgtcgccgatgctggcc

SEQ ID NO: 203314 - DNA, 316 bp, Zea Mays
ctgggatctgcatagggagcaaggtccagggtttttcagggtcagtttttgccatccacaaccatctcattcttaaagcccagccaagtacttttaggctaaaaattcctagccctccaagctcaagtgaacgacaaactcttccccatgccactaaacggtgccccctctaacatccttcctcccacgccaaagaaaacccttcctaattttatcaatagctttaagtgctcctggaggcaagtcatcagccatggccagatatataagcatccctgtcattacaaattgaacgtgcacccttcttccagccttg

SEQ ID NO: 203315 - DNA, 426 bp, Zea Mays
ctttgacttgtcaaatatcctggctttcatgattacagcttgtaattactgtgagcatcagttccaaaaggacaccaccattatttgcaatatgtattttctttttttattttccttgtttctatttttattttcaggtacgtcctttgcaatgttatttgaaagggtggaattgaacaagtcaccagataaatggagagttcagaaaatcattacaagcggtgctgcttttggaagctacatagttcttactactgccattttttatagggttgcaacaactgcaaacccttttgcagtgagtgcttttccttccgaagaaagttaacatcttgatttcaaggtgatgaagagctgattatttggtacttggacagtgtaaattcaaacatatatcactgatgggcagtgatgaggaaatcagat

SEQ ID NO: 203316 - DNA, 434 bp, Zea Mays
gaacttgaggaaggtaattacctgccaaaggaattagcaaaggcaatgtcagtggtgaacttatatcagaagcagaagctgaaaaatgtgagtatttcacaatcagagtttttcccctttgcaaaagaaactatttctttgcagaatgatatcctgaatgccctttggtcacttccaaatctcaagcatgcgaagctgaaattgctgcacaccatactggatcatgattctaaatttgaaaggaagcacttagcaactttgaggaactacttgacagaatgtttgtttggatgtgatgatggtctaccagatgtggccctccaagccatagcctctataaatcagatttctagatgtcagcatgttgtgttaacggaagagagggaggatgctgaggtagatgctgtactgaacttgagcagtcatctcaaagc

SEQ ID NO: 203317 - DNA, 344 bp, Zea Mays
actgagagaggcagggtccatgagagacccattcttgaaacacagagtaaagaaatttgatctatctagcctagattggattgatgagattccagattgccctgtattttctccatcaacccaggagtttgaggatcctctggtttatctcagcaaaattgcccctgtggctgcaaaatatggtgatagttgcttctctgtatccttagttgattatattcttctaacaaggtcaaatcttgataatgatgatagacagagaactaatggctaacagatgtagttgcatgaactgatgaacacgacatgaagaaacttgcaacgaaagttgctatacttacaca

SEQ ID NO: 203318 - DNA, 379 bp, Zea Mays
cgccgagcgaagtcagaggagtgctggctcagatagctgatggcctcctgcagactccggatgctgaaggctatcggcggctgcttactcgggcagctaatcatcttctacccatcgctcatcccccgagcgacctgcgacacaccatcaagagacgtgcggagctccatcaatgcttcgcgcgaccgacgacacgaaaacgagataaggcgccaggaggagaatgatcgggaccatggtgttctggctcgaagtcacgccaccctagttgagtcggctacaacctcaaccagtggcccgatccggggacggtcgagacgacacatcaccgactcccctccccgggaccgacaccatgaacgtcgacaggaagacacat

SEQ ID NO: 203319 - DNA, 328 bp, Zea Mays
ccataacagcaagtcagcaactcttagacaatcacattttctggcttgtttttagtgccatcatcgtgtggcctccgtgctactgtcgtctactagcttgcaacctccacaatgtcgtcgtcgatggcggtatgcagcttcggcatggcaagcaacccttagccctagccaaggtaggtcagtcgagccgccccgtcctgttccgcggtccagacgttcgattccacttccaccgttccacgccacgttgaacataatgcccacatgttccattccattgcactcagccacccagtcgtggagccaccactctctctttcgctgaaag

SEQ ID NO: 203320 - DNA, 481 bp, Zea Mays
catgggccttgtcaagttggtccaacgcctctttgaggcttgactcgttgtcttcattcgcatacaaccttaccctcggggcgtcgtactcgaagtcggtggggaggactacctcggctctataagccatgaagtatggtgtgtacccaattgaatggtttggggtcgtccacaggctccagagaaccgcgatcaattcctgggaccactaccagccgagtcgcttgaggtggaaaaaaactcgaggcttgaggccttgtaggatcacgcagttagctcacttgacctatccatttgcacaggtgtgggccatggtggcctaatctacatggatgtggtattcgtcgcaaaattctgggaattttcttctggtgaactgtgtaccattgtcagtgataattgagtttggcacccgacacgatggatggcattggtgatgaacctgatggtctggtcggaggtgatcttcgtgataggccat

SEQ ID NO: 203321 - DNA, 366 bp, Zea Mays
ggaaaacatcttcttctgccatggggtgtgcagcctttgctcatccaactgggcgaggctacgatgatctgtgagtatgtgaaattccttgagttgcaagtaatgacgccaatgatcaaccgcaatcaaaatcgccaaatactctttctcgtacgtggacaacccttgcaattttggtcccagtgccttactcaaataagcgaccggatgccccgcttgcattaatactgcacccacacccaaattgctagcatccgtttctaagcaaaacggctgggaaaaatttggcagtgctagaaccggagctgacacaagagcatccttcagagcttgaaaagcttctgcatgatgagcagtccacacaaa

SEQ ID NO: 203322 - DNA, 304 bp, Zea Mays
ctgaccccaatgggtgtgcccgatctgctgctgatcccaatgtgggtgctccatctgttgctgatcccaatggggggtgctgcttgtgttgctaatgaagacgacggtgaagaaagaggatgaagttcctttgactcggaaaaacagtcgacagttcatcgctagtggtgaaagtagtggagttccttctcctgctttgtctgctctcattggtctgcaagagttgtccctagcgaattttgattagactcttgaggatatggttccagaggatttgttatcggagccagcagatgatggtgtg

SEQ ID NO: 203323 - DNA, 283 bp, Zea Mays
atttaatagatgtcgattaatgcaagtatgtcaaattaaatgttctacttcatatttgtataacgtaaacgcaataacttttcagtcatagcttcgatctcgtcgtttctttttctcgtgtgaccgtagaagcgagcgctattttgtattgcacatgttttcccttttatggtgtactgttcctttctgtttcaagaatgttgaatgcgtgttcacactcacttagataactttccatctgcggagtccgaggaggttacaggagaagccccttagtagcagc

SEQ ID NO: 203324 - DNA, 469 bp, Zea Mays
tagcttctttcaagtcaattgatgtgctcactagagtcctgaaggttgcatgccttcaagcacaagaaataaggaagctgtcccaagatgacttaaatcaaaatggttctcaatccagaaatgctcagacgacttattcagatgagagaattaagaacacttgtgcatttgtgaaactggctttcaaccttttcaaggagtatgccacaatatctgacattggaaggattacagttttatgcaatgctaattgcatcgagtgtttatttgatttgttccaagaagaatacctcaggaaacacatattggagcaagtacttgccttatttagggtaagtcgtatccaccctcttttcttatattgttctttatactattgtctggatcttaaacctctcctgttctttcttacaatcagttaccttcgtcatcagcacaacaccacgcagcaaagatgctactatgctcc

SEQ ID NO: 203325 - DNA, 459 bp, Zea Mays
aaacacaatcatacacttatttgtgaagcacaatttaaggaacgcctaacgcgtatagactcgacttataattatagaggaagtgatgactacttacagcatgtcatcacctctctacttaagccaaaacaatttctactatcgactaagagttctaagcattaaacacactgttactttccacgcgcaaataaacctcaacttaacactagggacaccgatggattattactaaactcatcatgcgcataacctcgtctcgcatacaaccatatggtggcgtgcactcgagacacttgaatcaatgtggcgcgaccactactatatgaactccgatactcatgttttaataattcatcctctatgcaactagcattttctaactactcgtcacatcaataaatatactccctatataatcatgaattccatcacattgcataaaacaattacactttt

SEQ ID NO: 203326 - DNA, 292 bp, Zea Mays
cgtgtacggtggcaggaggggaaagaaataagagaaaacaagtacctgggtgcatagggcaaatcatacacaaatggtccattgaagcccactttagcagctaggtgatgtcgcggcgtcgcgtgagagcctgctagtcgatgtggcatcgtctaagtcgaccaggcatccacctaactgggttcaggcaagccaacagaccatggcgtccattgctggctgcctggatgcctatgtgtcgcctaggcaacgtcgtgacaacactggtcacatgatcattttctgtctccca

SEQ ID NO: 203327 - DNA, 300 bp, Zea Mays
ttgaatctggtggactatttccttgatctggtgaggagcataacttactttgcctaatctgattagtctaatatcttcaattcctggcagatgtggtcgtaatcgtcgcggtgtttatattaattggcttattctgcatgcaacactatgggacagataaagttgggtggctctttgcacctttggtgctcctttggtttattctaatcgggagcgttgggttagtgaacatacgcaaatacaacagttctgttctaaaagcatacaatccagtctacatcttccggtattttagacgag

SEQ ID NO: 203328 - DNA, 334 bp, Zea Mays
caacacccaacaatttggtgggcatggggtgccgcaatctgtcaattacgtgcctgtgcatatgaaccaattcatgcccagcattcctgtgacgggttctttggccaccactgctgctcaaggcagtacgttcaggcctgcttccgcaggtgcagaaccagttctggagaccacacagttcacaaggccagtgcaagctcaggttgatcatagttaccgggtggtgcaaactccgctatcacagcttcctcctttgtcttctgtgcatcagcaggcaaatgatgcgcagaggcagaggtttggtgttcaacaagcgatgataagtgcagtaagc

SEQ ID NO: 203329 - DNA, 392 bp, Zea Mays
ccccaacttaattgcactaatgatcaagtggttcgctctggccacggtgaccgcgagaactatagcaagactgccgtgttcccggcgaccagaggctactccgtgcaattgagtgggtcgatgggcatcacaggcatacgagagcacctaaacacggtttgaagtgggcagagttttaccagaacaggccgaccacgacgagcttggttcgacggtggcagaaacttgatttggggaaaacaagaaattcggacactctggtgatcgattgctagcaatttctggtgactgggtatttgatgatcttgcggaactggtggagggctcaatttatagagagagcaagcagtggtgatcaattcggccgagccgtgctggcggccggagatgaa

SEQ ID NO: 203330 - DNA, 300 bp, Zea Mays
gaagaaggctgctagccgtcggatctgtgatctgcgatggagatgggtgtgtgtcgatgcgtgcttggcgacgtggatcctgtattgggcggtacagattagaagtagaaaaactcttcgggctgatggattctcgaccgtaaatgggagatcgttcgtccaccagtgcacatccgattcgcatagcacggttttaatcctgatcgttagattctaatctgacgatataacatcctagataccccctcggacggaccctttcgcatttaagtccctgtaaaacttggaaaccaacctgca

SEQ ID NO: 203331 - DNA, 451 bp, Zea Mays
tagactctttatgtatatggccctagaagttattctaagactggacatggcacaagaaaataggggactgtccgacatggaagtgaacctccgaaatagattgaagatgcgcatccttggctatgcggtaattgaaagggcacgaaacaggcaaaactcacgcatgctttggcttaaattcggagatgccaacactaaatttttccaccggaaagctggctccaggaggcgaaaaaatttcattcaacggttgcggaccggtaatgggtgggtcttctctcacaatgaaaaagcacaagagctacaaaatttcttccataatgctttaaagcggccaacccctagatctgtcgaccttaactgggacattatctctgaccagcagtttgatctatcaagcctcgacgcgccgttctccgaggaggaaattaagagaagtattgatctttta

SEQ ID NO: 203332 - DNA, 277 bp, Zea Mays
gggcgagccccgcctttatccacagagccatcggagttgacaacgtggcgagcggctccggagaaaggggaaagaagaccgcgctgcctgccatgctcgggattcagttggcggtggagacgaacgcgctgacgcgcgggcccgggtttccagtgagccgagctatcggcagctgaggggagaagagcgctgtccagtggggcccatcggccagagaatgctgtgagcgcgcgcgacggtctgaccgggcgggcccacagaccagccgcagagtcac

SEQ ID NO: 203333 - DNA, 276 bp, Zea Mays
gaggggtcgcagtgctacgacttttatgcaccacaacgaagtccgtatgagggcgatgttgccataattttcgggcggaacatgccgaccaatacgcaccataatcggaacagaggttggtgggatctggaggggataaattcgacagcttgggcccatgaatcagtgagcagaggtgaatgacacaggacccgcgcggtcagtcagtggagagctgcgaggacgtgaggtgcgcgcggcgaggtcagctgacggcaggggccccctgatcagtga

SEQ ID NO: 203334 - DNA, 564 bp, Zea Mays
cactgagcaagaagtttgttgaattacttgaattactggtataaatcgtgtcatcgttgttttagccttttaggtcatgttcatggtggatacctcataactttgtcgatttcttgagtgcagcaaaaaaacaaggaggaagacttgggtcaggtagtcattttgttccaagatatgcttgaggtggtcacaagggatataatggaggaacaggaccagctcggcacgtgagtagcttagtttccttttgttacagcacttgatattcttcttcggatattaacatgcatgacatgccacttatgcagatcagcttgcatttttttctgtcatagctatattgttctttctttttgtttgttagtaaaaaactaaagctggactgaagttcaattttgtttctacatacaatttggtgatttatcttgttactttttgtttctagtataaatgttgcagtagtttgtgttatatatattttttatttttcttccagactgttggaatctgcacatggtgcaaatagtagaaaacatgaaggaattacaccgctagatcagcaag

SEQ ID NO: 203335 - DNA, 273 bp, Zea Mays
caacggagaaggtcgagctgctcggcgacacggtgaccagcttgggttgttcggttggagcacaggtgcgacctgactggaatttgtcaaacggagttggctgtgtggctgtactgctgtagccaaaggtcgctactgttgtgcattgacttctactcatcatcaaagctggttagaaacgtcagcgcggtggaagtcaacggccttgctaatgtctagctcagcagaatcaatacgccaatatagtccatgctggacctggatgtaaagcgc

SEQ ID NO: 203336 - DNA, 282 bp, Zea Mays
aaaagggaagcacaaaatcaaaacggaattgcaggcgtggcaataatacagctgctgagaaagtttgcaaatcaacaacagtgtcacgtccaacttctccatcgaaagaagtttctcgctgccaaagtttttcggctgataggctgcatgcccagccacttcctattcctggagtacgccctcgagtaactcgtgcagttgctgatgtcaatgtttcaaagcccatattggaaaaacgtggcaaacctccactgcttttgccacttcctaaacccaatccac

SEQ ID NO: 203337 - DNA, 292 bp, Zea Mays
gtttactgtaccagtcactctctctcatgttagagtgttcattggcctggcccattagggtctctatgttacctgtactgtagctagggttagggtctactgtaccagtcactctctcactattggctcagggtagatgcagaaattttttgtctccattttattgttaaaaatgtctgctatacatatttaacaaaatgcatcgagtatgtgatgtgatagaatgtacgttgcaacaatgggacataagcacataactaacaccaacaagccacttgactacttccaaaag

SEQ ID NO: 203338 - DNA, 362 bp, Zea Mays
cctcaggtgggacagatagtcacaactcgcctgaggccatccgcgggcgggacaggcagtaatgactcgctcgaggccatctgcgagtgggatagacagtcacgactggcccaaggccaacctccggcaagacaagtagtcacaactcgctcgaggccatcctccggtgggatacgcagtcatgacttgctcgagaccactctcgggcgggagaggctgtcaagaatcgcctaaggccaagcccggtgggagacgcagtcacgactcgcctgaggacaccctcgagcgggagacataatcacgactcgtctgaggccaagcccaggcaggacagccagtcacgactcatccgaggccaagcc

SEQ ID NO: 203339 - DNA, 399 bp, Zea Mays
gaaagatgactagtaatatcaatgcccagctatgcaggccgcagagagcttaaatgcaagcttaacttataactgctggtgtcatcttttgagttttagcaaggaaaactcatgcactaactttggatttacttgagctagggataataacactattggatcctgagttcagactgagagacagttttgtccttgaaattgttttttggagataacctagtgatgccactgagtaggatgaaggatcaatatgtagtttcatgaagagaggctgctctgagatgtcttgcagtatgcagaaacacattttgtgtgcttattaatgtacttgagggccattatttgttacttatgtgttataataattattggagtaggacttcatgagggaaattgatg

SEQ ID NO: 203340 - DNA, 380 bp, Zea Mays
agtgtgagctcagttgttaagagaaatttggagaaaaacccaatcaaagatggactgttagactagttgaggtctgaaattcagcatgacagtgttttaagatgaactttgagctcgattttgaaggggatccaatgactttttgtgagtacacattatagaaaagatatagatggattatagctctacacctttgctgcagaaagttgacatagattccacataaaatcgggagaaaatgaagctccaatatgctctgtcagtcgctctgaataagtggttcccatggtacagtgcccaccagataaggtcgccagcaaacccaccgccggtggctttccgccgtgattcacgtcgccggcttcacgattcgcgctcgg

SEQ ID NO: 203341 - DNA, 315 bp, Zea Mays
atggatttgggagcaggcccccatacatgagagtaaactaactcaagaggacgagaagattcactttttgacattgggtaaggaagttgatggctcttggccttttgacatgaatcacaaactactccactatgagacttattagaaaggggtagactattatttttgatgacatgatctactatgacataggaaggatgaccaagacgactatgtcacgcatccactgagggcttgatggcggagaatacttgtttgaatctaacttcgtttggagacttgataggataaagacctccctcgcattttccttca

SEQ ID NO: 203342 - DNA, 313 bp, Zea Mays
aaaaagtatgttggtgctgatctgggcgcaaaacactggagaagaactgcctagcggtgctctctgcggagggtgcagacggtccgcgacctggggcaggagcgactccttctctgcgtacgtccggatggtccgcgcctggggagcggtcggtacacgatggcgcagaagttcgtcttcttcacattagacctagatcttgcctttcgggagggaccctgtcgggggaggagatatcctagggtgtgtcttggggtcggcagtccacccaagatgcctctagttaacgtagagccgaagaaatgtgaaggtt

SEQ ID NO: 203343 - DNA, 536 bp, Zea Mays
gtgagggagtatatgtagcataccttcgggcccaaggtggacggcggcagtcgaggtcaccgtaagatctagaagttgagcgtctgcttcctagtttggttctactcatccttgcatagtgggccttggggcgaagtatatgaactttggtttctacgggtgcatggctagggtttggtgattctggtcaataggcactatagagagctcatgtctcgattgtatgtggagactagggtttatgggagaacaggaggtgttggcttatgtgttgacccctacctcatatttatagtgactgtaagatagggggcacaactagtgggataggattgtgcctttaatcagggcacgagttcgttcttaagccaatcctttgaccaagcccgaggtcatatccaacattccccttttgttctcggctttcttgttctttaactttctatattccaccctttgacaagttgacacattaagcccaatgcattacaaagatcaattatgtgtcaatgaactcattgactataacattcccc

SEQ ID NO: 203344 - DNA, 362 bp, Zea Mays
tacccagttcgctagaagaggcagggtacaggatggtcaggggccagttcaggaggttcacgtaccgggaactcaaggacgcgacagggaacttcaaggaagagctcggccggggcggctccggcgtcgtctaccgcggcgtgctcgacaaagggaaggtggtggccgtgaagaagctggcgaacgtggcggggggcgacgacgagttctgggcggaaatgacgttgatcggacggatcaaccacatgaacctcgtcaggatctgggggttctgctcccagggcaagcacaagctgctggtgtacgagtacgtggagaacgagtcgctggacaggcacctgttcggcacggaggacaggacg

SEQ ID NO: 203345 - DNA, 679 bp, Zea Mays
gaacttcgaagcccctgccaaggcctgtcccagtcgacttgcgcgggaagtgcttcaattgcttctcctcttcccatcgtgctgctgcgtgccggagcttagttcgctgcttctcctgccgacagcctggtcaccgggcgctctcgtgcccttcccggcggtcgcctctgtccccctctcgacctgctcgggtgtggcgctcagtcagtaggggggccgcttctctgtctggacgtgctcaggtgtggcgtccggtctccagggagtcctcttcggtggcgactcctcccggtgcgatggaggcagtcctttctagtgggctgaagaagcgcactcgtcgaggacagaggaggaggaaggttgctggtgttgtttctggtcaggtggcatctgatcattcgcctggagggcctgctcgtattgtgaagttccttcgtcgctccagggagccctatttaataagtcaaccttccagttaggtaatctgtcagcaatcttatccaccaggggccagagttgttggttggataatctatgaagggatagaggaaggcccagatatttgcaggggaaggaggcaatatcacaaggtaacatatgctggacgtccaagatagtctcctcagagcaccttatagggtaaatattggatttatgagtattgttatgaagcccagag

SEQ ID NO: 203346 - DNA, 398 bp, Zea Mays
gaggatctctcgataccgcttcccctctctggtggactcgaccccctcccacaagtataagtgccagccaccccacctctcggctcatcagaaactggatgcgaactcgaagccaccgtagccatgcaagcaacacacgccggggagggagctcagtgtcaccgtgggtatttcacgcttgtgcgtccgaccgaggtgattggagggtcgaggaggtgctcgcagaagcatacactacagaatcggggcacacggcgttgagtcggtttggagatttttcaccagcggacggatcgtcgccgcgtttcgccctgccttggatcggagctgctatgctgcaatagctggtaagatgcttgccctatcgttcatcttccttccctacatggtttgcttct

SEQ ID NO: 203347 - DNA, 1000 bp, Zea Mays
gagaacaccagaggaggtggtggatgagagactttcagactcttatcagcccacaatcttggctagtgcaaaaagtaaaggaggacaaaacactatgtggacatgcagtgggctttgttcttctatgagtgtggtgtacctttcaatgccgcagcagctaggcagttttagattgcaattgaggccacatcacagtttggttcagggtataagcctccaacaccttaccaactaggcgagccattgctacaagaggctgtgaagtcaacaaatacaatgagggaggaacatgagcgtgcatggaaacaatatggttgcacactcatgtctgatggatagtctgataggaggggacgccatctcattaatttcttagtgaacagcccagagggcacttactttttagagttcgttgatgcatcaagtgaagtacatgatgcatacatgcttgctgatttgcttgagaaaaaagttgatgagattaggagagacaaggttgtacaagttgttactgataatggtgccaattacaaagctgcaggcaagcttctaatggagaggattcctgcattattttggagtccatgtgctgcacattgcttggacctaatgttggaggacataggaaacttgaaggaattcaagaaaccaattgcacgtgcaaggcgtgtgacaactttcatataccgacatgggagaattcttagagagaaaactggtggggatgatcttgtgagggctgctgccactcgttttgctacttcctttctcacattgaagagcttgtacaagcacaaggatgctttgaaggctttatttgcaagcacagcttggactgataacagattgtcaaagactagtgctggattggatgtgtataacattgtcttctccacacagttttggaattcagtagaagattgccttagagcttcagggccactacttattgtacttagggtggtagatggagatgaaaggccagctatgccagaggtcc

SEQ ID NO: 203348 - DNA, 310 bp, Zea Mays
ctccggagggctctttaacaaatgttcctctcgaaggggtatgtttggatctcgaccattggatcagatcaagggccgagaatagattgcgcccatttaaccgagtcgtgcacagatcaccctccgattaaaattcaacgacgcggatttaatgaaacctgaaccacacccgacccctacaatcaacaatcaacggtctgtcttaactcaagcgaatcggtatctggtttctaatcctagtcgcgcatttacgatcccacggctaccaatactacctaatcgcagccatctatcaagaaatcgatggccg

SEQ ID NO: 203349 - DNA, 363 bp, Zea Mays
tgggagtgttgggatagcaggcacaatcaaacacttgaaggtgtgtataggatagtgtggtgccaaagagggcaaataagggagtgggatgattgaccgccttagaggggaggaagttgagatgggtatcagtattcagcttcaccctatagttggcgggaagagacgcctgaaaaagaaggcaacatagcatgttagtgggggtgcgaatcatgtgtttggcccgaccgttctgaggggaggtgtaggggtacgacgtgcgagagccgtagttgaaccccgtgagaaaggaagaaagagcaggagacagagtggttgaacttgtgaccattgtcacactagagagcacgaatcgagttgctg

SEQ ID NO: 203350 - DNA, 301 bp, Zea Mays
tgagcgagcaggagtgcgtctgtgtccgaaccaccgtgccgtcttagtcgcccccacacacgcgtttgacccagatgtgatcgcgttcgcaaccacccctgcataaagccccatcccactatccatccccgtacaacaaccccactcctccagccgctcacacaacctcattctcatctacctcatcgcgtgcatgctccattaggcgtgcctttccctctcctttccctggccacaccatcccacaaggaccgacaccaagcaacagcgccgccagcaagcaccccatgccctgaaccac

SEQ ID NO: 203351 - DNA, 337 bp, Zea Mays
attttgttgaggagtatagggtgttgtggtgaagtgttttatgccttgttcagtacaaaatgtagtgaacatccttgaattgaactctcctcctctatctgtcctcaaggctttcaactcgctttctagctctacttctgctctctgcttgatcttgaccagacatgacaaagcttcaccttttgtcttcaggagttcaatccacataaacctgctgaaatcatcaactactaataggaaatagaggtttccacctactgtctgtggtctaatctggccacatagatcagcatgaaacaattctagacccctctttgccctgtaaagcgatgtcttt

SEQ ID NO: 203352 - DNA, 387 bp, Zea Mays
ttctccatagaaactatgtttaattcatcaatcttctttcccagctcctcctctagggcagcaacattttgattacacttcaaaatcattgcttccaattgttgcctatcagaaacaacatcatcaagttcaagcgacttagatgcaagctctagttccaaagattttattacttttctcaaccctgtaatctcagctgcttgatctttcgctacagatgcagactcttgtaacaggctaagatcaaatgataagccctttgttaattcctcttttctgattaattcggacttgagaagtgaattctgtgtgcttaactcctgggctgatacttcgataatgtctaagtcattggataacttgctcatcgtgtttatttgctcagta

SEQ ID NO: 203353 - DNA, 281 bp, Zea Mays
gtcagagatcatgggtgcgctcacctgcagctaagatcggtggtgataactctcgttgaagatggcttcctctccaatttgaagagtaaggcaagtgatgtttgggctgcgggggagcaacaacaatttgatggatatgttgatggcttaagcaggtgtgaggctttatggtatggtcatcagggtcgatttataggctgaggaatgacggttcacaatagaggacaaaatctcaatcggtgtactgtaagcggcggacgacgttatcagttatcacaatg

SEQ ID NO: 203354 - DNA, 297 bp, Zea Mays
cggccactccctcttcccttccccgagctcaattgagccagcgccgccgcgcccttcctccgctccggtgagtcccgccctcccctctccgttgaactctagtccaattgttgtagctcttgagcttcaccatgtcctcgcgagcacaacgcaccacccccttctcctattgcgcccggcagcctcaccggcgatctcccctatcgcggacgcccgccacctcgctgtggaccggcctctccaagcgccctccggccaaattggccctaccaccatgatcccctatccccacccgtg

SEQ ID NO: 203355 - DNA, 377 bp, Zea Mays
gtttgatggtcgaattttaataaacagagttctaatgtaccccatttgatccgtgatcaacggtccaggatctactccgaagcggtacgcctcggttctaatctggaccgtctgcttacatatcgacggccacgacgcgcagcctcatcatcctggcttgccctggcggcgccatccccggcgacaagtaaatcggccaccccggcatacaacttcactcacacaatcgctactcgaagaggaaggtcgggcgaacgacatggttggcttcttaccggctgtagagcagtagcagaccttgaccacgaaacgaagcggctccacggcgatgatgtactctggcgacgaattcccaatcactcactgatcctctatgc

SEQ ID NO: 203356 - DNA, 410 bp, Zea Mays
ctcatgtaagcaaaggagctgtcaaagaaacctatagggaccagaacttaaaggaagcaaagttgaaatcattgaattctgaagagctgttttctatgacgagcaccaaaccaccaaaagttcaacatgctgatcaggttttgtcttatgatggggggcgtatgaacagtgagttagttgaggataacacactctttagtggcaaaagaggtctgcctgaacaagaaaagagcctttctgatcaggctttggacttgggtgaacctgctagtgatgtggcctatattcagacttcagctgtaacttcaagttcttcaaaggcttcggtctcacaaaaaaagaagcagaccactcaagctatgaagacttcaccaattgagcctctttcttcatcaccacggaggaactcc

SEQ ID NO: 203357 - DNA, 500 bp, Zea Mays
tgtgcacaatgttcaaaatgaagaaaaaaagattgggtattacacaagaatcgtatcattatgcgctaatcggcggtgggggcattcctagcctgcataggtgtcatattgttatgtgctagttgggaggttgggatgcctactctataggctgtttatgcatcatgtcgttatgtgctagttaggcatcttggtggtgcctagttcctaggttgctactgtgtagcctgttatatggatgttagtgcaggcgagcgaggtgaggaagagggggcatggaggacaaggtggtggtgctggcagttcacatttgtaatggttggagaagtggtctaaaatgagggggaggtgagaatgacagcgatggtcatagttctctgcagctaaggtcaacttgacatcatccaggtgtctgtcttgccacccgaatggctgcctaggtgttcggcagcataggctgtaaaagcgaaggtcagccacctcgtagtgctgattttttt

SEQ ID NO: 203358 - DNA, 330 bp, Zea Mays
ccgcagcagtcccgtggtggtaacacaaccagaggcaggggtagaggtcgaggcccataggagcgaaggttctattgtcttttccatggcgaagcctcagcacacccaatcagggactgccctgaaaccaaagccacaaagaatcgaatggctagaaaccaactggctgacaaccaaagagttgtcacccacacctaccatcctcaacagtacaaccaacaccaattccacaatgaacattagcaccctcaccagcaaaaccacaacatataccagcaacaccaagagatcctagctctaccgcctccaccaccaccacatcacccaaat

SEQ ID NO: 203359 - DNA, 366 bp, Zea Mays
aaaatggtgcagtcctcctgcgcattcgagaaaaaaaaagattggctccacatctgcaccattgtgaacaaagcatttaatctcaaacaaattggggtatgcgtgcgctagtatcatgtttatgagcctgtagagtgtactaccaaactggacaggtgtaagccattgcaggggtaggcaataagggaaactgaacagccgctggtcaggggcatcaaagaacagaacaaaaggcttcagaatcaccttctctggttctcttttgtgctgcctcttaccctcagttctgatatctgatctgattctactgcctgttctcttttttcatcaggagagctgcatatctttgtattagagagaggaaaa

SEQ ID NO: 203360 - DNA, 301 bp, Zea Mays
tgtgccgcactgcactcatgaatatgtattattcttgtattcaacagggacttgtgccgcagcagcctcagtttagcacaccgccagcacagctacctgcccctggagcacaggtttgtattctaactctatagctatcgccgacagttcagcagttaatatgtacgatttctgacaaattgcattctcgctccgtaggacaatcaggaaggaagtggaacgatgcatggcttcgtcaactcgctattcgcgtacccaactccgtacggaggcagcggccaaagctccaacaacccaagcc

SEQ ID NO: 203361 - DNA, 878 bp, Zea Mays
ccaaaatctgtgaaagagcaagaacaagagttggtacctttgcccttatctggaatcaggaagagttcatttcctaaagtggacagtgaaattgaaaagaggtgagtcacttgtgtataaagtacttggggattgaatctccagttcacatggaatatgactgtgtgtgcaaaatttgctaacacgcacaagttccctgcaatcagacctgatgagggctttggaattttgtttgtttatcaggtctggcgagggcattgaaatttctgttttttatcatgtcacagaatcctcccatcttatgttatctcatgttttcatcctaatgccatgtgtgcacattctatatgatgatgaaaacaatgtttgaagtccgcatactgttatatgactgagattttccatttgcagggtgattagcatactgggaaatgaaatctcttcgttgacaataaaagatgtaacaaggaactgcagtttgccatcaactcatgtatactctggcagaccaactgacaagatgccactaggaaaaattgagcgttctgttcaggtgcttccttgttccaccatatacagattaaaatttatgcctgtcattattttgtttgacattttgaggatgtcattttaggctgtagaagctgctttaaaaaagctgaaaaatggaggtagtgtcaatgatgctaaagcagtatgtgaacctgatgttttaagacagcttgcaaggtggcatgtaagtaaatactgaatagatatttacccattattttgcacaactgtttttcttgccatttactgcagtgcttcccttcttactttgaaatccctttttgtacgtcttctgtgtaagcagtcaaagcagatctgcaatagat

SEQ ID NO: 203362 - DNA, 349 bp, Zea Mays
ggcccaaggggtacactaggatccgagccgttggatcgtgattcatccatccagattagacgcacccatgttatgatccggggtgcgatcctaacccttggatccgagatccatgactcgatcacgtccgatcccaacccgacgacccggatcaagtgcaacaaggggtatctaaacatcgaatcacaaccgtccacttctgatttaatgaggccaagacccgactccgatcgccgattgacggacggacggtcacgatttactccccccaacgggtattcccacgcctaatcaccaccacccatctacggatcgacgacccgcagagcaccagcgcgcacgactctcc

SEQ ID NO: 203363 - DNA, 296 bp, Zea Mays
gcagtgagatcttttctggtgctggcgatgtgatcctcaacggtcaatgtaccatgggctgcagcattcagtcaacctgacagccatagtttaggctcgattttctcacaaattttcatggcaacatacccaatgatctgcagcaaagttgtagaactacaatccatctataactttgctacaatgtgctcccacaaaaagtcactggatcttgcttaaaatcaagccctaagttcatgtcatcccactgttaatctgaatttcagacttcaagcagtctgacagtccaacttcag

SEQ ID NO: 203364 - DNA, 302 bp, Zea Mays
ttccctttttctttctttgttccttcaatcgttcctcaattaactgataatagtcaattggaacccttgatttctcgccttatcactcggtttccctatcattttcctgcatgtctgcccctttcgcgcttccccttggattcaccacctgcccatccctcttgcgactggtccctctattctccatgagcacattcctatggtggactgcttccatccttcaggatgcccaggcgacgtcatactcatacacaggctgctaaggcgaagagcacacacacaggagacaggaccgcacacac

SEQ ID NO: 203365 - DNA, 467 bp, Zea Mays
tttaaaaattggtctccagttttacttcgacaataaccgtcatacccttctttgtttaaagaaggttagctttgttcccgccattttacttcgctcgcgttcgtacaaggtttcattatattacattattactaatatcagctagcgaccggtgacgctacatatgctcctcatgcatatatactatccgatcgtcatcattatttattgcgctgaggcaaacaacagcctgggcactaggacgagaagtacgtggacgaggcgcgagagctggcctcctgggcaagacgtcgggccagatacgacgtgcttggctgaagacatggaggcctgggcagtaagaaggctgggcgtggagttggccagatgagctgctgggaggatgaagacggcatgattgctcggaggattgcgtggagttgctaatgagacggtggcattgttagtaattcttttccaacttatta

SEQ ID NO: 203366 - DNA, 744 bp, Zea Mays
ctgggagatgcattgtccatgaatcggccttctgaagctcctccaacgtctgttgaagagcttcagaatcttgcaggtggagcagatattaaggtactgaaactggatctcttgttgctatcggaacttcaaaatatgtctcatgtattgcattggttccatctaattttaagagttcttttacaggggctggaagctgttctagataaggctgttgaacttgaagacgggaaaaaagtgtcacggttcgttaagcttgttttaagttgtgcttagtaatctgggtttttgcttgtcgaaggtgatgctttggggacttagatgtgacagtaactaactacctttgcccctccccctctgttttttccagtggaattgacctggacactgtgaatataatacagcgtgatgcactattgctctttcgaactctctgcaaggttggttgcttgagtaatgttactttagtgggagctatgagaaagtagcaattatatacttcctgcgttttgtcatccttttagatgagcatgaaagaagaaagtgatgaggttgctaccaagacaaggctgctatcacttgaactgctccaggttagcttacttctttggggttgctaatgttcatttttgtttgttttgatgttatttgtagtcattctctttagggattgctagagggagtcagcaatgtgttcatcaaaaattttcacttcattgattcagtcaaagcatatctttcgta

SEQ ID NO: 203367 - DNA, 324 bp, Zea Mays
tgacttagaagacttcgacatgtgttgattgttttggcttgcttcagctgagagccttctcttttgggctgttccggaactgggctgaacaactgaatgggatgctctactttccccttctccaagtacttcaacttcatcatctttatcaccatccttatcaccatccttatcatcatccaagtcaataggcttatgtctagcattcttcttcaaataatcactcatctctttgctgattgccgatcttgtctttgggcacttagcaacatcaccatgaccaccaacaaggtgctgcttcaaccttctaacacctgcatgaac

SEQ ID NO: 203368 - DNA, 314 bp, Zea Mays
ggaaacgcgcctcgtccggtcggacggaagcccttcttcccctccccatccgccgccactgccccgcgagattcggcgagaattaaaggcaccatatcctgcctcctctctcgtctccctatttctctctcactccccacctcccgcgcattccgcaccgataggtaggctcacccggactcgtctcccgctcccccctcccttttcccaaaaccctagcgggtttcgacctcccaggccaatcagatcgaccgctgccgcgcgcaattgttgagccatcgaggtaacgtctccaatcgaatatctctacctgg

SEQ ID NO: 203369 - DNA, 493 bp, Zea Mays
gactaaaaggtacaaacgaactagcccaccagggaagtcaaccacacaagccaccaaagattaacgggactgatgcgcccaccatcctcaacacacaacataaaatattcaaccattaagggttacttcaatgcacatcagaaacacatattcagtcattcaagattaacttcagccatttgtcgttattaaaattttataagaaagaaacattcggcaatttaagatttgattcagctattcagggataaacgttcaacaattcaaggtttactttagtcatataagatttactttaacatgcaacatgaataaatatttagctactcaaggtttactttaatcactcatcgatgttaaattttataacaaagaaacatccatcaattaaaggtttactttagccatttatggataaacattcaacaattcaaggtgacgagtcgagaacgggagacgactgccacggcggattagtcgtggcacgacaggg

SEQ ID NO: 203370 - DNA, 384 bp, Zea Mays
tggacggcgcggcgccagcgtgccacctggtggtcagggactacgggcacacggacatgatggacgacgacacgccgggcgccagggggatgctcacgcgcaccatctgcaggagcggcggggccagggcgcccatgcgccgcttcgtggccggcgccaccgtcgcgttcctcaagaaatgggtggctggggacgccgcggcgatggacagcatcacggcgcggccggaccaggcccccgtcgcgctgtccgtggtggagtttggagatgagaaagcgatagcttagctgctagagaatatgtgatatctgcaggcactagccactcaggcaggttggtgacgacgttgaaattgcagatgaaattaactagagtctagagatg
